United States Patent Application Publication US 2017/0114356 A1 - sequence listing, part 59

SEQ ID NO: 79871 - DNA, 3718 bp, Zea Mays
gtggcggagacgaagaagagaaccgaagaaggttccctcacttcccttgcctcgacgcgcccaaccacgccacgaagccacgcgcccgccggcggctcacctttcccgtcccttcaccttccccttccccttctccgttcggtgaaactgcgggagaccctcgcggcttccccacctcgacctccaaactctaaccacagacgcatcgaaaaccctcggtgcccggccgatggggaggaggaaggagcgccgcctggctgccatggccgcggcgggccgcagggtcaagctggacctcttcctcgatctcccccccggggaggcatcacataatgatggaataggaggtgaaaaccgtgaccaacagactgtggttcccacttcatcttcagcatctaagcatggggatttctggatgtgattgttccctcctcgataaaaaggagaatcctctagcattgcttgggcaatatagtgatgatgaagaggaaaatgaggaaacaacagatcaacccactgatgaagctaagaggagtcctggagatgctagtgctaagttatctagtccgtgtgtggatacagctggtaataatggcgtggcaagaactgaaccatcggtttctgtcggtgatcaacaagaagcacctcaagctggtgatattaagaactatacccaaagtgttacagaaaacactattgctcccgagccaattctacaagacgagaatgtgaaatcaactgaatctgttcctgattcatctggcatgcaaattgttggtgaagtcggtggaaattggagagcaataatgcatgaacagagtaatcaatgttattactggaacactgttactggagaaacgtcttgggacataccaaatggattagcttcaggagctgcgactgcatctgttccttctgatgtgggctattcaatagaagctcaagcccatgttcttcctcacagcacacttgaagcgtacccaagtgacatgtctgtcgggaatggcacatcaacttttgctaattttggaatggcatgtggaagtgcacaggttactcaagatgcttacgcttatgctgctcctatcgccagtcatgagcctatggacattgatcccttgtatcttgcaaaatatggtgatgatttgctgcaaagattgaacctgttggaaaggctctgtggcttgaatgaaggtcttgaattgataaggagagaaatcgggatacggatatcagactgcaatgcactttcatcgtatgggtcttctttgctcccgttgtggatgcatgctgaggtgcaccttaagcaactagactcttccatttctaggatggaaatgagctaccatgcagatacagaacataggaattctaagacagaggttgttgaacacaatgcacctgatggagctgacctgacaacaccctccaatggtgaggctttgaaatctgaggttagtcctgggattactatcgatgaaaatgtggagattgataagccaacttcgatattatctgctcaggattcacaaggtagggatattgcagcagttcctccaaaagttgaatctgacaatgaccaagatatggatgtggaaatggaagttgatgaagataacgtcgaagagcaggcacattgcagttctgtacctaaaaaggagcatcctccatcagaacagttgagttcaactaatttgccatcatttgaagatcctacacctgaggataattctgtccctccgcctccaccagaagaggaatggattccacctccaccacctgaaaatgaaccagctcctccagaccctccaaaagagccagctgcatcatatgttcaggtggatgccattcctcagccatatatcgctcaagaaaatgttgggtatacaatttcaggaatggagtactatggtattgtaggtacagaaggtacaaatgccaattactatatgcaagtgagtgagcctcatgtccttcaagcacaacagcattcttattatgcaccagtatctgggagtggcgtatctgtttctgttgatggcacatctattgccccagaatcttattatacccatccttcagtcactatggctgccagcgcagtagcagctgaacattctgtatactatgcttcatcaatctctgccatttctagcagcgcagcagatatcaaaacaagctcagcttctcttgtttctgcaaatagcaattcagatctcaaaggtcctgataaacttatatccaatgatgcgagtattgtacctttgacccaagctgtagtagcaacatcaggcgcaggaacgccatctgtcctgggaagttctacacagccttctagcagtactaaaaatctgaccaaagttactcgtaacaagaagcgggctgttggtattacctcgtctctgaggtctaataagaaagtttcaagtttggtggataagtggaaagctgcaaaagaggaacttcgcaacgaagaggaagaggagcctgaaagtgctctggaggcattagaaaggaagcggcaaaaggaaatagaggaatggcggaaacaacagatagctagtggagaagctcaggaaaatgccaattttattcctgttcgtggtgattggcgtgaccgtgtcaaacgcaaaagggctcaagcaaaaaatgagtcaaaagatgacattgttgctgcatctttaggtagttccgaacagcataaaggacctcctgatctagcagagctctccaaggatcttcctactggttggcaggcatacttggatgagtatactaagcaagtctattatgggaacaacctcacgtcagagacgtcctgggagcggccaacaaaatgaaaatctacagccttgtgcggtcacgaacagtaggataagggcatgtttgtttggaattctaatgtgttcggattatataatccaatatattttgaactacttaggctctgtttatttcccttctagattatataagctgaattatggtgaaaggttaagagggtaaaataacacattgggatcataaataaactaaaataagctactcaatactagcttatttcagcttatttatggtcctacagtgatattttatcctcctaccctttttattataatccaacttatataatcgagtaaacaaacgtacacttagttcaaaaatattgaattatataatctggccagattataatctcaaacaagcatgtcttaatttaaccatgtagatggtgctgtacaatgggcagatcaattttgttgtagatatctcctggagttttaaaagaacgaacagaagtgccaaggatgtttagagaatgaaaacggaaagtgaagttcttataatgaattaatgatgctcagtttctagttttctatcttcgtgctacgagaagctccaacatgatctattttgatgattggagagcacatagtcactcaaatttctttcatagttttcatttctagggctcttattattcgtttgtaagaaataattggtgatgtagtttgtaaggaataaggtgatgttcttcctcaagctttcatttttagagctcttgataatgataaggaccttgtacgtgttttatttgacctaacaagccattttacataggttggtgtactatcttcatttttttaaagattggtagcgtgattcctcaataaggtaatgtagtttgtacggctatatgcagtagattgtgtaaaat

SEQ ID NO: 79872 - DNA, 1496 bp, Zea Mays
agatttgtcctaatacccgttttgcagccctgtcctcccccgccctctgcccgctactggcgtcgaaactgtagaatcggggaaaaccacgaatggagggtgccgtgacggagaatgcagcggtgcctgtgcgagcggcggcccctgaagccgctgttcactcggatcagcatgtggagagtggtgcgatggtggaggactctgcggcgtccacggtggctccagagtcaacttctgacgcagatcaggctatcgaggacgcagccccggaggacggggtggacgaggatacagtgacaaatgttgatgtcagtcctgaggacatgagaagcatcattgaagttatagctgacaccggaaagttctggcatgactggaggttcctcaagagtgtactgtctattcaattgaagcaggtcttggatgaatattttgaggttgaaatggtgagccaaaatgatgggcaactgaggtctttctcagagctatttagtcggctaaatggtgcccttgaaaggtttgaagagggtcctccattcacactgcaaaggctttgtgagattttgttggatccaaaaggaacatatacaaaattaccaaagcttacattggccctggagaagctgctcatgggctgccatgttcggattgcacgcaaattacagaaatttctgggcctgctgatgtagagtctgtgagcacacctgagcatacaacagcagtaccaaatggaacagagcatgtagcaggtgatgttgacggagagatggctgaagcagaagctgaggaatcatctggtagccacgacatagagatgcaggaggacaagcgtgatcaggttgataatgttaatgctgatgctaatcctggtgctgcagctgctcctgaagcagttaatgccagtgaatccacatcgcagccacaaagttgagcttgctagaaaagaaagtcgcagaatcaagtttctagtacagctgtccatttagcaatttgagagtattgctcgccaactcttgggattcgctccttgcttcctcaaacaaccagaaagggaatgtggattcagaagttgacaggattagccgatcatactagatgttgatcatcctgaaacactttaaactttccagggaatgccttactcacaaaggccatggtatgttttgatcaatcgtacctttctttctgcgtcaccacataggttagaaattctgtgtacgggttgccaaaatccatgaaggatgagtaaaacgaatatcttcactaagtcgctgatgtatcattagagtgaatttcatgcacgtcttgccccatctactccagtatttattactgaaccttgaaaaaaatcccagtccatcgttcatttgtaatgactttgccctgatgcattcactaggttaagataatgctaattttttcttcattttctagtttcctagcactagagcaaatattttctgtctgaaatgtcaacaagtcagtgtttattgctt

SEQ ID NO: 79873 - DNA, 1227 bp, Zea Mays
agatttgtcctaatacccgttttgcagccctgtcctcccccgccctctgcccgctactggcgtcgaaactgtagaatcggggaaaaccacgaatggagggtgccgtgacggagaatgcagcggtgcctgtgcgagcggcggcccctgaagccgctgttcactcggatcagcatgtggagagtggtgcgatggtggaggactctgcggcgtccacggtggctccagagtcaacttctgacgcagatcaggctatcgaggacgcagccccggaggacggggtggacgaggatacagtgacaaatgttgatgtcagtcctgaggacatgagaagcatcattgaagttatagctgacaccggaaagttctggcatgactggaggttcctcaagagtgtactgtctattcaattgaagcaggtcttggatgaatattttgaggttgaaatggtgagccaaaatgatgggcaactgaggtctttctcagagctatttagtcggctaaatggtgcccttgaaaggtttgaagagggtcctccattcacactgcaaaggctttgtgagattttgttggatccaaaaggaacatatacaaaattaccaaagcttacattggccctggagaagaatctcctagttacatctacaataacgaagtgcactgacccatatccagctgctcatgggctgccatgttcggattgcacgcaaattacagaaatttctgggcctgctgatgtagagtctgtgagcacacctgagcatacaacagcagtaccaaatggaacagagcatgtagcaggtgatgttgacggagagatggctgaagcagaagctgaggaatcatctggtagccacgacatagagatgcaggaggacaagcgtgatcaggttgataatgttaatgctgatgctaatcctggtgctgcagctgctcctgaagcagttaatgccagtgaatccacatcgcagccacaaagttgagcttgctagaaaagaaagtcgcagaatcaagtttctagtacagctgtccatttagcaatttgagagtattgctcgccaactcttgggattcgctccttgcttcctcaaacaaccagaaagggaatgtggattcagaagttgacaggattagccgatcatactagatgttgatcatcctgaaacactttaaactttccagggaatgccttactcacaaaggccatggtaattgctttttgaagaagac

SEQ ID NO: 79874 - DNA, 1647 bp, Zea Mays
catggtcatggtgctatcgcaaccccgccgccccactcgccgccatggcgctctagttgtgaaagcgtgcaggctttccatggaaggcgcctagatccactctatctccttcgtggtcctatcgctaccgcgccgccccactcgccgccatggcgctccagccgcgaaagttggcagcctactggatcttggcatctcaccgtcgccgctcacttccgctccatctgctgtcggaggtgcttaggatgccccagcccgttgcttttgtctccgtgcagccgtccgatggtcaacccacaccgagcaacgtcttgaacaagaagatgaagcatggtggcgaggtgatgttcttggatggcgccggggaggtcgccgtcaccatcggtcgcaactcgcaacatcctctctccacagcccctccacccgttggtaccaatgttggcgacattggatcgtgggatgttagtaccaaagacagactcgttgtaaggaacttcaaagtctgggacctcagtaaatgtacaataattctccaggcatcactggttaaggatccagttgtgtcagttaatcgcataatatggagtccggatggaaccttgtttggtgttgcttattcaaggcatattgtacaaatttattcctataatggtggcgacgatattagacaacacttggagctttctgagaatatgagcctgaagctggataagcttttgagtagctccactaacaactttgggcatctggcttggcccctggcaccctgttctcatcattactgcaagattttatctgtcagacctgttgctgcaccttattcaacaataataaatttcagagtagaaggttttaacctactcagtacttcctcaagggacgagatggaggaggtggacgagcatgaagggcaacatggcatcattagtaggaagcatcttaaagagatgtctattatgctacatgttaaagaagttgaatctcctagtatgctatatgttaaatttaaagagaggtatatctcacggttgttacattacttattgttgatatttagaatgtaaagaaaaaggagaaagaactgcaggttatggaagctaagctaaacaaaagagaatgggtatgcttccttatcattgcagagctctgtatctacatagattgatggagtacacaaattaagcttgtattgatagaatgatagttttatgaattggcatttggattagggtgttttgcatgcagaagatgtccaaggtacgaggagcgagccatgatcgccgccaggcatgaggagcaagccatccttgttgagtgcaaggcagggtctccacctccatgtgggaaacggaaggaccgggccaagtcactggaggggagtgcaagggcatgcacatgcccggacacactcctgaccaagtcaccaagagggttgtttccatatcctgtttttatattaattacaacatgaagcatggtttccctaatttgttcacagatgtattgcaagtttcatgttttgctgtttttgttgacacatgtgtgtgatttggaaaacacatgtcttgtcttgtgcttccctgcatcgagaacaatgtaatatattactatatcttttctataatacaatgtaatatatgatcttac

SEQ ID NO: 79875 - DNA, 1512 bp, Zea Mays
cgcaaccccgccgccccactcgccgccatggcgctctagttgtgaaagcgtgcaggctttccatggaaggcgcctagatccactctatctccttcgtggtcctatcgctaccgcgccgccccactcgccgccatggcgctccagccgcgaaagttggcagcctactggatcttggcatctcaccgtcgccgctcacttccgctccatctgctgtcggaggtgcttaggatgccccagcccgttgcttttgtctccgtgcagccgtccgatggtcaacccacaccgagcaacgtcttgaacaagaagatgaagcatggtggcgaggtgatgttcttggatggcgccggggaggtcgccgtcaccatcggtcgcaactcgcaacatcctctctccacagcccctccacccgagccaaaattaccaacaagatgatttccataaaactgttgcacggaccttgagccaaggatcaacaccgatgagcatggattttcatccacttcaacaaactcttcttaatgttggtaccaatgttggcgacattggatcgtgggatgttagtaccaaagacagactcgttgtaaggaacttcaaagtctgggacctcagtaaatgtacaataattctccaggcatcactggttaaggatccagttgtgtcagttaatcgcataatatggagtccggatggaaccttgtttggtgttgcttattcaaggcatattgtacaaatttattcctataatggtggcgacgatattagacaacacttggagctttctgagaatatgagcctgaagctggataagcttttgagtagctccactaacaactttgggcatctggcttggcccctggcaccctgttctcatcattactgcaagattttatctgtcagacctgttgctgcaccttattcaacaataataaatttcagagtagaaggttttaacctactcagtacttcctcaagggacgagatggaggaggtggacgagcatgaagggcaacatggcatcattagtaggaagcatcttaaagagatgtctattatgctacatgttaaagaagttgaatctcctagtatgctatatgttaaatttaaagagagaagatgtccaaggtacgaggagcgagccatgatcgccgccaggcatgaggagcaagccatccttgttgagtgcaaggcagggtctccacctccatgtgggaaacggaaggaccgggccaagtcactggaggggagtgcaagggcatgcacatgcccggacacactcctgaccaagtcaccaagagggttgtttccatatcctgtttttatattaattacaacatgaagcatggtttccctaatttgttcacagatgtattgcaagtttcatgttttgctgtttttgttgacacatgtgtgtgatttggaaaacacatgtcttgtcttgtgcttccctgcatcgagaacaatgtaatatattactatatcttttctataatacaatgtaatatatgatcttac

SEQ ID NO: 79876 - DNA, 1610 bp, Zea Mays
atggcgctccagccgcgaaagttggcagcctactggatcttggcatctcaccgtcgccgctcacttccgctccatctgctgtcggaggtgcttaggatgccccagcccgttgcttttgtctccgtgcagccgtccgatggtcaacccacaccgagcaacgtcttgaacaagaagatgaagcatggtggcgaggtgatgttcttggatggcgccggggaggtcgccgtcaccatcggtcgcaactcgcaacatcctctctccacagcccctccacccgagccaaaattaccaacaagatgatttccataaaactgttgcacggaccttgagccaaggatcaacaccgatgagcatggattttcatccacttcaacaaactcttcttaatgttggtaccaatgttggcgacattggatcgtgggatgttagtaccaaagacagactcgttgtaaggaacttcaaagtctgggacctcagtaaatgtacaataattctccaggcatcactggttaaggatccagttgtgtcagttaatcgcataatatggagtccggatggaaccttgtttggtgttgcttattcaaggcatattgtacaaatttattcctataatggtggcgacgatattagacaacacttggagctttctgagaatatgagcctgaagctggataagcttttgagtagctccactaacaactttgggcatctggcttggcccctggcaccctgttctcatcattactgcaagattttatctgtcagacctgttgctgcaccttattcaacaataataaatttcagagtagaaggttttaacctactcagtacttcctcaagggacgagatggaggaggtggacgagcatgaagggcaacatggcatcattagtaggaagcatcttaaagagatgtctattatgctacatgttaaagaagttgaatctcctagtatgctatatgttaaatttaaagagaggtatatctcacggttgttacattacttattgttgatatttagaatgtaaagaaaaaggagaaagaactgcaggttatggaagctaagctaaacaaaagagaatgggtatgcttccttatcattgcagagctctgtatctacatagattgatggagtacacaaattaagcttgtattgatagaatgatagttttatgaattggcatttggattagggtgttttgcatgcagaagatgtccaaggtacgaggagcgagccatgatcgccgccaggcatgaggagcaagccatccttgttgagtgcaaggcagggtctccacctccatgtgggaaacggaaggaccgggccaagtcactggaggggagtgcaagggcatgcacatgcccggacacactcctgaccaagtcaccaagagggttgtttccatatcctgtttttatattaattacaacatgaagcatggtttccctaatttgttcacagatgtattgcaagtttcatgttttgctgtttttgttgacacatgtgtgtgatttggaaaacacatgtcttgtcttgtgcttccctgcatcgagaacaatgtaatatattactatatcttttctataatacaatgtaatatatgatcttac

SEQ ID NO: 79877 - DNA, 1379 bp, Zea Mays
ggatcaacaccgatgagcatggattttcatccacttcaacaaactcttcttaatgttggtaccaatgttggcgacattggatcgtgggatgttagtaccaaagacagactcgttgtaaggaacttcaaagtctgggacctcagtaaatgtacaataattctccaggcatcactggttaaggatccagttgtgtcagttaatcgcataatatggagtccggatggaaccttgtttggtgttgcttattcaaggcatattgtacaaatttattcctataatggtggcgacgatattagacaacacttggaggtttgactgcatgtttcttaattctttctacctcatagttttgcggttgtaggtaaattatgcattctctcagcatgtgacaagaatctgtgtcttcctttgcagttaaactcacatgtgtcctgacctaacacttgaatcctgatttttcagattcttggttggttatcaagtagccctactgatatagaaagtcatattagacatgattgtattattctaacagtataagttcatttagttgagtctgcatggcaacaagtatgcttcctttttaaagtcacatgtcaaaatagtgcatttttgtttggttattaatggtcttttctacagctttctgagaatatgagcctgaagctggataagcttttgagtagctccactaacaactttgggcatctggcttggcccctggcaccctgttctcatcattactgcaagattttatctgtcagacctgttgctgcaccttattcaacaataataaatttcagagtagaaggttttaacctactcagtacttcctcaagggacgagatggaggaggtggacgagcatgaagggcaacatggcatcattagtaggaagcatcttaaagagatgtctattatgctacatgttaaagaagttgaatctcctagtatgctatatgttaaatttaaagagagaagatgtccaaggtacgaggagcgagccatgatcgccgccaggcatgaggagcaagccatccttgttgagtgcaaggcagggtctccacctccatgtgggaaacggaaggaccgggccaagtcactggaggggagtgcaagggcatgcacatgcccggacacactcctgaccaagtcaccaagagggttgtttccatatcctgtttttatattaattacaacatgaagcatggtttccctaatttgttcacagatgtattgcaagtttcatgttttgctgtttttgttgacacatgtgtgtgatttggaaaacacatgtcttgtcttgtgcttccctgcatcgagaacaatgtaatatattactatatcttttctataatacaatgtaatatatgatcttac

SEQ ID NO: 79878 - DNA, 363 bp, Zea Mays
atgatggccgtgctgtcggtgggcgcaaacgccaggcacgtcgtggagtcgtcgacgtctatgagcacgttccgcgtcgtcagcttcatggaggcgccgcccgcgaacgccatgaccacggtgggcacgcgcagctgcgacgcctggccctcgaagcacgtgtccaggatggagaaggccggtgcgcgctgcgcccctgccatggcctgggccaccgccttgctgagcgccgtgtgcacagccgtcggcaggcgcgtgatcaccgtgcccgagtctatgatcgtgggcaggctgctgtactccgacggcgagaccgcgagtgggctcccgccgaccgacatcccggacagggtgatgaagtag

SEQ ID NO: 79879 - DNA, 10473 bp, Zea Mays
  misc_feature (1)..(1): n is a, c, g, or t
natttcaatatatcttatcataacatgttcacctagtaaatagataaaagctccttagtacaacaagaaagaacaatattgctattggttagaaggggcgggttttattggctgtgtgttggtcagggaatgggaatggcagtgggcgcgagagagacaggacggggaatgggaaaggaagggaatgggaacggcagctagcgcctgagaggacggggaatgagaatgaaaaagggagaacatagaatgggaatgggctgaaccaggaatggcagaaccagaaatgacaggctactcttgcagtcttaataagtagtagagataagaatgacaaatataaaaatggcttataagatgaaaaatacaaggatgcaaagaacacatgagatcaacatataagaggctaaaagggcttaaatgacgtcaattgatagtggaatctttgcatagcttaacattaaataaaaggacatctggacattgaacacccaagtatgtggctggaatttcttgaaagctctccttgagctattagtgttatgaccggcagcccagcagcccagcagccctagccctaataaattcagttagtttgttagatggataaatatcagttagtttatttagatggataagtattagttagtttgtttagatggataagcattagtttagaactcctgtatatagttggttagtttgttagggggctgctatcacaacctatatattgtaccctttggttaaggaagaaatcaagcatgcaatacttgcccgtgcttcccccaacccatctactgttcacccgcatacaattcatctgagggactgttcatacgcgacactattcatctacgatcactattcgataattcctagctccgccactgcttaggcatcatacatgaaataggaacaagtagaattattatatttaattacgctaaccaaaatttggactcgaggcctatggctctgataccatattgagatgcatgcaccaactaattcaaccaaaaagttttaaccgatggaaagggatggacaattcacttatatttctataatgaaaagaggcgcagtaagaacaagatttgtgaatgcttattataaatagaggtgattaacctagaattcaattgcgcattctctactttacagtgccaactttaaagatttctttgtttatttgtgtctgatatcataggaacatatttcgtctatatctgtaatgtatcatagctgggtgcaaatgtgagctgaaatgatcatgactcatgagtgttagactattagccgccgcccggtttccctagccgctaccactactgccagagccatggctagtggtcccccctctagctcctctccaccctcaccccttcctctccactgagccaccgtcgttgcccttgctgccccttcctccagccaccggcgcaacgacctctttagctgttgttgctggcacgactgccatagccggtgcctgcctatcgctgcctctgctcggcgcggggcctgggcaacccatgtcgcctctgtctttcctagtaggcccgtagacccccctcccgcggatctccctgtatcggccaccgccgctgtagccctagccaccgcctgggcgtagtgtgctagggctatggcctggccattgccggcctggctgcccctggcctagctacccttggtctaggcgtggctggccagggcctcgctactatcagcttggtcatcgttgcatggcttcgggcagcctggacgccgctccctccatctcgaacatctactttaggccctctctatccttcgtacctttgtcggatgctctgccacccatcgacgttgtggctgcccaatccagctttgtcatggccctcatgactgctaaggcagtagtggctgccgcctgggagcacgaacgcgtcgttgctctcgcctggaagcatgaacgcactgttgccgataccctcgccagtcatacgtccgctgtgcgaccttatcctcctcatcctgcaacactatgccctggaagaccatgtcctcattgacataacgtccctcactatcccctcctggcgacggatgcataatgggggggggggtcctcttctagatccattggacattcacttttgagctgcaggatgtcgttcgcgagtgtggcggcactgcccgcagaccttggttgccattgaggagcaattctttggcaattgtggggctcatgctcttcacctcaacgtcgcctttcagacctttgtctaggaggacctctccatcatcgagtattgtcgccagatgaaaggctggcaacctccctttgtgacctcggggagcctgtctccgatcgcacacatgtccttaacctcctccgtggcttcaatgagcgctacaattacctctagatttggatcactcgctcggtcccatttcccttgtttccacaaggtttgcaatgacttcatcctcgaggagatcaccaaggggcgcctcctcgcttcgacaccgctatcgctctctacagctccacccatgagtgccagtccttgcgcccgtcctcttctactcctaccttggggggcttgtcttcacgctcgtctgtcccctttggccgtgggctccacgcccctccctcctagcccaggcccggggcagggcgagttttaggtgggtctttgctatcagatgaagggtgactatgggggtgggggtggctagagggatgccccttcgccctttccctacaacccatggaccggctgcatctctatgtggcctggcttggcctgtccttgggtggaccttcattgcatctgcctccaccctagacggctaacctgacaataccccgctcaaggtatcctctcgaccctctcgccaccagcaccttagcccgctactacccctaccaccccacatcgttcctagaaccgatggttttagtgggtgggatttgcagtcacttactagctcgttcagcacgattattctaacttcttctatcattgactgggttgctgattccggtgcgtcctaccacatcgctctggatgctggtatactttcttcttctcacccaccgcttctgtctcatccttcatctatcataggaacattctcccggtcacctctgtaggtgatttggttcttctcggacctttctatcttcgcaatgttcttgtggcccctatatcattcaaaatattttatttgttcgtcagtttaccattgataactcttgctctattgagttttatccttttgtattgtccgtgaaggatctttctacccggagccttctcgcctactatgatagctctggcccctgtacaccttgcgactgcctgcgtccacttctccacctaccgcttccactacacatcgcttttgtcctcgccgcagtcgcacacactgactacttccactacctccagcacttggcatcgttgatctggtcatcctagccctgacgtgttgtccaaattgtgtagtagttcagttgtctcttgtactaggggcacctctgagcatctatgccacacatgtcagctaggtcatcatatttgacttcctttctctagctcctcttagcatgtgcatgattttgatctcatacactgatttgtggacctctcatgttatcagtgtttctggttataaatattatctagtggttattgacgattgctctcattattcgtggacttctcccttgcgttcgaagtccaacacatttgcgtctcttttgcacttcatcacttgggtttctacttagtttggccacactattaaggttgtccagtgtaacaatggccgtgagtttgataactcctctcgatcattcttctcccatggtgtctggctccagatgtcttacccctatacttctcttcaagcaaggttgagcacatgattcgcattattaacaacatcatgtgttccttgctctttgatgcatccgttcctgctcgctattaggccaagagcctccacaccgccacctattttcttaatcgccttactactaaggcagcttgcgcttcaacacccctctctgctctttttggcaccactccatcctatgatcatctttgcgtctttgggtgtgcatgcttcccaacctttttgctactgcttcccataagctttcccctcactccacccattgtgtcttcctcgattactcccctgatcacaaagggtaccggtgtcctgacctcaccactcatcatttcttgatctctaatcacgtcatcttcgccaggacaaatttccccttatcaacccctcccggcccacgatcgactctcttctcgagtaagactttcttcttgaacttgatctcgtggctccctttggtcagccaccctttatttttttcactgcaggttcatccctgttgccgccgcccgcgacacgtgttcccctggattccttccgggctatcctaccgcctaggtcggactgtgagcccctagatggcctctgctagactgccggtagcaccgttggccccgcctttgccctcaccttctctgacctcgcccacggcattacgaatctcccaggtgccctagctggccctagccccttctcgctacgccaaccctatgcatgtctatcagggacatgcacgggtgggtgaaccaccccgctcccgggcagagccgacagtgtatcatccccccttcttcattgtgaccctcgccgtgcccacctgatggtggcttgatagactgctagggttcttcgccctgtcaactgtcttgtcctctccacgatctccttcctatcagtctcccccgtgtcgtcttttgttcatagtgccctcatcgatcctcactaaagtcatgctatggaggaagagtgtcacacccggatttaaggaacaaagccgggtgcatctcatatatacaccagggaagacaacacatataataacagagtgcatagagataaatgtcataaatatcataaatgtacttgttacatagcggaagtcttacaaaataaatgataaaataaaacgagctaactattattccctggcgccacaaagctgcctgggagacaccacctagatcaagtcgaaagcctcagagttaggtggctcctcttcgaccacctgttcttctcctgtggggggtgtgagacagcaagagtgagctcacatatcttcatagctcaacaagtcgtggggaataatgtgcatgaactcaccaaaggtgggagttcatgtgaaatgtaaggctaatcaacaaaataaaggctgaagctgagcattgcttttataagttggtcaaaattttattagcagttactaagtgtaagtaaataccaaaccttagtcataataaataaaagtaacaataaaataatcccaatgcgatgcaaatgacaaattgagttttaattccatagattaatcatgtgagggtccgagctgctcatgactgtaagcacggctagtataccagttttacactctgcagaggttgcgcatctttacccacaagtcatgttacccatctgccaagagacgaccaatcccgtacacctctaccgaggaggcgaggcagggtaacactacgaggcctttacaaagttccactagcttcagaaaacccgctacagtttataggaagctccagtgcaggaatccctcgcctgaccgccatcgcagcaaaatcaacccagtgacctccctacactgaccactcccgtactgcccttgcccttttcgggtaaggaagtcatccactagctttcctagttaatcagccaaggacatcccatactacccttatggtagcactgttttcccggatggtcgctccatgttcccattaacataatgatcttaacatgaacagtaataataaataaagaataaaagtataatcatgaataatgtatctccatacccaaatccacataaagcaatagcaagtactacccaaaaatatttcagtagtaaaacaaggtataaagataaccaaaactggggtaacctattggatcccatcaaaattaacctatgcagatcattatgaataataagaacatggctgggtaaaaataagtgatcaagggcacaacttgccttcaatgagctcctgctcagcaacttctatctgctgaacctcaggatccacagtagcttgctcgtctactcgcatcaacacaatacatacatagtatagcaaaaattaacatcacaccaaacatgtaaatagaatacacagtaaaaatctacacattaaaataagaacctaggaacataaatcattaattttggagttatggattttaagttatgaatttccaaaggttttatgtgcttgaaatatgattaaatgagaaattaattttcttactgtttttctgtcaaaacagagacactagatgacaaacaataatattataaaattttagaaattggaatgaatcaatttggactaaaaatgatttttctatgcattttacaagtttctgcaattaatttaatactaaaattcattttctaattgattttatgaatattattctctgtctaggctgtgcctcaatatccaggaaagacatgagcttcattataagcttcccgagacacaatcaacagtgccactggaccacgagtttatttcagtgtttggcgggggctctttaacaaaatgtacccgcgaaggggtatggccagatactggccgttcgatctaacatgagcgctcagattagatttggaactccccgaaccggtaacaagtcgcagccgtccgatcatcaaggaacacaccagatttaaaataacctaactagactaagcgccgcgcgatccagatccaacggtccccaagcccgatctgttctcgcccgcacactagctgatctctggcccagatttatttggccgaagcgttacacaaccaactaatcttcgtcgtccaaaaccggatcaacggtcagcgcacgtcttctcaactctgtctctctcaccgacggcgaacaggacccgacggcggtgccattgctgtgggcaattatctagcacgcgaagacctaagaccctcatctgaacgactctacacgacgctaggaagatatagaatccgatcgaaggccttaccagagactgggattggccgaagacgctggccacggagaatggcgggtccgcggcagagtgtgtacgacggcgagaaattccttccctgcggtccaccaaccgcgccagccgtgggcaccacaagcaccagaacgccacaacgaaggccccgaccgcaaccgaggccaaagcgacgaccaagtcgtgtattcacggtggcggcggcaccctcgccgcgagtcagcgcacggcgaggaaattggaagggcacatgcggtgcgagttggggagttgtgagggtagaacgaaggggagagggagacgaacccggttgtgctcctttaaggacgcggacgtggccgaggtgcctcaacggattgcgcgagatctccgcgctccgccatgctcggcacatccgttgacgggaaggcgagatgacaggcgggtcccagggcgcagcgagtcaccagggtcgcgtcgcgcgcgcggaggagcgacagacaagcgggccctgagcgcagcgaatcgcccggttcgcctgggcgcgggttggcggcatatgacgcgcgggcccgacttgtcagtgcccggttgggcgcgcgcgtgaagggagtctagggcctcgcggagtcaggctggctgggccgccatccgaattcggcccatgcaaccgaatttgtttctattcctttttcttttttcctactttcaaatctagaatctaaattcaaatcttgtgtccaatttttcctcaacttatattgtgtaatcataagtaataattttggggatatttttagatatatatatatatatatatttatatcattttttcttattctcaaacccaaatttctctgattttatttaatgttcaaattttgaattcaaatctagacttgccttaatcataatttttgttttgatgcacaaacaagaaaaagtccagcatgatgcacatattatttatgtgtttttggttatttaattacttaaataagggtgtttacatgtgatatcaacatagaaaaattttatataggaaaaccattcctttttatttggtttacaatgtcgggtattacaaagagtactaggccctccttgccaatcatacctaggatttggtgccccattctccaggtcgcaacgtggtgagtgcctgagtggtgactgggaagtgggtctagacacatgcgcgaaagtccaatagttctctggataggtacaaggcctgctaggttctctagggctttactcaacgtcccggggttgacgacgatgagacgttcaatctagtggtgaagcatgctactgtttgtgctggtgtctcattggatctctcgtttttggcctattcatcagctagatgtcaagagtgccttcctccataggactcttacatagactgtctattgtagtaaatctgtcggctttgttgactctgctcatcctgacatggtctacaagctcaacaagttctctatggtatgaagcaccccccgcacgcttggtatagcaagtttgctacatatccgctctccctaagctttgttgtggctaagtcggacatctttgtgcatctcttggcatagcagtgccactatgtacctcctcctgtatgttgatgacattgtgctcactacctcttcttcggtcatgttgcaccgtatcatcatagcaagaagtcacaatgaaggatctgggtcctcttcatcatttcctggggatgtcgttgagcgtcgctcgaatctttagcaatgttagtacaccctagatgtcctagagcgcactggcatgctagattgcaagccatgtgcgacattggtggacacacatgccaaggtctttggtgatggtgcctctgtcaacgacccactgtctaatgcagtcttgtcggcactctgtctccggttgtacggtgtttcttaggccaagctcatatcttggtcctccaagcgttaggttgtggtctcctgcttcagtgctgaggctgagtaccgggctgtcgctagtgtggtgtctgagacgagctagttgcgccatctccttcaggagtttcatagccctcaccaggagcatgcttgtctattgcgacaacgtcagcaccgtctacctcttcgtcaacctcgcccaacaccagcatacaaagcatgttgagattcatcttcacttcatccatgagcatgttgctgtcggagacgtccacgttcatcacatcccgatgagttcgtagtttgccttatttgatctttccttcttgttgctctcgaaatttctgttcagtttcaatatctgtcatggctagagtttcgactgcggggatgttaaattatttcatttctgtcgaagtgctatgggcctagagcccccgcccatgtaatatataatattgagctcactttttactccttccaacaatagcccactttttactccttcgaacaatgatattttgcatattctcttatttgatttagtacctctgtcccttttgttgcagcacacgtcattgagccctgatggaaagcttgttattattgttggtgatgacacagatgctttacttattgatgctaattcaggaaagactattcattccatgaaaggtcacttggatttctcctttgcttcggcttggagcccagatggcctgacattcgccacaggtaaccaagacaaaacttgtcggatttgggatgccaggaatctcaccgagtctgtccatgtcttgagaggcaacgttggagcaataagatctattcgttttacatccgacgggcacttcttgtcgatggcagaagcagcagactttgtccacatctttgacatcaaaagtgactacaataagagacaggaattggatttctttggcgaggtatccggtatgtccttcagccccgacacggacacactttatgttggaatctcggacaggacatatggcagcctacttcagtttggccgcctctacaattattcatacctcgactcactactatgaaggagcggcctcattgtggcgcttcccgacacatgggttctaggtggaagtgagataaataggagatgggggttgtaccaaacgccttttgttcttagatccatggtggagtggagatactccacggtgaatctaggtgaatgtcagatctaaattcactttttttattattgaagctctaccaaacaagctcttaggtatgatttggtggatttttagctagttggctctttcatctactatagcaagaaactgttttttatctctatccttaaaatgaagaattaggagcctgcaaagtcactcttttactttaccaagtatggtttcttcgaatattgtagaaaagaaccacaat

SEQ ID NO: 79880 - DNA, 10220 bp, Zea Mays
  misc_feature (1)..(1): n is a, c, g, or t
natttcaatatatcttatcataacatgttcacctagtaaatagataaaagctccttagtacaacaagaaagaacaatattgctattggttagaaggggcgggttttattggctgtgtgttggtcagggaatgggaatggcagtgggcgcgagagagacaggacggggaatgggaaaggaagggaatgggaacggcagctagcgcctgagaggacggggaatgagaatgaaaaagggagaacatagaatgggaatgggctgaaccaggaatggcagaaccagaaatgacaggctactcttgcagtcttaataagtagtagagataagaatgacaaatataaaaatggcttataagatgaaaaatacaaggatgcaaagaacacatgagatcaacatataagaggctaaaagggcttaaatgacgtcaattgatagtggaatctttgcatagcttaacattaaataaaaggacatctggacattgaacacccaagtatgtggctggaatttcttgaaagctctccttgagctattagtgttatgaccggcagcccagcagcccagcagccctagccctaataaattcagttagtttgttagatggataaatatcagttagtttatttagatggataagtattagttagtttgtttagatggataagcattagtttagaactcctgtatatagttggttagtttgttagggggctgctatcacaacctatatattgtaccctttggttaaggaagaaatcaagcatgcaatacttgcccgtgcttcccccaacccatctactgttcacccgcatacaattcatctgagggactgttcatacgcgacactattcatctacgatcactattcgataattcctagctccgccactgcttaggcatcatacatgaaataggaacaagtagaattattatatttaattacgctaaccaaaatttggactcgaggcctatggctctgataccatattgagatgcatgcaccaactaattcaaccaaaaagttttaaccgatggaaagggatggacaattcacttatatttctataatgaaaagaggcgcagtaagaacaagatttgtgaatgcttattataaatagaggtgattaacctagaattcaattgcgcattctctactttacagtgccaactttaaagatttctttgtttatttgtgtctgatatcataggaacatatttcgtctatatctgtaatgtatcatagctgggtgcaaatgtgagctgaaatgatcatgactcatgagtgttagactattagccgccgcccggtttccctagccgctaccactactgccagagccatggctagtggtcccccctctagctcctctccaccctcaccccttcctctccactgagccaccgtcgttgcccttgctgccccttcctccagccaccggcgcaacgacctctttagctgttgttgctggcacgactgccatagccggtgcctgcctatcgctgcctctgctcggcgcggggcctgggcaacccatgtcgcctctgtctttcctagtaggcccgtagacccccctcccgcggatctccctgtatcggccaccgccgctgtagccctagccaccgcctgggcgtagtgtgctagggctatggcctggccattgccggcctggctgcccctggcctagctacccttggtctaggcgtggctggccagggcctcgctactatcagcttggtcatcgttgcatggcttcgggcagcctggacgccgctccctccatctcgaacatctactttaggccctctctatccttcgtacctttgtcggatgctctgccacccatcgacgttgtggctgcccaatccagctttgtcatggccctcatgactgctaaggcagtagtggctgccgcctgggagcacgaacgcgtcgttgctctcgcctggaagcatgaacgcactgttgccgataccctcgccagtcatacgtccgctgtgcgaccttatcctcctcatcctgcaacactatgccctggaagaccatgtcctcattgacataacgtccctcactatcccctcctggcgacggatgcataatgggggggggggtcctcttctagatccattggacattcacttttgagctgcaggatgtcgttcgcgagtgtggcggcactgcccgcagaccttggttgccattgaggagcaattctttggcaattgtggggctcatgctcttcacctcaacgtcgcctttcagacctttgtctaggaggacctctccatcatcgagtattgtcgccagatgaaaggctggcaacctccctttgtgacctcggggagcctgtctccgatcgcacacatgtccttaacctcctccgtggcttcaatgagcgctacaattacctctagatttggatcactcgctcggtcccatttcccttgtttccacaaggtttgcaatgacttcatcctcgaggagatcaccaaggggcgcctcctcgcttcgacaccgctatcgctctctacagctccacccatgagtgccagtccttgcgcccgtcctcttctactcctaccttggggggcttgtcttcacgctcgtctgtcccctttggccgtgggctccacgcccctccctcctagcccaggcccggggcagggcgagttttaggtgggtctttgctatcagatgaagggtgactatgggggtgggggtggctagagggatgccccttcgccctttccctacaacccatggaccggctgcatctctatgtggcctggcttggcctgtccttgggtggaccttcattgcatctgcctccaccctagacggctaacctgacaataccccgctcaaggtatcctctcgaccctctcgccaccagcaccttagcccgctactacccctaccaccccacatcgttcctagaaccgatggttttagtgggtgggatttgcagtcacttactagctcgttcagcacgattattctaacttcttctatcattgactgggttgctgattccggtgcgtcctaccacatcgctctggatgctggtatactttcttcttctcacccaccgcttctgtctcatccttcatctatcataggaacattctcccggtcacctctgtaggtgatttggttcttctcggacctttctatcttcgcaatgttcttgtggcccctatatcattcaaaatattttatttgttcgtcagtttaccattgataactcttgctctattgagttttatccttttgtattgtccgtgaaggatctttctacccggagccttctcgcctactatgatagctctggcccctgtacaccttgcgactgcctgcgtccacttctccacctaccgcttccactacacatcgcttttgtcctcgccgcagtcgcacacactgactacttccactacctccagcacttggcatcgttgatctggtcatcctagccctgacgtgttgtccaaattgtgtagtagttcagttgtctcttgtactaggggcacctctgagcatctatgccacacatgtcagctaggtcatcatatttgacttcctttctctagctcctcttagcatgtgcatgattttgatctcatacactgatttgtggacctctcatgttatcagtgtttctggttataaatattatctagtggttattgacgattgctctcattattcgtggacttctcccttgcgttcgaagtccaacacatttgcgtctcttttgcacttcatcacttgggtttctacttagtttggccacactattaaggttgtccagtgtaacaatggccgtgagtttgataactcctctcgatcattcttctcccatggtgtctggctccagatgtcttacccctatacttctcttcaagcaaggttgagcacatgattcgcattattaacaacatcatgtgttccttgctctttgatgcatccgttcctgctcgctattaggccaagagcctccacaccgccacctattttcttaatcgccttactactaaggcagcttgcgcttcaacacccctctctgctctttttggcaccactccatcctatgatcatctttgcgtctttgggtgtgcatgcttcccaacctttttgctactgcttcccataagctttcccctcactccacccattgtgtcttcctcgattactcccctgatcacaaagggtaccggtgtcctgacctcaccactcatcatttcttgatctctaatcacgtcatcttcgccaggacaaatttccccttatcaacccctcccggcccacgatcgactctcttctcgagtaagactttcttcttgaacttgatctcgtggctccctttggtcagccaccctttatttttttcactgcaggttcatccctgttgccgccgcccgcgacacgtgttcccctggattccttccgggctatcctaccgcctaggtcggactgtgagcccctagatggcctctgctagactgccggtagcaccgttggccccgcctttgccctcaccttctctgacctcgcccacggcattacgaatctcccaggtgccctagctggccctagccccttctcgctacgccaaccctatgcatgtctatcagggacatgcacgggtgggtgaaccaccccgctcccgggcagagccgacagtgtatcatccccccttcttcattgtgaccctcgccgtgcccacctgatggtggcttgatagactgctagggttcttcgccctgtcaactgtcttgtcctctccacgatctccttcctatcagtctcccccgtgtcgtcttttgttcatagtgccctcatcgatcctcactaaagtcatgctatggaggaagagtgtcacacccggatttaaggaacaaagccgggtgcatctcatatatacaccagggaagacaacacatataataacagagtgcatagagataaatgtcataaatatcataaatgtacttgttacatagcggaagtcttacaaaataaatgataaaataaaacgagctaactattattccctggcgccacaaagctgcctgggagacaccacctagatcaagtcgaaagcctcagagttaggtggctcctcttcgaccacctgttcttctcctgtggggggtgtgagacagcaagagtgagctcacatatcttcatagctcaacaagtcgtggggaataatgtgcatgaactcaccaaaggtgggagttcatgtgaaatgtaaggctaatcaacaaaataaaggctgaagctgagcattgcttttataagttggtcaaaattttattagcagttactaagtgtaagtaaataccaaaccttagtcataataaataaaagtaacaataaaataatcccaatgcgatgcaaatgacaaattgagttttaattccatagattaatcatgtgagggtccgagctgctcatgactgtaagcacggctagtataccagttttacactctgcagaggttgcgcatctttacccacaagtcatgttacccatctgccaagagacgaccaatcccgtacacctctaccgaggaggcgaggcagggtaacactacgaggcctttacaaagttccactagcttcagaaaacccgctacagtttataggaagctccagtgcaggaatccctcgcctgaccgccatcgcagcaaaatcaacccagtgacctccctacactgaccactcccgtactgcccttgcccttttcgggtaaggaagtcatccactagctttcctagttaatcagccaaggacatcccatactacccttatggtagcactgttttcccggatggtcgctccatgttcccattaacataatgatcttaacatgaacagtaataataaataaagaataaaagtataatcatgaataatgtatctccatacccaaatccacataaagcaatagcaagtactacccaaaaatatttcagtagtaaaacaaggtataaagataaccaaaactggggtaacctattggatcccatcaaaattaacctatgcagatcattatgaataataagaacatggctgggtaaaaataagtgatcaagggcacaacttgccttcaatgagctcctgctcagcaacttctatctgctgaacctcaggatccacagtagcttgctcgtctactcgcatcaacacaatacatacatagtatagcaaaaattaacatcacaccaaacatgtaaatagaatacacagtaaaaatctacacattaaaataagaacctaggaacataaatcattaattttggagttatggattttaagttatgaatttccaaaggttttatgtgcttgaaatatgattaaatgagaaattaattttcttactgtttttctgtcaaaacagagacactagatgacaaacaataatattataaaattttagaaattggaatgaatcaatttggactaaaaatgatttttctatgcattttacaagtttctgcaattaatttaatactaaaattcattttctaattgattttatgaatattattctctgtctaggctgtgcctcaatatccaggaaagacatgagcttcattataagcttcccgagacacaatcaacagtgccactggaccacgagtttatttcagtgtttggcgggggctctttaacaaaatgtacccgcgaaggggtatggccagatactggccgttcgatctaacatgagcgctcagattagatttggaactccccgaaccggtaacaagtcgcagccgtccgatcatcaaggaacacaccagatttaaaataacctaactagactaagcgccgcgcgatccagatccaacggtccccaagcccgatctgttctcgcccgcacactagctgatctctggcccagatttatttggccgaagcgttacacaaccaactaatcttcgtcgtccaaaaccggatcaacggtcagcgcacgtcttctcaactctgtctctctcaccgacggcgaacaggacccgacggcggtgccattgctgtgggcaattatctagcacgcgaagacctaagaccctcatctgaacgactctacacgacgctaggaagatatagaatccgatcgaaggccttaccagagactgggattggccgaagacgctggccacggagaatggcgggtccgcggcagagtgtgtacgacggcgagaaattccttccctgcggtccaccaaccgcgccagccgtgggcaccacaagcaccagaacgccacaacgaaggccccgaccgcaaccgaggccaaagcgacgaccaagtcgtgtattcacggtggcggcggcaccctcgccgcgagtcagcgcacggcgaggaaattggaagggcacatgcggtgcgagttggggagttgtgagggtagaacgaaggggagagggagacgaacccggttgtgctcctttaaggacgcggacgtggccgaggtgcctcaacggattgcgcgagatctccgcgctccgccatgctcggcacatccgttgacgggaaggcgagatgacaggcgggtcccagggcgcagcgagtcaccagggtcgcgtcgcgcgcgcggaggagcgacagacaagcgggccctgagcgcagcgaatcgcccggttcgcctgggcgcgggttggcggcatatgacgcgcgggcccgacttgtcagtgcccggttgggcgcgcgcgtgaagggagtctagggcctcgcggagtcaggctggctgggccgccatccgaattcggcccatgcaaccgaatttgtttctattcctttttcttttttcctactttcaaatctagaatctaaattcaaatcttgtgtccaatttttcctcaacttatattgtgtaatcataagtaataattttggggatatttttagatatatatatatatatatatttatatcattttttcttattctcaaacccaaatttctctgattttatttaatgttcaaattttgaattcaaatctagacttgccttaatcataatttttgttttgatgcacaaacaagaaaaagtccagcatgatgcacatattatttatgtgtttttggttatttaattacttaaataagggtgtttacatgtgatatcaacatagaaaaattttatataggaaaaccattcctttttatttggtttacaatgtcgggtattacaaagagtactaggccctccttgccaatcatacctaggatttggtgccccattctccaggtcgcaacgtggtgagtgcctgagtggtgactgggaagtgggtctagacacatgcgcgaaagtccaatagttctctggataggtacaaggcctgctaggttctctagggctttactcaacgtcccggggttgacgacgatgagacgttcaatctagtggtgaagcatgctactgtttgtgctggtgtctcattggatctctcgtttttggcctattcatcagctagatgtcaagagtgccttcctccataggactcttacatagactgtctattgtagtaaatctgtcggctttgttgactctgctcatcctgacatggtctacaagctcaacaagttctctatggtatgaagcaccccccgcacgcttggtatagcaagtttgctacatatccgctctccctaagctttgttgtggctaagtcggacatctttgtgcatctcttggcatagcagtgccactatgtacctcctcctgtatgttgatgacattgtgctcactacctcttcttcggtcatgttgcaccgtatcatcatagcaagaagtcacaatgaaggatctgggtcctcttcatcatttcctggggatgtcgttgagcgtcgctcgaatctttagcaatgttagtacaccctagatgtcctagagcgcactggcatgctagattgcaagccatgtgcgacattggtggacacacatgccaaggtctttggtgatggtgcctctgtcaacgacccactgtctaatgcagtcttgtcggcactctgtctccggttgtacggtgtttcttaggccaagctcatatcttggtcctccaagcgttaggttgtggtctcctgcttcagtgctgaggctgagtaccgggctgtcgctagtgtggtgtctgagacgagctagttgcgccatctccttcaggagtttcatagccctcaccaggagcatgcttgtctattgcgacaacgtcagcaccgtctacctcttcgtcaacctcgcccaacaccagcatacaaagcatgttgagattcatcttcacttcatccatgagcatgttgctgtcggagacgtccacgttcatcacatcccgatgagttcgtagtttgccttatttgatctttccttcttgttgctctcgaaatttctgttcagtttcaatatctgtcatggctagagtttcgactgcggggatgttaaattatttcatttctgtcgaagtgctatgggcctagagcccccgcccatgtaatatataatattgagctcactttttactccttccaacaatagcccactttttactccttcgaacaatgatattttgcatattctcttatttgatttagtacctctgtcccttttgttgcagcacacgtcattgagccctgatggaaagcttgttattattgttggtgatgacacagatgctttacttattgatgctaattcaggaaagactattcattccatgaaaggtcacttggatttctcctttgcttcggcttggagcccagatggcctgacattcgccacagaagcagcagactttgtccacatctttgacatcaaaagtgactacaataagagacaggaattggatttctttggcgaggtatccggagcggcctcattgtggcgcttcccgacacatgggttctaggtggaagtgagataaataggagatgggggttgtaccaaacgccttttgttcttagatccatggtggagtggagatactccacggtgaatctaggtgaatgtcagatctaaattcactttttttattattgaagctctaccaaacaagctcttaggtatgatttggtggatttttagctagttggctctttcatctactatagcaagaaactgttttttatctctatccttaaaatgaagaattaggagcctgcaaagtcactcttttactttaccaagtatggtttcttcgaatattgtagaaaagaaccacaat

SEQ ID NO: 79881 - DNA, 10673 bp, Zea Mays
  misc_feature (1)..(1): n is a, c, g, or t
natttcaatatatcttatcataacatgttcacctagtaaatagataaaagctccttagtacaacaagaaagaacaatattgctattggttagaaggggcgggttttattggctgtgtgttggtcagggaatgggaatggcagtgggcgcgagagagacaggacggggaatgggaaaggaagggaatgggaacggcagctagcgcctgagaggacggggaatgagaatgaaaaagggagaacatagaatgggaatgggctgaaccaggaatggcagaaccagaaatgacaggctactcttgcagtcttaataagtagtagagataagaatgacaaatataaaaatggcttataagatgaaaaatacaaggatgcaaagaacacatgagatcaacatataagaggctaaaagggcttaaatgacgtcaattgatagtggaatctttgcatagcttaacattaaataaaaggacatctggacattgaacacccaagtatgtggctggaatttcttgaaagctctccttgagctattagtgttatgaccggcagcccagcagcccagcagccctagccctaataaattcagttagtttgttagatggataaatatcagttagtttatttagatggataagtattagttagtttgtttagatggataagcattagtttagaactcctgtatatagttggttagtttgttagggggctgctatcacaacctatatattgtaccctttggttaaggaagaaatcaagcatgcaatacttgcccgtgcttcccccaacccatctactgttcacccgcatacaattcatctgagggactgttcatacgcgacactattcatctacgatcactattcgataattcctagctccgccactgcttaggcatcatacatgaaataggaacaagtagaattattatatttaattacgctaaccaaaatttggactcgaggcctatggctctgataccatattgagatgcatgcaccaactaattcaaccaaaaagttttaaccgatggaaagggatggacaattcacttatatttctataatgaaaagaggcgcagtaagaacaagatttgtgaatgcttattataaatagaggtgattaacctagaattcaattgcgcattctctactttacagtgccaactttaaagatttctttgtttatttgtgtctgatatcataggaacatatttcgtctatatctgtaatgtatcatagctgggtgcaaatgtgagctgaaatgatcatgactcatgagtgttagactattagccgccgcccggtttccctagccgctaccactactgccagagccatggctagtggtcccccctctagctcctctccaccctcaccccttcctctccactgagccaccgtcgttgcccttgctgccccttcctccagccaccggcgcaacgacctctttagctgttgttgctggcacgactgccatagccggtgcctgcctatcgctgcctctgctcggcgcggggcctgggcaacccatgtcgcctctgtctttcctagtaggcccgtagacccccctcccgcggatctccctgtatcggccaccgccgctgtagccctagccaccgcctgggcgtagtgtgctagggctatggcctggccattgccggcctggctgcccctggcctagctacccttggtctaggcgtggctggccagggcctcgctactatcagcttggtcatcgttgcatggcttcgggcagcctggacgccgctccctccatctcgaacatctactttaggccctctctatccttcgtacctttgtcggatgctctgccacccatcgacgttgtggctgcccaatccagctttgtcatggccctcatgactgctaaggcagtagtggctgccgcctgggagcacgaacgcgtcgttgctctcgcctggaagcatgaacgcactgttgccgataccctcgccagtcatacgtccgctgtgcgaccttatcctcctcatcctgcaacactatgccctggaagaccatgtcctcattgacataacgtccctcactatcccctcctggcgacggatgcataatgggggggggggtcctcttctagatccattggacattcacttttgagctgcaggatgtcgttcgcgagtgtggcggcactgcccgcagaccttggttgccattgaggagcaattctttggcaattgtggggctcatgctcttcacctcaacgtcgcctttcagacctttgtctaggaggacctctccatcatcgagtattgtcgccagatgaaaggctggcaacctccctttgtgacctcggggagcctgtctccgatcgcacacatgtccttaacctcctccgtggcttcaatgagcgctacaattacctctagatttggatcactcgctcggtcccatttcccttgtttccacaaggtttgcaatgacttcatcctcgaggagatcaccaaggggcgcctcctcgcttcgacaccgctatcgctctctacagctccacccatgagtgccagtccttgcgcccgtcctcttctactcctaccttggggggcttgtcttcacgctcgtctgtcccctttggccgtgggctccacgcccctccctcctagcccaggcccggggcagggcgagttttaggtgggtctttgctatcagatgaagggtgactatgggggtgggggtggctagagggatgccccttcgccctttccctacaacccatggaccggctgcatctctatgtggcctggcttggcctgtccttgggtggaccttcattgcatctgcctccaccctagacggctaacctgacaataccccgctcaaggtatcctctcgaccctctcgccaccagcaccttagcccgctactacccctaccaccccacatcgttcctagaaccgatggttttagtgggtgggatttgcagtcacttactagctcgttcagcacgattattctaacttcttctatcattgactgggttgctgattccggtgcgtcctaccacatcgctctggatgctggtatactttcttcttctcacccaccgcttctgtctcatccttcatctatcataggaacattctcccggtcacctctgtaggtgatttggttcttctcggacctttctatcttcgcaatgttcttgtggcccctatatcattcaaaatattttatttgttcgtcagtttaccattgataactcttgctctattgagttttatccttttgtattgtccgtgaaggatctttctacccggagccttctcgcctactatgatagctctggcccctgtacaccttgcgactgcctgcgtccacttctccacctaccgcttccactacacatcgcttttgtcctcgccgcagtcgcacacactgactacttccactacctccagcacttggcatcgttgatctggtcatcctagccctgacgtgttgtccaaattgtgtagtagttcagttgtctcttgtactaggggcacctctgagcatctatgccacacatgtcagctaggtcatcatatttgacttcctttctctagctcctcttagcatgtgcatgattttgatctcatacactgatttgtggacctctcatgttatcagtgtttctggttataaatattatctagtggttattgacgattgctctcattattcgtggacttctcccttgcgttcgaagtccaacacatttgcgtctcttttgcacttcatcacttgggtttctacttagtttggccacactattaaggttgtccagtgtaacaatggccgtgagtttgataactcctctcgatcattcttctcccatggtgtctggctccagatgtcttacccctatacttctcttcaagcaaggttgagcacatgattcgcattattaacaacatcatgtgttccttgctctttgatgcatccgttcctgctcgctattaggccaagagcctccacaccgccacctattttcttaatcgccttactactaaggcagcttgcgcttcaacacccctctctgctctttttggcaccactccatcctatgatcatctttgcgtctttgggtgtgcatgcttcccaacctttttgctactgcttcccataagctttcccctcactccacccattgtgtcttcctcgattactcccctgatcacaaagggtaccggtgtcctgacctcaccactcatcatttcttgatctctaatcacgtcatcttcgccaggacaaatttccccttatcaacccctcccggcccacgatcgactctcttctcgagtaagactttcttcttgaacttgatctcgtggctccctttggtcagccaccctttatttttttcactgcaggttcatccctgttgccgccgcccgcgacacgtgttcccctggattccttccgggctatcctaccgcctaggtcggactgtgagcccctagatggcctctgctagactgccggtagcaccgttggccccgcctttgccctcaccttctctgacctcgcccacggcattacgaatctcccaggtgccctagctggccctagccccttctcgctacgccaaccctatgcatgtctatcagggacatgcacgggtgggtgaaccaccccgctcccgggcagagccgacagtgtatcatccccccttcttcattgtgaccctcgccgtgcccacctgatggtggcttgatagactgctagggttcttcgccctgtcaactgtcttgtcctctccacgatctccttcctatcagtctcccccgtgtcgtcttttgttcatagtgccctcatcgatcctcactaaagtcatgctatggaggaagagtgtcacacccggatttaaggaacaaagccgggtgcatctcatatatacaccagggaagacaacacatataataacagagtgcatagagataaatgtcataaatatcataaatgtacttgttacatagcggaagtcttacaaaataaatgataaaataaaacgagctaactattattccctggcgccacaaagctgcctgggagacaccacctagatcaagtcgaaagcctcagagttaggtggctcctcttcgaccacctgttcttctcctgtggggggtgtgagacagcaagagtgagctcacatatcttcatagctcaacaagtcgtggggaataatgtgcatgaactcaccaaaggtgggagttcatgtgaaatgtaaggctaatcaacaaaataaaggctgaagctgagcattgcttttataagttggtcaaaattttattagcagttactaagtgtaagtaaataccaaaccttagtcataataaataaaagtaacaataaaataatcccaatgcgatgcaaatgacaaattgagttttaattccatagattaatcatgtgagggtccgagctgctcatgactgtaagcacggctagtataccagttttacactctgcagaggttgcgcatctttacccacaagtcatgttacccatctgccaagagacgaccaatcccgtacacctctaccgaggaggcgaggcagggtaacactacgaggcctttacaaagttccactagcttcagaaaacccgctacagtttataggaagctccagtgcaggaatccctcgcctgaccgccatcgcagcaaaatcaacccagtgacctccctacactgaccactcccgtactgcccttgcccttttcgggtaaggaagtcatccactagctttcctagttaatcagccaaggacatcccatactacccttatggtagcactgttttcccggatggtcgctccatgttcccattaacataatgatcttaacatgaacagtaataataaataaagaataaaagtataatcatgaataatgtatctccatacccaaatccacataaagcaatagcaagtactacccaaaaatatttcagtagtaaaacaaggtataaagataaccaaaactggggtaacctattggatcccatcaaaattaacctatgcagatcattatgaataataagaacatggctgggtaaaaataagtgatcaagggcacaacttgccttcaatgagctcctgctcagcaacttctatctgctgaacctcaggatccacagtagcttgctcgtctactcgcatcaacacaatacatacatagtatagcaaaaattaacatcacaccaaacatgtaaatagaatacacagtaaaaatctacacattaaaataagaacctaggaacataaatcattaattttggagttatggattttaagttatgaatttccaaaggttttatgtgcttgaaatatgattaaatgagaaattaattttcttactgtttttctgtcaaaacagagacactagatgacaaacaataatattataaaattttagaaattggaatgaatcaatttggactaaaaatgatttttctatgcattttacaagtttctgcaattaatttaatactaaaattcattttctaattgattttatgaatattattctctgtctaggctgtgcctcaatatccaggaaagacatgagcttcattataagcttcccgagacacaatcaacagtgccactggaccacgagtttatttcagtgtttggcgggggctctttaacaaaatgtacccgcgaaggggtatggccagatactggccgttcgatctaacatgagcgctcagattagatttggaactccccgaaccggtaacaagtcgcagccgtccgatcatcaaggaacacaccagatttaaaataacctaactagactaagcgccgcgcgatccagatccaacggtccccaagcccgatctgttctcgcccgcacactagctgatctctggcccagatttatttggccgaagcgttacacaaccaactaatcttcgtcgtccaaaaccggatcaacggtcagcgcacgtcttctcaactctgtctctctcaccgacggcgaacaggacccgacggcggtgccattgctgtgggcaattatctagcacgcgaagacctaagaccctcatctgaacgactctacacgacgctaggaagatatagaatccgatcgaaggccttaccagagactgggattggccgaagacgctggccacggagaatggcgggtccgcggcagagtgtgtacgacggcgagaaattccttccctgcggtccaccaaccgcgccagccgtgggcaccacaagcaccagaacgccacaacgaaggccccgaccgcaaccgaggccaaagcgacgaccaagtcgtgtattcacggtggcggcggcaccctcgccgcgagtcagcgcacggcgaggaaattggaagggcacatgcggtgcgagttggggagttgtgagggtagaacgaaggggagagggagacgaacccggttgtgctcctttaaggacgcggacgtggccgaggtgcctcaacggattgcgcgagatctccgcgctccgccatgctcggcacatccgttgacgggaaggcgagatgacaggcgggtcccagggcgcagcgagtcaccagggtcgcgtcgcgcgcgcggaggagcgacagacaagcgggccctgagcgcagcgaatcgcccggttcgcctgggcgcgggttggcggcatatgacgcgcgggcccgacttgtcagtgcccggttgggcgcgcgcgtgaagggagtctagggcctcgcggagtcaggctggctgggccgccatccgaattcggcccatgcaaccgaatttgtttctattcctttttcttttttcctactttcaaatctagaatctaaattcaaatcttgtgtccaatttttcctcaacttatattgtgtaatcataagtaataattttggggatatttttagatatatatatatatatatatttatatcattttttcttattctcaaacccaaatttctctgattttatttaatgttcaaattttgaattcaaatctagacttgccttaatcataatttttgttttgatgcacaaacaagaaaaagtccagcatgatgcacatattatttatgtgtttttggttatttaattacttaaataagggtgtttacatgtgatatcaacatagaaaaattttatataggaaaaccattcctttttatttggtttacaatgtcgggtattacaaagagtactaggccctccttgccaatcatacctaggatttggtgccccattctccaggtcgcaacgtggtgagtgcctgagtggtgactgggaagtgggtctagacacatgcgcgaaagtccaatagttctctggataggtacaaggcctgctaggttctctagggctttactcaacgtcccggggttgacgacgatgagacgttcaatctagtggtgaagcatgctactgtttgtgctggtgtctcattggatctctcgtttttggcctattcatcagctagatgtcaagagtgccttcctccataggactcttacatagactgtctattgtagtaaatctgtcggctttgttgactctgctcatcctgacatggtctacaagctcaacaagttctctatggtatgaagcaccccccgcacgcttggtatagcaagtttgctacatatccgctctccctaagctttgttgtggctaagtcggacatctttgtgcatctcttggcatagcagtgccactatgtacctcctcctgtatgttgatgacattgtgctcactacctcttcttcggtcatgttgcaccgtatcatcatagcaagaagtcacaatgaaggatctgggtcctcttcatcatttcctggggatgtcgttgagcgtcgctcgaatctttagcaatgttagtacaccctagatgtcctagagcgcactggcatgctagattgcaagccatgtgcgacattggtggacacacatgccaaggtctttggtgatggtgcctctgtcaacgacccactgtctaatgcagtcttgtcggcactctgtctccggttgtacggtgtttcttaggccaagctcatatcttggtcctccaagcgttaggttgtggtctcctgcttcagtgctgaggctgagtaccgggctgtcgctagtgtggtgtctgagacgagctagttgcgccatctccttcaggagtttcatagccctcaccaggagcatgcttgtctattgcgacaacgtcagcaccgtctacctcttcgtcaacctcgcccaacaccagcatacaaagcatgttgagattcatcttcacttcatccatgagcatgttgctgtcggagacgtccacgttcatcacatcccgatgagttcgtagtttgccttatttgatctttccttcttgttgctctcgaaatttctgttcagtttcaatatctgtcatggctagagtttcgactgcggggatgttaaattatttcatttctgtcgaagtgctatgggcctagagcccccgcccatgtaatatataatattgagctcactttttactccttccaacaatagcccactttttactccttcgaacaatgatattttgcatattctcttatttgatttagtacctctgtcccttttgttgcagcacacgtcattgagccctgatggaaagcttgttattattgttggtgatgacacagatgctttacttattgatgctaattcaggaaagactattcattccatgaaaggtcacttggatttctcctttgcttcggcttggagcccagatggcctgacattcgccacagaagcagcagactttgtccacatctttgacatcaaaagtgactacaataagagacaggaattggatttctttggcgaggtatccggtatgtccttcagccccgacacggacacactttatgttggaatctcggacaggacatatggcagcctacttcagtttggccgcctctacaattattcatacctcgactcactactatgaaggtcaaagaaaatatgtgttttccctcggcttataatcaacccagattaggcatcccaaatgaaatttaatttagcctggtattcctcgtaaagaatcctgtaccctggtgtatgtgtacataaaaaaactgtattttatagacaccagtagtctgctaccctgctttcagataggtatataaggtgtcaggattcaaatcgcaagttagatctcaattcgttatagcacaagatgaatccataaagtcagaactttgcatgttaagggcttgctcgttttgatctcaatccatatggattaagtaagattgtgtgcctccgtccacgtgcaggagcggcctcattgtggcgcttcccgacacatgggttctaggtggaagtgagataaataggagatgggggttgtaccaaacgccttttgttcttagatccatggtggagtggagatactccacggtgaatctaggtgaatgtcagatctaaattcactttttttattattgaagctctaccaaacaagctcttaggtatgatttggtggatttttagctagttggctctttcatctactatagcaagaaactgttttttatctctatccttaaaatgaagaattaggagcctgcaaagtcactcttttactttaccaagtatggtttcttcgaatattgtagaaaagaaccacaat

SEQ ID NO: 79882 - DNA, 10017 bp, Zea Mays
  misc_feature (1)..(1): n is a, c, g, or t
natttcaatatatcttatcataacatgttcacctagtaaatagataaaagctccttagtacaacaagaaagaacaatattgctattggttagaaggggcgggttttattggctgtgtgttggtcagggaatgggaatggcagtgggcgcgagagagacaggacggggaatgggaaaggaagggaatgggaacggcagctagcgcctgagaggacggggaatgagaatgaaaaagggagaacatagaatgggaatgggctgaaccaggaatggcagaaccagaaatgacaggctactcttgcagtcttaataagtagtagagataagaatgacaaatataaaaatggcttataagatgaaaaatacaaggatgcaaagaacacatgagatcaacatataagaggctaaaagggcttaaatgacgtcaattgatagtggaatctttgcatagcttaacattaaataaaaggacatctggacattgaacacccaagtatgtggctggaatttcttgaaagctctccttgagctattagtgttatgaccggcagcccagcagcccagcagccctagccctaataaattcagttagtttgttagatggataaatatcagttagtttatttagatggataagtattagttagtttgtttagatggataagcattagtttagaactcctgtatatagttggttagtttgttagggggctgctatcacaacctatatattgtaccctttggttaaggaagaaatcaagcatgcaatacttgcccgtgcttcccccaacccatctactgttcacccgcatacaattcatctgagggactgttcatacgcgacactattcatctacgatcactattcgataattcctagctccgccactgcttaggcatcatacatgaaataggaacaagtagaattattatatttaattacgctaaccaaaatttggactcgaggcctatggctctgataccatattgagatgcatgcaccaactaattcaaccaaaaagttttaaccgatggaaagggatggacaattcacttatatttctataatgaaaagaggcgcagtaagaacaagatttgtgaatgcttattataaatagaggtgattaacctagaattcaattgcgcattctctactttacagtgccaactttaaagatttctttgtttatttgtgtctgatatcataggaacatatttcgtctatatctgtaatgtatcatagctgggtgcaaatgtgagctgaaatgatcatgactcatgagtgttagactattagccgccgcccggtttccctagccgctaccactactgccagagccatggctagtggtcccccctctagctcctctccaccctcaccccttcctctccactgagccaccgtcgttgcccttgctgccccttcctccagccaccggcgcaacgacctctttagctgttgttgctggcacgactgccatagccggtgcctgcctatcgctgcctctgctcggcgcggggcctgggcaacccatgtcgcctctgtctttcctagtaggcccgtagacccccctcccgcggatctccctgtatcggccaccgccgctgtagccctagccaccgcctgggcgtagtgtgctagggctatggcctggccattgccggcctggctgcccctggcctagctacccttggtctaggcgtggctggccagggcctcgctactatcagcttggtcatcgttgcatggcttcgggcagcctggacgccgctccctccatctcgaacatctactttaggccctctctatccttcgtacctttgtcggatgctctgccacccatcgacgttgtggctgcccaatccagctttgtcatggccctcatgactgctaaggcagtagtggctgccgcctgggagcacgaacgcgtcgttgctctcgcctggaagcatgaacgcactgttgccgataccctcgccagtcatacgtccgctgtgcgaccttatcctcctcatcctgcaacactatgccctggaagaccatgtcctcattgacataacgtccctcactatcccctcctggcgacggatgcataatgggggggggggtcctcttctagatccattggacattcacttttgagctgcaggatgtcgttcgcgagtgtggcggcactgcccgcagaccttggttgccattgaggagcaattctttggcaattgtggggctcatgctcttcacctcaacgtcgcctttcagacctttgtctaggaggacctctccatcatcgagtattgtcgccagatgaaaggctggcaacctccctttgtgacctcggggagcctgtctccgatcgcacacatgtccttaacctcctccgtggcttcaatgagcgctacaattacctctagatttggatcactcgctcggtcccatttcccttgtttccacaaggtttgcaatgacttcatcctcgaggagatcaccaaggggcgcctcctcgcttcgacaccgctatcgctctctacagctccacccatgagtgccagtccttgcgcccgtcctcttctactcctaccttggggggcttgtcttcacgctcgtctgtcccctttggccgtgggctccacgcccctccctcctagcccaggcccggggcagggcgagttttaggtgggtctttgctatcagatgaagggtgactatgggggtgggggtggctagagggatgccccttcgccctttccctacaacccatggaccggctgcatctctatgtggcctggcttggcctgtccttgggtggaccttcattgcatctgcctccaccctagacggctaacctgacaataccccgctcaaggtatcctctcgaccctctcgccaccagcaccttagcccgctactacccctaccaccccacatcgttcctagaaccgatggttttagtgggtgggatttgcagtcacttactagctcgttcagcacgattattctaacttcttctatcattgactgggttgctgattccggtgcgtcctaccacatcgctctggatgctggtatactttcttcttctcacccaccgcttctgtctcatccttcatctatcataggaacattctcccggtcacctctgtaggtgatttggttcttctcggacctttctatcttcgcaatgttcttgtggcccctatatcattcaaaatattttatttgttcgtcagtttaccattgataactcttgctctattgagttttatccttttgtattgtccgtgaaggatctttctacccggagccttctcgcctactatgatagctctggcccctgtacaccttgcgactgcctgcgtccacttctccacctaccgcttccactacacatcgcttttgtcctcgccgcagtcgcacacactgactacttccactacctccagcacttggcatcgttgatctggtcatcctagccctgacgtgttgtccaaattgtgtagtagttcagttgtctcttgtactaggggcacctctgagcatctatgccacacatgtcagctaggtcatcatatttgacttcctttctctagctcctcttagcatgtgcatgattttgatctcatacactgatttgtggacctctcatgttatcagtgtttctggttataaatattatctagtggttattgacgattgctctcattattcgtggacttctcccttgcgttcgaagtccaacacatttgcgtctcttttgcacttcatcacttgggtttctacttagtttggccacactattaaggttgtccagtgtaacaatggccgtgagtttgataactcctctcgatcattcttctcccatggtgtctggctccagatgtcttacccctatacttctcttcaagcaaggttgagcacatgattcgcattattaacaacatcatgtgttccttgctctttgatgcatccgttcctgctcgctattaggccaagagcctccacaccgccacctattttcttaatcgccttactactaaggcagcttgcgcttcaacacccctctctgctctttttggcaccactccatcctatgatcatctttgcgtctttgggtgtgcatgcttcccaacctttttgctactgcttcccataagctttcccctcactccacccattgtgtcttcctcgattactcccctgatcacaaagggtaccggtgtcctgacctcaccactcatcatttcttgatctctaatcacgtcatcttcgccaggacaaatttccccttatcaacccctcccggcccacgatcgactctcttctcgagtaagactttcttcttgaacttgatctcgtggctccctttggtcagccaccctttatttttttcactgcaggttcatccctgttgccgccgcccgcgacacgtgttcccctggattccttccgggctatcctaccgcctaggtcggactgtgagcccctagatggcctctgctagactgccggtagcaccgttggccccgcctttgccctcaccttctctgacctcgcccacggcattacgaatctcccaggtgccctagctggccctagccccttctcgctacgccaaccctatgcatgtctatcagggacatgcacgggtgggtgaaccaccccgctcccgggcagagccgacagtgtatcatccccccttcttcattgtgaccctcgccgtgcccacctgatggtggcttgatagactgctagggttcttcgccctgtcaactgtcttgtcctctccacgatctccttcctatcagtctcccccgtgtcgtcttttgttcatagtgccctcatcgatcctcactaaagtcatgctatggaggaagagtgtcacacccggatttaaggaacaaagccgggtgcatctcatatatacaccagggaagacaacacatataataacagagtgcatagagataaatgtcataaatatcataaatgtacttgttacatagcggaagtcttacaaaataaatgataaaataaaacgagctaactattattccctggcgccacaaagctgcctgggagacaccacctagatcaagtcgaaagcctcagagttaggtggctcctcttcgaccacctgttcttctcctgtggggggtgtgagacagcaagagtgagctcacatatcttcatagctcaacaagtcgtggggaataatgtgcatgaactcaccaaaggtgggagttcatgtgaaatgtaaggctaatcaacaaaataaaggctgaagctgagcattgcttttataagttggtcaaaattttattagcagttactaagtgtaagtaaataccaaaccttagtcataataaataaaagtaacaataaaataatcccaatgcgatgcaaatgacaaattgagttttaattccatagattaatcatgtgagggtccgagctgctcatgactgtaagcacggctagtataccagttttacactctgcagaggttgcgcatctttacccacaagtcatgttacccatctgccaagagacgaccaatcccgtacacctctaccgaggaggcgaggcagggtaacactacgaggcctttacaaagttccactagcttcagaaaacccgctacagtttataggaagctccagtgcaggaatccctcgcctgaccgccatcgcagcaaaatcaacccagtgacctccctacactgaccactcccgtactgcccttgcccttttcgggtaaggaagtcatccactagctttcctagttaatcagccaaggacatcccatactacccttatggtagcactgttttcccggatggtcgctccatgttcccattaacataatgatcttaacatgaacagtaataataaataaagaataaaagtataatcatgaataatgtatctccatacccaaatccacataaagcaatagcaagtactacccaaaaatatttcagtagtaaaacaaggtataaagataaccaaaactggggtaacctattggatcccatcaaaattaacctatgcagatcattatgaataataagaacatggctgggtaaaaataagtgatcaagggcacaacttgccttcaatgagctcctgctcagcaacttctatctgctgaacctcaggatccacagtagcttgctcgtctactcgcatcaacacaatacatacatagtatagcaaaaattaacatcacaccaaacatgtaaatagaatacacagtaaaaatctacacattaaaataagaacctaggaacataaatcattaattttggagttatggattttaagttatgaatttccaaaggttttatgtgcttgaaatatgattaaatgagaaattaattttcttactgtttttctgtcaaaacagagacactagatgacaaacaataatattataaaattttagaaattggaatgaatcaatttggactaaaaatgatttttctatgcattttacaagtttctgcaattaatttaatactaaaattcattttctaattgattttatgaatattattctctgtctaggctgtgcctcaatatccaggaaagacatgagcttcattataagcttcccgagacacaatcaacagtgccactggaccacgagtttatttcagtgtttggcgggggctctttaacaaaatgtacccgcgaaggggtatggccagatactggccgttcgatctaacatgagcgctcagattagatttggaactccccgaaccggtaacaagtcgcagccgtccgatcatcaaggaacacaccagatttaaaataacctaactagactaagcgccgcgcgatccagatccaacggtccccaagcccgatctgttctcgcccgcacactagctgatctctggcccagatttatttggccgaagcgttacacaaccaactaatcttcgtcgtccaaaaccggatcaacggtcagcgcacgtcttctcaactctgtctctctcaccgacggcgaacaggacccgacggcggtgccattgctgtgggcaattatctagcacgcgaagacctaagaccctcatctgaacgactctacacgacgctaggaagatatagaatccgatcgaaggccttaccagagactgggattggccgaagacgctggccacggagaatggcgggtccgcggcagagtgtgtacgacggcgagaaattccttccctgcggtccaccaaccgcgccagccgtgggcaccacaagcaccagaacgccacaacgaaggccccgaccgcaaccgaggccaaagcgacgaccaagtcgtgtattcacggtggcggcggcaccctcgccgcgagtcagcgcacggcgaggaaattggaagggcacatgcggtgcgagttggggagttgtgagggtagaacgaaggggagagggagacgaacccggttgtgctcctttaaggacgcggacgtggccgaggtgcctcaacggattgcgcgagatctccgcgctccgccatgctcggcacatccgttgacgggaaggcgagatgacaggcgggtcccagggcgcagcgagtcaccagggtcgcgtcgcgcgcgcggaggagcgacagacaagcgggccctgagcgcagcgaatcgcccggttcgcctgggcgcgggttggcggcatatgacgcgcgggcccgacttgtcagtgcccggttgggcgcgcgcgtgaagggagtctagggcctcgcggagtcaggctggctgggccgccatccgaattcggcccatgcaaccgaatttgtttctattcctttttcttttttcctactttcaaatctagaatctaaattcaaatcttgtgtccaatttttcctcaacttatattgtgtaatcataagtaataattttggggatatttttagatatatatatatatatatatttatatcattttttcttattctcaaacccaaatttctctgattttatttaatgttcaaattttgaattcaaatctagacttgccttaatcataatttttgttttgatgcacaaacaagaaaaagtccagcatgatgcacatattatttatgtgtttttggttatttaattacttaaataagggtgtttacatgtgatatcaacatagaaaaattttatataggaaaaccattcctttttatttggtttacaatgtcgggtattacaaagagtactaggccctccttgccaatcatacctaggatttggtgccccattctccaggtcgcaacgtggtgagtgcctgagtggtgactgggaagtgggtctagacacatgcgcgaaagtccaatagttctctggataggtacaaggcctgctaggttctctagggctttactcaacgtcccggggttgacgacgatgagacgttcaatctagtggtgaagcatgctactgtttgtgctggtgtctcattggatctctcgtttttggcctattcatcagctagatgtcaagagtgccttcctccataggactcttacatagactgtctattgtagtaaatctgtcggctttgttgactctgctcatcctgacatggtctacaagctcaacaagttctctatggtatgaagcaccccccgcacgcttggtatagcaagtttgctacatatccgctctccctaagctttgttgtggctaagtcggacatctttgtgcatctcttggcatagcagtgccactatgtacctcctcctgtatgttgatgacattgtgctcactacctcttcttcggtcatgttgcaccgtatcatcatagcaagaagtcacaatgaaggatctgggtcctcttcatcatttcctggggatgtcgttgagcgtcgctcgaatctttagcaatgttagtacaccctagatgtcctagagcgcactggcatgctagattgcaagccatgtgcgacattggtggacacacatgccaaggtctttggtgatggtgcctctgtcaacgacccactgtctaatgcagtcttgtcggcactctgtctccggttgtacggtgtttcttaggccaagctcatatcttggtcctccaagcgttaggttgtggtctcctgcttcagtgctgaggctgagtaccgggctgtcgctagtgtggtgtctgagacgagctagttgcgccatctccttcaggagtttcatagccctcaccaggagcatgcttgtctattgcgacaacgtcagcaccgtctacctcttcgtcaacctcgcccaacaccagcatacaaagcatgttgagattcatcttcacttcatccatgagcatgttgctgtcggagacgtccacgttcatcacatcccgatgagttcgtagtttgccttatttgatctttccttcttgttgctctcgaaatttctgttcagtttcaatatctgtcatggctagagtttcgactgcggggatgttaaattatttcatttctgtcgaagtgctatgggcctagagcccccgcccatgtaatatataatattgagctcactttttactccttccaacaatagcccactttttactccttcgaacaatgatattttgcatattctcttatttgatttagtacctctgtcccttttgttgcagcacacgtcattgagccctgatggaaagcttgttattattgttggtgatgacacagatgctttacttattgatgctaattcaggaaagactattcattccatgaaaggtcacttggatttctcctttgcttcggcttggagcccagatggcctgacattcgccacaggtaaccaagacaaaacttgtcggatttgggatgccaggaatctcaccgagtctgtccatgtcttgagaggcaacgttggagcaataagatctattcgttttacatccgacgggcacttcttgtcgatggcagaagcagcagactttgtccacatctttgacatcaaaagtgactacaataagagacaggaattggatttctttggcgaggtatccgactgtaaccttgctaacggag

SEQ ID NO: 79883 - DNA, 1525 bp, Zea Mays
cacatgccaaggtctttggtgatggtgcctctgtcaacgacccactgtctaatgcagtcttgtcggcactctgtctccggttgtacggtgtttcttaggccaagctcatatcttggtcctccaagcgttaggttgtggtctcctgcttcagtgctgaggctgagtaccgggctgtcgctagtgtggtgtctgagacgagctagttgcgccatctccttcaggagtttcatagccctcaccaggagcatgcttgtctattgcgacaacgtcagcaccgtctacctcttcgtcaacctcgcccaacaccagcatacaaagcatgttgagattcatcttcacttcatccatgagcatgttgctgtcggagacgtccacgttcatcacatcccgatgagttcgtagtttgccttatttgatctttccttcttgttgctctcgaaatttctgttcagtttcaatatctgtcatggctagagtttcgactgcggggatgttaaattatttcatttctgtcgaagtgctatgggcctagagcccccgcccatgtaatatataatattgagctcactttttactccttccaacaatagcccactttttactccttcgaacaatgatattttgcatattctcttatttgatttagtacctctgtcccttttgttgcagcacacgtcattgagccctgatggaaagcttgttattattgttggtgatgacacagatgctttacttattgatgctaattcaggaaagactattcattccatgaaaggtcacttggatttctcctttgcttcggcttggagcccagatggcctgacattcgccacagactttgtccacatctttgacatcaaaagtgactacaataagagacaggaattggatttctttggcgaggtatccggtatgtccttcagccccgacacggacacactttatgttggaatctcggacaggacatatggcagcctacttcagtttggccgcctctacaattattcatacctcgactcactactatgaaggtcaaagaaaatatgtgttttccctcggcttataatcaacccagattaggcatcccaaatgaaatttaatttagcctggtattcctcgtaaagaatcctgtaccctggtgtatgtgtacataaaaaaactgtattttatagacaccagtagtctgctaccctgctttcagataggtatataaggtgtcaggattcaaatcgcaagttagatctcaattcgttatagcacaagatgaatccataaagtcagaactttgcatgttaagggcttgctcgttttgatctcaatccatatggattaagtaagattgtgtgcctccgtccacgtgcaggagcggcctcattgtggcgcttcccgacacatgggttctaggtggaagtgagataaataggagatgggggttgtaccaaacgccttttgttcttagatccatggtggagtggagatactccacggtgaatctagatggaaacacatatggtggcttcctaca

SEQ ID NO: 79884 - DNA, 234 bp, Zea Mays
atccgcccattccgcccgccgcgttctctgctcctgcggcggctcaccctcggcggctcggcgtctctaaacaagggtgcagtttgcgcggcggccgtcggcctaccagtagtcctgccggtggtgcacgtgatggccaatgggcacgctttcgttggtagccaggaagcgatgatgcttacctgatgtcctctgctcaaccacaattggcctatgcccacatgtcacttcaag

SEQ ID NO: 79885 - DNA, 1231 bp, Zea Mays
ctcagaccctcacggtcaccctcatggcctcacccactcaccctctcggtctctccctctctcctagtttccccaaaaacgaaaccctagcgccgccgccccggtggccgtggacccctagagtagaaaaatagagcaggcgtcggtggccgtggacctgtggaggagagcaggcgccgccgcgccagtgtgctgcgtcgccggcgaaagcgtcattgagcaccgttcggagattccccttcccagcatcatcgcctgaccaagatttgacacagttcatctgtcgctcgagccataacgggcgtgatgtgatgaagaaactgaattttgtagtggaaatgaggtattgtgaggttccgccggcgtctcggcacaagtgaaccacgatctgcatctcagtcgtctccccaagcaccatcgcctatcatggatgcctacaggcaccagttgcagccagcaaaagcaaacttacaagtgaggtggttcctcccgcggattcaccagtaataaattatccaatgctttagacctagcaaagtgctacaaagaaaaggtcgtgcacatcacctacagggaggcctacaaagaagctttttgttaatgacgttgattagaaggatggaggggctgactgtgctgcagccaaagctaggcttattagctcctgcaagatcactggaatagatagttcagaacaaataagtgacattttgcgtggcattgaaggaagagtgatactgctttggtcatgtcttcttccacatgtgcattgagatctgtggtgagctatgtaattgacccaaaaggcacttcaagcgggcaggaaagtctaaggcccttactaagtacttccaaggtgttctggacaaagaaatcttgtacattaaaacaggaggatacaagaagctggagtggttgtctgaaggcttttgaactgtttgaagcgttagtgtagctttggtgcttttgtgactgatcagctctggagcagctagagtgatgtagttgtgggattttgaacaatagctagagtgatataaaacattagtgatgtagttgtgggcttttgaactgtttcaagctgaagtgatgtcgctgtggtgcttttgtgactgatcatctctggagcttttgtgaatgatctagctagctatctgtaaatgatctagttgtgaatgatattataattgtgatgcttttgtgaatatataattgtggtgcttttgtgttt

SEQ ID NO: 79886 - DNA, 945 bp, Zea Mays
cacccgacgtggtgtattgctccatcttaattgactataccttcaaattgggctaacccttcaatgttaccataagtctttccgcacagagggtagacgttaactgtcgatgcttagagttcagatcttcctaggcatgtgtgtggacctacaaaatttttgtgatcttgaactttccagcttccttctgcttgtgggcacaaaccctccaattgcaatccgacacctcgcacacaactctcctggtggtgctacgggggtgactgcgggggcgactgcggctggtggctgttgtcctcatcgaccatctcggcgacgtcctactcgagcgagatctcgctgcagtccctcgagatctggaggagattgacaaggagattgaggacaagaagacagagctggagcccaaggtcgtggaggcctacgaagcatctcctcctgaggtcaaggctctgttcaaggataagaagccagtcaaggtcatcaagaagaactcggctgcagtcaccaagttcctcgatgagctggctaagattggccatgttattagtcttgacctgtctaggcatgtaccaatatttcatggcaaatcttatatcccaagttttttatatgctcaacaggccgcacttgaagaaatcttatatcagtttgaggaaaaactccaagctgaaaaagtggaagctgctaggaagcaggaagagttgcaatctgtttgatgccttttctagaacatatctgtggttagaactttgtcagaactacgtgcaatctgtttcaatgcttcaaacctttgtggtggaacctttgtatgtttgaacctctgttgtggaagaactagtgtgctggaattgtgtatgacttgtgatgagaatgttgtgtatgatagcttttctgtgtattatgattctgtgagctatcatgagagctcagtgtgtcgtcact

SEQ ID NO: 79887 - DNA, 959 bp, Zea Mays
agagggtagacgttaactgtcgatgcttagagttcagatcttcctaggcatgtgtgtggacctacaaaatttttgtgatcttgaactttccagcttccttctgcttgtgggcacaaaccctccaattgcaatccgacacctcgcacacaactgtgtaacatcgctcgacatacgaacgtctcaccttgaatgttcttttatgcttcactgagtattcctatagctatcgttcagctcctggtggtgctacgggggtgactgcgggggcgactgcggctggtggctgttgtcctcatcgaccatctcggcgacgtcctactcgagcgagatctcgctgcagtccctcgagatctgcagaactaatatgttgcaggaggagattgacaaggagattgaggacaagaagacagagctggagcccaaggtcgtggaggcctacgaagcatctcctcctgaggtcaaggctctgttcaaggataagaagccagtcaaggtcatcaagaagaactcggctgcagtcaccaagttcctcgatgagctggctaagattggccatgttattagtcttgacctgtctaggcatgtaccaatatttcatggcaaatcttatatcccaagttttttatatgctcaacaggccgcacttgaagaaatcttatatcagtttgaggaaaaactccaagctgaaaaagtggaagctgctaggaagcaggaagagttgcaatctgtttgatgccttttctagaacatatctgtggttagaactttgtcagaactacgtgcaatctgtttcaatgcttcaaacctttgtggtggaacctttgtatgtttgaacctctgttgtggaagaactagtgtgctggaattgtgtatgacttgtgatgagaatgttgtgtatgatagcttttctgtgtattatgattctgtgagctatcatgagagctcagtgtgtcgtcact

SEQ ID NO: 79888 - DNA, 1688 bp, Zea Mays
agcgccccagactcgcccggcctgaaatctcacgcgtcgcgccgaaacctcatcgaccgcaacacgcgcacacgcctggtctcgtcgccctaaccgcacccttccaatgacggggcgctagcgaagccgcgcatcctccctgcatctcaccggtcgtcaccctaaccgcgcccttccaacgacgaggtcgctaccgaagcgccgcgcatcctcctcgcatcttcgtcgctcctgcgccgcgccgaaatcctcccccaccgcgcccttccatcgacgaccatggcggactacccacgcgtcatgcacgccccgccctccgtgcctgtcctccggggccagcgcgctcccctcctcctcaccagactctgccgccgcgggtctggttgcccacctcaactccgaggaacgaggactccaccatgctcgctctagagacaccgccttcctgtcctccgctcaccgtgcttgtcctcggatccacgactgccgccccgctccccccaaataccactgatgcagggatccaagcccctgccatctattcagccgccccgacgtccacaggggataccaactgatgggccaccaaccatgttgttccacgctctgggctgctgctggaagctaatcaatcgcttggttagaccatcgcagattagcggtgggattcccaggttcaataatctcgtttcgggccatgccctcgatgtcattatctggcttgaggtttgtcgtggagaagcaaagggatgtttacatgtgctctattctaagtcttagggtctgggattaattgggcaagcatggagtattcgcttggttctactcaagaagggaatcaaggaattcaggactttatgcactgattgtaatagtccaacgaaagagcggatccacatgttaaaaatctcagcaagtgttcctttctgacagagtttcaacttatgtgttactaatgtagaagggatcccaattacttgctgcattgggtgatcgaacagtcatagtatggagtttaggaaacaggaaatgcattggtctcttgtttgggcatactgggagcgtgaggtcgttgccttgccattcctccaatccggatcatgtattaagggtgtggacggttatgttgcctttttcacaaacttcaatttatgatcaattgcaagcaagatgtggtctagctgttggaatgcggatcacgaaggtggtgtcttcactcttcagcatgttccagtgtcgtgtgttccagatcgggttgctatcgggagtctgttggtttgcatggaatcaatcaggtttagcttggattcatgaataattggtttgtgtcgtccggctgttcgagctacgtcatcatgattagaatctacatttttccctacgcttgtatttaaaatggagtttacaaagataatcgttagaatggaatcgaaggctcattttttgttctatctgataatagccgaacgaatgaaatgcaatttaaatttatgagatattgaagttaataataataaatactgtttgttttcatataatcattatgtacaaacattatatcgaataaattgtggttcgttgcaacgcacgagcacttacctagtattgtaaacaagaattgaacattactttgtatatttgtccatgccttgtaatatattttacctttccatccatgtataaattgc

SEQ ID NO: 79889 - DNA, 1657 bp, Zea Mays
agcgccccagactcgcccggcctgaaatctcacgcgtcgcgccgaaacctcatcgaccgcaacacgcgcacacgcctggtctcgtcgccctaaccgcacccttccaatgacggggcgctagcgaagccgcgcatcctccctgcatctcaccggtcgtcaccctaaccgcgcccttccaacgacgaggtcgctaccgaagcgccgcgcatcctcctcgcatcttcgtcgctcctgcgccgcgccgaaatcctcccccaccgcgcccttccatcgacgaccatggcggactacccacgcgtcatgcacgccccgccctccgtgcctgtcctccggggccagcgcgctcccctcctcctcaccagactctgccgccgcgggtctggttgcccacctcaactccgaggaacgaggactccaccatgctcgctctagagacaccgccttcctgtcctccgctcaccgtgcttgtcctcggatccacgactgccgccccgctccccccaaataccactgatgcagggatccaagcccctgccatctattcagccgccccgacgtccacaggggataccaactgatgggccaccaaccatgttgttccacgctctgggctgctgctggaagctaatcaatcgcttggttagaccatcgcagattagcggtgggattcccaggttcaataatctcgtttcgggccatgccctcgatgtcattatctggcttgaggcaagcatggagtattcgcttggttctactcaagaagggaatcaaggaattcaggactttatgcactgattgtaatagtccaacgaaagagcggatccacatgttaaaaatctcagcaagtgttcctttctgacagagtttcaacttatgtgttactaatgtagaagggatcccaattacttgctgcattgggtgatcgaacagtcatagtatggagtttaggaaacaggaaatgcattggtctcttgtttgggcatactgggagcgtgaggtcgttgccttgccattcctccaatccggagagaacaagaacttgactggaacatcaagataagcaagtatcatgtattaagggtgtggacggttatgttgcctttttcacaaacttcaatttatgatcaattgcaagcaagatgtggtctagctgttggaatgcggatcacgaaggtggtgtcttcactcttcagcatgttccagtgtcgtgtgttccagatcgggttgctatcgggagtctgttggtttgcatggaatcaatcaggtttagcttggattcatgaataattggtttgtgtcgtccggctgttcgagctacgtcatcatgattagaatctacatttttccctacgcttgtatttaaaatggagtttacaaagataatcgttagaatggaatcgaaggctcattttttgttctatctgataatagccgaacgaatgaaatgcaatttaaatttatgagatattgaagttaataataataaatactgtttgttttcatataatcattatgtacaaacattatatcgaataaattgtggttcgttgcaacgcacgagcacttacctagtattgtaaacaagaattgaacattactttgtatatttgtccatgccttgtaatatattttacctttccatccatgtataaattgc

SEQ ID NO: 79890 - DNA, 1728 bp, Zea Mays
agcgccccagactcgcccggcctgaaatctcacgcgtcgcgccgaaacctcatcgaccgcaacacgcgcacacgcctggtctcgtcgccctaaccgcacccttccaatgacggggcgctagcgaagccgcgcatcctccctgcatctcaccggtcgtcaccctaaccgcgcccttccaacgacgaggtcgctaccgaagcgccgcgcatcctcctcgcatcttcgtcgctcctgcgccgcgccgaaatcctcccccaccgcgcccttccatcgacgaccatggcggactacccacgcgtcatgcacgccccgccctccgtgcctgtcctccggggccagcgcgctcccctcctcctcaccagactctgccgccgcgggtctggttgcccacctcaactccgaggaacgaggactccaccatgctcgctctagagacaccgccttcctgtcctccgctcaccgtgcttgtcctcggatccacgactgccgccccgctccccccaaataccactgatgcagggatccaagcccctgccatctattcagccgccccgacgtccacaggggataccaactgatgggccaccaaccatgttgttccacgctctgggctgctgctggaagctaatcaatcgcttggttagaccatcgcagattagcggtgggattcccaggttcaataatctcgtttcgggccatgccctcgatgtcattatctggcttgaggtttgtcgtggagaagcaaagggatgtttacatgtgctctattctaagtcttagggtctgggattaattgggcaagcatggagtattcgcttggttctactcaagaagggaatcaaggaattcaggactttatgcactgattgtaatagtccaacgaaagagcggatccacatgttaaaaatctcagcaagtgttcctttctgacagagtttcaacttatgtgttactaatgtagaagggatcccaattacttgctgcattgggtgatcgaacagtcatagtatggagtttaggaaacaggaaatgcattggtctcttgtttgggcatactgggagcgtgaggtcgttgccttgccattcctccaatccggagagaacaagaacttgactggaacatcaagataagcaagtatcatgtattaagggtgtggacggttatgttgcctttttcacaaacttcaatttatgatcaattgcaagcaagatgtggtctagctgttggaatgcggatcacgaaggtggtgtcttcactcttcagcatgttccagtgtcgtgtgttccagatcgggttgctatcgggagtctgttggtttgcatggaatcaatcaggtttagcttggattcatgaataattggtttgtgtcgtccggctgttcgagctacgtcatcatgattagaatctacatttttccctacgcttgtatttaaaatggagtttacaaagataatcgttagaatggaatcgaaggctcattttttgttctatctgataatagccgaacgaatgaaatgcaatttaaatttatgagatattgaagttaataataataaatactgtttgttttcatataatcattatgtacaaacattatatcgaataaattgtggttcgttgcaacgcacgagcacttacctagtattgtaaacaagaattgaacattactttgtatatttgtccatgccttgtaatatattttacctttccatccatgtataaattgc

SEQ ID NO: 79891 - DNA, 1802 bp, Zea Mays
cctggtctcgtcgccctaaccgcacccttccaatgacggggcgctagcgaagccgcgcatcctccctgcatctcaccggtcgtcaccctaaccgcgcccttccaacgacgaggtcgctaccgaagcgccgcgcatcctcctcgcatcttcgtcgctcctgcgccgcgccgaaatcctcccccaccgcgcccttccatcgacgaccatggcggactacccacgcgtcatgcacgccccgccctccgtgcctgtcctccggggccagcgcgctcccctcctcctcaccagactctgccgccgcgggtctggttgcccacctcaactccgaggaacgaggactccaccatgctcgctctagagacaccgccttcctgtcctccgctcaccgtgcttgtcctcggatccacgactgccgccccgctccccccaaataccactgatgcagggatccaagcccctgccatctattcagccgccccgacgtccacaggggataccaactgatgggccaccaaccatgttgttccacgctctgggctgctgctggaagctaatcaatcgcttggttagaccatcgcagattagcggtgggattcccaggttcaataatctcgtttcgggccatgccctcgatgtcattatctggcttgaggtttgtcgtggagaagcaaagggatgtttacatgtgctctattctaagtcttagggtctgggattaattgggtacgattcgttctagaggatgatgcgagtaagtgcttaagtgccctgctaattttttcagctacctctttcgaatttgttgtctacctgtttgttaggcaagcatggagtattcgcttggttctactcaagaagggaatcaaggaattcaggactttatgcactgattgtaatagtccaacgaaagagcggatccacatgttaaaaatctcagcaagtgttcctttctgacagagtttcaacttatgtgttactaatgtagaagggatcccaattacttgctgcattgggtgatcgaacagtcatagtatggagtttaggaaacaggaaatgcattggtctcttgtttgggcatactgggagcgtgaggtcgttgccttgccattcctccaatccggagagaacaagaacttgactggaacatcaagataagcaagtgtaaatacccaccttgaaattggtagttttaattcaaacacatgccttttatcatgtattaagggtgtggacggttatgttgcctttttcacaaacttcaatttatgatcaattgcaagcaagatgtggtctagctgttggaatgcggatcacgaaggtggtgtcttcactcttcagcatgttccagtgtcgtgtgttccagatcgggttgctatcgggagtctgttggtttgcatggaatcaatcaggtttagcttggattcatgaataattggtttgtgtcgtccggctgttcgagctacgtcatcatgattagaatctacatttttccctacgcttgtatttaaaatggagtttacaaagataatcgttagaatggaatcgaaggctcattttttgttctatctgataatagccgaacgaatgaaatgcaatttaaatttatgagatattgaagttaataataataaatactgtttgttttcatataatcattatgtacaaacattatatcgaataaattgtggttcgttgcaacgcacgagcacttacctagtattgtaaacaagaattgaacattactttgtatatttgtccatgccttgtaatatattttacctttccatccatgtataaattgc

SEQ ID NO: 79892 - DNA, 1772 bp, Zea Mays
tggtctcgtcgccctaaccgcacccttccaatgacggggcgctagcgaagccgcgcatcctccctgcatctcaccggtcgtcaccctaaccgcgcccttccaacgacgaggtcgctaccgaagcgccgcgcatcctcctcgcatcttcgtcgctcctgcgccgcgccgaaatcctcccccaccgcgcccttccatcgacgaccatggcggactacccacgcgtcatgcacgccccgccctccgtgcctgtcctccggggccagcgcgctcccctcctcctcaccagactctgccgccgcgggtctggttgcccacctcaactccgaggaacgaggactccaccatgctcgctctagagacaccgccttcctgtcctccgctcaccgtgcttgtcctcggatccacgactgccgccccgctccccccaaataccactgatgcagggatccaagcccctgccatctattcagccgccccgacgtccacaggggataccaactgatgggccaccaaccatgttgttccacgctctgggctgctgctggaagctaatcaatcgcttggttagaccatcgcagattagcggtgggattcccaggttcaataatctcgtttcgggccatgccctcgatgtcattatctggcttgaggtttgtcgtggagaagcaaagggatgtttacatgtgctctattctaagtcttagggtctgggattaattgggtacgattcgttctagaggatgatgcgagtaagtgcttaagtgccctgctaattttttcagctacctctttcgaatttgttgtctacctgtttgttaggcaagcatggagtattcgcttggttctactcaagaagggaatcaaggaattcaggactttatgcactgattgtaatagtccaacgaaagagcggatccacatgttaaaaatctcagcaagtgttcctttctgacagagtttcaacttatgtgttactaatgtagaagggatcccaattacttgctgcattgggtgatcgaacagtcatagtatggagtttaggaaacaggaaatgcattggtctcttgtttgggcatactgggagcgtgaggtcgttgccttgccattcctccaatccggagagaacaagaacttgactggaacatcaagataagcaagtgtaaatacccaccttgaaattgatcatgtattaagggtgtggacggttatgttgcctttttcacaaacttcaatttatgatcaattgcaagcaagatgtggtctagctgttggaatgcggatcacgaaggtggtgtcttcactcttcagcatgttccagtgtcgtgtgttccagatcgggttgctatcgggagtctgttggtttgcatggaatcaatcaggtttagcttggattcatgaataattggtttgtgtcgtccggctgttcgagctacgtcatcatgattagaatctacatttttccctacgcttgtatttaaaatggagtttacaaagataatcgttagaatggaatcgaaggctcattttttgttctatctgataatagccgaacgaatgaaatgcaatttaaatttatgagatattgaagttaataataataaatactgtttgttttcatataatcattatgtacaaacattatatcgaataaattgtggttcgttgcaacgcacgagcacttacctagtattgtaaacaagaattgaacattactttgtatatttgtccatgccttgtaatatattttacctttccatccatgtataaattgc

SEQ ID NO: 79893 - DNA, 1753 bp, Zea Mays
ggtctcgtcgccctaaccgcacccttccaatgacggggcgctagcgaagccgcgcatcctccctgcatctcaccggtcgtcaccctaaccgcgcccttccaacgacgaggtcgctaccgaagcgccgcgcatcctcctcgcatcttcgtcgctcctgcgccgcgccgaaatcctcccccaccgcgcccttccatcgacgaccatggcggactacccacgcgtcatgcacgccccgccctccgtgcctgtcctccggggccagcgcgctcccctcctcctcaccagactctgccgccgcgggtctggttgcccacctcaactccgaggaacgaggactccaccatgctcgctctagagacaccgccttcctgtcctccgctcaccgtgcttgtcctcggatccacgactgccgccccgctccccccaaataccactgatgcagggatccaagcccctgccatctattcagccgccccgacgtccacaggggataccaactgatgggccaccaaccatgttgttccacgctctgggctgctgctggaagctaatcaatcgcttggttagaccatcgcagattagcggtgggattcccaggttcaataatctcgtttcgggccatgccctcgatgtcattatctggcttgaggtttgtcgtggagaagcaaagggatgtttacatgtgctctattctaagtcttagggtctgggattaattgggtacgattcgttctagaggatgatgcgagtaagtgcttaagtgccctgctaattttttcagctacctctttcgaatttgttgtctacctgtttgttaggcaagcatggagtattcgcttggttctactcaagaagggaatcaaggaattcaggactttatgcactgattgtaatagtccaacgaaagagcggatccacatgttaaaaatctcagcaagtgttcctttctgacagagtttcaacttatgtgttactaatgtagaagggatcccaattacttgctgcattgggtgatcgaacagtcatagtatggagtttaggaaacaggaaatgcattggtctcttgtttgggcatactgggagcgtgaggtcgttgccttgccattcctccaatccggagagaacaagaacttgactggaacatcaagataagcaagtgtaaatcatgtattaagggtgtggacggttatgttgcctttttcacaaacttcaatttatgatcaattgcaagcaagatgtggtctagctgttggaatgcggatcacgaaggtggtgtcttcactcttcagcatgttccagtgtcgtgtgttccagatcgggttgctatcgggagtctgttggtttgcatggaatcaatcaggtttagcttggattcatgaataattggtttgtgtcgtccggctgttcgagctacgtcatcatgattagaatctacatttttccctacgcttgtatttaaaatggagtttacaaagataatcgttagaatggaatcgaaggctcattttttgttctatctgataatagccgaacgaatgaaatgcaatttaaatttatgagatattgaagttaataataataaatactgtttgttttcatataatcattatgtacaaacattatatcgaataaattgtggttcgttgcaacgcacgagcacttacctagtattgtaaacaagaattgaacattactttgtatatttgtccatgccttgtaatatattttacctttccatccatgtataaattgc

SEQ ID NO: 79894 - DNA, 2741 bp, Zea Mays
ggtctcgtcgccctaaccgcacccttccaatgacggggcgctagcgaagccgcgcatcctccctgcatctcaccggtcgtcaccctaaccgcgcccttccaacgacgaggtcgctaccgaagcgccgcgcatcctcctcgcatcttcgtcgctcctgcgccgcgccgaaatcctcccccaccgcgcccttccatcgacgaccatggcggactacccacgcgtcatgcacgccccgccctccgtgcctgtcctccggggccagcgcgctcccctcctcctcaccagactctgccgccgcgggtctggttgcccacctcaactccgaggaacgaggactccaccatgctcgctctagagacaccgccttcctgtcctccgctcaccgtgcttgtcctcggatccacgactgccgccccgctccccccaaataccactgatgcagggatccaagcccctgccatctattcagccgccccgacgtccacaggggataccaactgatgggccaccaaccatgttgttccacgctctgggctgctgctggaagctaatcaatcgcttggttagaccatcgcagattagcggtgggattcccaggttcaataatctcgtttcgggccatgccctcgatgtcattatctggcttgaggtttgtcgtggagaagcaaagggatgtttacatgtgctctattctaagtcttagggtctgggattaattgggcaagcatggagtattcgcttggttctactcaagaagggaatcaaggaattcaggactttatgcactgattgtaatagtccaacgaaagagcggatccacatgttaaaaatctcagcaagtgttcctttctgacagagtttcaacttatgtgttactaatgtagaagggatcccaattacttgctgcattgggtgatcgaacagtcatagtatggagtttaggaaacaggaaatgcattggtctcttgtttgggcatactgggagcgtgaggtcgttgccttgccattcctccaatccgggttagtaatgtatatcataaactaaatgactgaagcctttcattttaatttgtgtgcatttaactccatatgaagtagtttttttctttgcacaactcattgtttctggttcaaaggatggatcatttgctctctcggattctcagttgacttactctgataatataattttcctctaaagcaagaaagttgttgattctctctttagtgtgtacaccatttaaaaactgtcagattaagtttctccgtcctatgcaccgaagaggccctaaagctttatgtacacacgattttttcttgtattgtcctgttcacctctatccaaactatttgatgattggaaaatttaaaacagagggagtattatgttttagttttgttggcgtttggaaattactaaacttttgaggaaaattacatgcttgatattcaaatcgcaaatgttgtacattcctgcaacctaggcttgtaaatttcccattagagttttctctatttttttggcaatctgtttagttcatctgttaatgaaccgggtaagatgattagttctttgtcatgttatttactttgcatttaaactgggtaagatcattagcgctttgtcatgttatttactttgcatttagtcataatagaaattacttatttgtttcaaactataaaatgatttgacttctctacatacattgttcttaatacttatctaacatctaaaccctaaattgctccatagtttcaccaacaatatattttacttttgtagtttctgatgctgccaaactaggtccataagtattatttgcccatctatgatattgttccatgtacgactagaagttcaaatatctggaaaatgttctcttaacgtgatatcagacagcaccctgatttaaaatatcttaaccttcagtattgtccatgtaattgcagagagaacaagaacttgactggaacatcaagataagcaagtgtaaatacccaccttgaaattggtagttttaattcaaacacatgccttttgtatgttatgttcttgcctccttggtattataacatgcttgcattaaatgatttattgaaggtaaattctggaagtattgtgattcccataaaacgtgtccttacagatcatgtattaagggtgtggacggttatgttgcctttttcacaaacttcaatttatgatcaattgcaagcaagatgtggtctagctgttggaatgcggatcacgaaggtggtgtcttcactcttcagcatgttccagtgtcgtgtgttccagatcgggttgctatcgggagtctgttggtttgcatggaatcaatcaggtttagcttggattcatgaataattggtttgtgtcgtccggctgttcgagctacgtcatcatgattagaatctacatttttccctacgcttgtatttaaaatggagtttacaaagataatcgttagaatggaatcgaaggctcattttttgttctatctgataatagccgaacgaatgaaatgcaatttaaatttatgagatattgaagttaataataataaatactgtttgttttcatataatcattatgtacaaacattatatcgaataaattgtggttcgttgcaacgcacgagcacttacctagtattgtaaacaagaattgaacattactttgtatatttgtccatgccttgtaatatattttacctttccatccatgtataaattgc

SEQ ID NO: 79895 - DNA, 1719 bp, Zea Mays
ggtctcgtcgccctaaccgcacccttccaatgacggggcgctagcgaagccgcgcatcctccctgcatctcaccggtcgtcaccctaaccgcgcccttccaacgacgaggtcgctaccgaagcgccgcgcatcctcctcgcatcttcgtcgctcctgcgccgcgccgaaatcctcccccaccgcgcccttccatcgacgaccatggcggactacccacgcgtcatgcacgccccgccctccgtgcctgtcctccggggccagcgcgctcccctcctcctcaccagactctgccgccgcgggtctggttgcccacctcaactccgaggaacgaggactccaccatgctcgctctagagacaccgccttcctgtcctccgctcaccgtgcttgtcctcggatccacgactgccgccccgctccccccaaataccactgatgcagggatccaagcccctgccatctattcagccgccccgacgtccacaggggataccaactgatgggccaccaaccatgttgttccacgctctgggctgctgctggaagctaatcaatcgcttggttagaccatcgcagattagcggtgggattcccaggttcaataatctcgtttcgggccatgccctcgatgtcattatctggcttgaggtttgtcgtggagaagcaaagggatgtttacatgtgctctattctaagtcttagggtctgggattaattgggcaagcatggagtattcgcttggttctactcaagaagggaatcaaggaattcaggactttatgcactgattgtaatagtccaacgaaagagcggatccacatgttaaaaatctcagcaagtgttcctttctgacagagtttcaacttatgtgttactaatgtagaagggatcccaattacttgctgcattgggtgatcgaacagtcatagtatggagtttaggaaacaggaaatgcattggtctcttgtttgggcatactgggagcgtgaggtcgttgccttgccattcctccaatccggagagaacaagaacttgactggaacatcaagataagcaagtgtaaatacccaccttgaaattggtaaattctggaagtattgtgattcccataaaacgtgtccttacagatcatgtattaagggtgtggacggttatgttgcctttttcacaaacttcaatttatgatcaattgcaagcaagatgtggtctagctgttggaatgcggatcacgaaggtggtgtcttcactcttcagcatgttccagtgtcgtgtgttccagatcgggttgctatcgggagtctgttggtttgcatggaatcaatcaggtttagcttggattcatgaataattggtttgtgtcgtccggctgttcgagctacgtcatcatgattagaatctacatttttccctacgcttgtatttaaaatggagtttacaaagataatcgttagaatggaatcgaaggctcattttttgttctatctgataatagccgaacgaatgaaatgcaatttaaatttatgagatattgaagttaataataataaatactgtttgttttcatataatcattatgtacaaacattatatcgaataaattgtggttcgttgcaacgcacgagcacttacctagtattgtaaacaagaattgaacattactttgtatatttgtccatgccttgtaatatattttacctttccatccatgtataaattgc

SEQ ID NO: 79896 - DNA, 1653 bp, Zea Mays
ggtctcgtcgccctaaccgcacccttccaatgacggggcgctagcgaagccgcgcatcctccctgcatctcaccggtcgtcaccctaaccgcgcccttccaacgacgaggtcgctaccgaagcgccgcgcatcctcctcgcatcttcgtcgctcctgcgccgcgccgaaatcctcccccaccgcgcccttccatcgacgaccatggcggactacccacgcgtcatgcacgccccgccctccgtgcctgtcctccggggccagcgcgctcccctcctcctcaccagactctgccgccgcgggtctggttgcccacctcaactccgaggaacgaggactccaccatgctcgctctagagacaccgccttcctgtcctccgctcaccgtgcttgtcctcggatccacgactgccgccccgctccccccaaataccactgatgcagggatccaagcccctgccatctattcagccgccccgacgtccacaggggataccaactgatgggccaccaaccatgttgttccacgctctgggctgctgctggaagctaatcaatcgcttggttagaccatcgcagattagcggtgggattcccaggttcaataatctcgtttcgggccatgccctcgatgtcattatctggcttgaggtttgtcgtggagaagcaaagggatgtttacatgtgctctattctaagtcttagggtctgggattaattgggcaagcatggagtattcgcttggttctactcaagaagggaatcaaggaattcaggactttatgcactgattgtaatagtccaacgaaagagcggatccacatgttaaaaatctcagcaagtgttcctttctgacagagtttcaacttatgtgttactaatgtagaagggatcccaattacttgctgcattgggtgatcgaacagtcatagtatggagtttaggaaacaggaaatgcattggtctcttgtttgggcatactgggagcgtgaggtcgttgccttgccattcctccaatccggagagaacaagaacttgactggaacatcaagataagcaagtgtatcatgtattaagggtgtggacggttatgttgcctttttcacaaacttcaatttatgatcaattgcaagcaagatgtggtctagctgttggaatgcggatcacgaaggtggtgtcttcactcttcagcatgttccagtgtcgtgtgttccagatcgggttgctatcgggagtctgttggtttgcatggaatcaatcaggtttagcttggattcatgaataattggtttgtgtcgtccggctgttcgagctacgtcatcatgattagaatctacatttttccctacgcttgtatttaaaatggagtttacaaagataatcgttagaatggaatcgaaggctcattttttgttctatctgataatagccgaacgaatgaaatgcaatttaaatttatgagatattgaagttaataataataaatactgtttgttttcatataatcattatgtacaaacattatatcgaataaattgtggttcgttgcaacgcacgagcacttacctagtattgtaaacaagaattgaacattactttgtatatttgtccatgccttgtaatatattttacctttccatccatgtataaattgc

SEQ ID NO: 79897 - DNA, 1517 bp, Zea Mays
cctaaccgcacccttccaatgacggggcgctagcgaagccgcgcatcctccctgcatctcaccggtcgtcaccctaaccgcgcccttccaacgacgaggtcgctaccgaagcgccgcgcatcctcctcgcatcttcgtcgctcctgcgccgcgccgaaatcctcccccaccgcgcccttccatcgacgaccatggcggactacccacgcgtcatgcacgccccgccctccgtgcctgtcctccggggccagcgcgctcccctcctcctcaccagactctgccgccgcgggtctggttgcccacctcaactccgaggaacgaggactccaccatgctcgctctagagacaccgccttcctgtcctccgctcaccgtgcttgtcctcggatccacgactgccgccccgctccccccaaataccactgatgcagggatccaagcccctgccatctattcagccgccccgacgtccacaggggataccaactgatgggccaccaaccatgttgttccacgctctgggctgctgctggaagctaatcaatcgcttggttagaccatcgcagattagcggtgggattcccaggcaagcatggagtattcgcttggttctactcaagaagggaatcaaggaattcaggactttatgcactgattgtaatagtccaacgaaagagcggatccacatgttaaaaatctcagcaagtgttcctttctgacagagtttcaacttatgtgttactaatgtagaagggatcccaattacttgctgcattgggtgatcgaacagtcatagtatggagtttaggaaacaggaaatgcattggtctcttgtttgggcatactgggagcgtgaggtcgttgccttgccattcctccaatccggagagaacaagaacttgactggaacatcaagataagcaagtatcatgtattaagggtgtggacggttatgttgcctttttcacaaacttcaatttatgatcaattgcaagcaagatgtggtctagctgttggaatgcggatcacgaaggtggtgtcttcactcttcagcatgttccagtgtcgtgtgttccagatcgggttgctatcgggagtctgttggtttgcatggaatcaatcaggtttagcttggattcatgaataattggtttgtgtcgtccggctgttcgagctacgtcatcatgattagaatctacatttttccctacgcttgtatttaaaatggagtttacaaagataatcgttagaatggaatcgaaggctcattttttgttctatctgataatagccgaacgaatgaaatgcaatttaaatttatgagatattgaagttaataataataaatactgtttgttttcatataatcattatgtacaaacattatatcgaataaattgtggttcgttgcaacgcacgagcacttacctagtattgtaaacaagaattgaacattactttgtatatttgtccatgccttgtaatatattttacctttccatccatgtataaattgc

SEQ ID NO: 79898 - DNA, 2099 bp, Zea Mays
atggagcggtgggaggactcggttgaaaaacgcgtgacaacctggggtgcctctcagcaaaactaccaccacgatcggaagcttctccgccatcttctgtttccttcccgacgaagcagcagctgcaacgactcctcacccaaatctgccctgccgctctctccgccgtcatctccaacctccggggatcttagccgccaaatctgggccgtgctcgcgcttgggcatctgcggcctacgatggggagcgagtcggagcccgccaaggggctgctgccctacctgcagcgcgcggacgaactgcagaagcacgagcccctcgtggcgtactactgtcggctctacgcgatggagaaggggttgaggataccccagaaggagcgcaccaagaccacaaactccattctcatctcccttatgaaccagctcgagaaggacaagaagtcgttgactttggggcctgacgacaatcttcatttggaggggtttgcattaaatgtctttgctaaagcagataaacaggaccgtgctggacgagctgacataaacactgctaaaaccttctatgctgcaagcatcttctttgagattcttaaccagtttggtgagcttcaacctgatattgagcaaaaacagaaatatgccatctggaaagctgctgaaataagaaaagctctcaaagaaggccgacagcctgaagctggaccacctggtgggggtaaagatgaagcgcctgtcaataccaccaccatttctcagattttggcattcactggttctcaacctttgtattatttggaactgtaaacaggatatggcgcgaagccattccttcagcagtgcgaaccagggcagtgaagcatcacctcgacctgtcaacatggattttagtaggcggggtagcttttctgctgtgcagccaggaaataatttgcctccccaaagtacagaattcaatgatcatccctctacccagtcaccctattcttccccaccaccctcacagtcccagcacccttctccatcacaatcttattcctctccctcataccaggcaacagattacccttcttctgatattcacaaaccatcccccaattattcatcttccccctacacaagcacagactaccctaccaatgagctccacaaaccaccttccaattattccccacctccttacaccaggacagatcacccttctaatgatggctacaatcctcacagcaatgataaaccggatgtttcggcttaccctcaggcataccaacccccaccctacacaattgaccctcagcacatctctcaaaactactactccaccaaagccccagctgctccatacaactaccctaattttcagtcatatccaagttttcaggacagcacgtcaccttctgtcccgactgagccgacgtatcaatcttcattctatcctgcaactgatggtcctgcagctacttcgtacactcctgcttcaaattcctctgccccaacacattaccactcaactgctgactattcacctcaagttactcctccagctgcgccaccagctagccaatataaatatgatagcagttaccagcctgaagttgagaagattgctgaggctcacaaggcagccaggtttgcggtcggtgctcttgcatttgacgacgtatctgttgccgtggatcacctgaaacgtgcactggatcttctgacaaacccttctgctgaacctcgctagctcttttgcattcccttgctcttgtcagaagcatcatctgtacatatacaagattggcgtaccacccatggataaattgccaggctgcatacttacaagacaggggtaaccacacaaatctaggagataataagcgagcctttccgtgtgagcttttgaagtgacacttacaggaaaccttaatgtctaaaatctagttattttattctgagttttgtgctatgtaacccattatattcatttgcacgttctcgaggtctggtatggtattttgggtatggatggttgatgccgtgcctgcttgtttctctttcatggtttgtcatgctgctgtcactcacgaaaagatgatttagatgcgaaaggt

SEQ ID NO: 79899 - DNA, 1909 bp, Zea Mays
ccgactgctagagatggctaagaaacaaacgattggagctcctgccgctcacggattagtccggatcgttcgtcagctgccagggcccaggacaactgtccctgcaggcctgcacgccggcgtccgtgtgatcgcgctcgcgcctccgaagatctgagcagctcagctagtggactcgtttcgcttcctccaggctccagcgcctgaggcagccgcaacgcaagggccccggaaccacgcgaaaacgcggccaaaacaccgcgaaaatctcgacacccaactgcgccgcgtgggcggctgcggcggacgaccaatgtggagggggacgcgcatgtacagcctcctaggcgtcctcctcctcctggccctggcctacctgaactggcatccaggccacggcccctccgccggcggccctggtgggttcaagctccccatgccgtggctgcagccgcggatgtccttcgtgggccgcgccggcacccacttcgtcgacaccctcactggcgcgccgatctacatcaacggctggaactcgtactggctcctctcggcccggtctccctcgttgtccgtcgagatgctgcgccgcggccgccgcatggggctgacgatatgccgcacatgggcattcagcgacggtggccccggcgcgctgcagatctccccaggccggtttagcgagcctgttttccagatgctggattatgtgatatacgagtcccgaagaaatcatgttagattgatcctatgccttgtcaacaatcttgataactttggagggaaggcccagtatgttcaatgggcacaagcagctggtgttaatgtcacaaattctacggattcctttttctttcacccaactattaaaggttactacatggagtatgtaaaggcaatattaaccagaagaaacacttacagtggaatcaaatattgtgatgaacctgctatatttgcttgggaactcatgaatgagcctagatgtgtgtccaattcatcgggtccgtatattcagtcttggatagaagaaatggcagcatatattaagagtttggacagaaagcatcttattacagtgggtactgaaggattttatggccctgggagaggtgagagactgggcgtaaatcctggagactgggcagcttcagtctgctctgactttatacagaactcagctgtcaaagatattgattttgcctcggttcacgcctatcctgatagctggctaccaaaggcaagtatggaagaaaaagtcaagtacctttctgtctgggttgattcacacttgaatgatagtgaatacgtcttgagaaagcctgtcttgtttacagaagtaggttacctccaacatgcagaagctaacagcacagttgatggagacattcttctaaaagttgtctatgataaactatacgattcggcaaaaaagctgcaagcaggaagtggcgctcttatttggcagttgatggtcgaaggcacgcagatgtaccatgatgacttctccatggtggcacgggatcgtccgtccacatataagctgatgaaggagcagtcatgccgactgcagagtctatatggaaaagagggagaccctacttggaaatgctcaccctaaggttttttcttcttcctattggtttcgaaaccttccacttcatccaacaaactggattgttggaatcattcagaaagaggatgattagggaaatgatgaacaaacatctgtgtggtaaatagcttgttcatagatttgtagctgaagagctagactgctagtggaaaatccacttcttacaacaaacatgcattctgtcatatcacatcatgctgtacgttgtacaattaatatgacctattagtggtcaaagtgaaaagagcaccgatacaagttatgatatctact

SEQ ID NO: 79900 - DNA, 1689 bp, Zea Mays
aaacaaacgattggagctcctgccgctcacggattagtccggatcgttcgtcagctgccagggcccaggacaactgtccctgcaggcctgcacgccggcgtccgtgtgatcgcgctcgcgcctccgaagatctgagcagctcagctagtggactcgtttcgcttcctccaggctccagcgcctgaggcagccgcaacgcaagggccccggaaccacgcgaaaacgcggccaaaacaccgcgaaaatctcgacacccaactgcgccgcgtgggcggctgcggcggacgaccaatgtggagggggacgcgcatgtacagcctcctaggcgtcctcctcctcctggccctggcctacctgaactggcatccaggccacggcccctccgccggcggccctggtgggttcaagctccccatgccgtggctgcagccgcggatgtccttcgtgggccgcgccggcacccacttcgtcgacaccctcactggcgcgccgatctacatcaacggctggaactcgtactggctcctctcggcccggtctccctcgttgtccgtcgagatgctgcgccgcggccgccgcatggggctgacgatatgccgcacatgggcattcagcgacggtggccccggcgcgctgcagatctccccaggccggtttagcgagcctgttttccaggcaatattaaccagaagaaacacttacagtggaatcaaatattgtgatgaacctgctatatttgcttgggaactcatgaatgagcctagatgtgtgtccaattcatcgggtccgtatattcagtcttggatagaagaaatggcagcatatattaagagtttggacagaaagcatcttattacagtgggtactgaaggattttatggccctgggagaggtgagagactgggcgtaaatcctggagactgggcagcttcagtctgctctgactttatacagaactcagctgtcaaagatattgattttgcctcggttcacgcctatcctgatagctggctaccaaaggcaagtatggaagaaaaagtcaagtacctttctgtctgggttgattcacacttgaatgatagtgaatacgtcttgagaaagcctgtcttgtttacagaagtaggttacctccaacatgcagaagctaacagcacagttgatggagacattcttctaaaagttgtctatgataaactatacgattcggcaaaaaagctgcaagcaggaagtggcgctcttatttggcagttgatggtcgaaggcacgcagatgtaccatgatgacttctccatggtggcacgggatcgtccgtccacatataagctgatgaaggagcagtcatgccgactgcagagtctatatggaaaagagggagaccctacttggaaatgctcaccctaaggttttttcttcttcctattggtttcgaaaccttccacttcatccaacaaactggattgttggaatcattcagaaagaggatgattagggaaatgatgaacaaacatctgtgtggtaaatagcttgttcatagatttgtagctgaagagctagactgctagtggaaaatccacttcttacaacaaacatgcattctgtcatatcacatcatgctgtacgttgtacaattaatatgacctattagtggtcaaagtgaaaagagcaccgatacaagttatgatatctact

SEQ ID NO: 79901 - DNA, 1926 bp, Zea Mays
agctcagctagtggactcgtttcgcttcctccaggctccagcgcctgaggcagccgcaacgcaagggccccggaaccacgcgaaaacgcggccaaaacaccgcgaaaatctcgacacccaactgcgccgcgtgggcggctgcggcggacgaccaatgtggagggggacgcgcatgtacagcctcctaggcgtcctcctcctcctggccctggcctacctgaactggcatccaggccacggcccctccgccggcggccctggtgggttcaagctccccatgccgtggctgcagccgcggatgtccttcgtgggccgcgccggcacccacttcgtcgacaccctcactggcgcgccgatctacatcaacggctggaactcgtactggctcctctcggcccggtctccctcgttgtccgtcgagatgctgcgccgcggccgccgcatggggctgacgatatgccgcacatgggcattcagcgacggtggccccggcgcgctgcagatctccccaggccggtttagcgagcctgttttccagatgctggattatgtgatatacgagtcccgaagaaatcatgttagattgatcctatgccttgtcaacaatcttgataactttggagggaaggcccagtatgttcaatgggcacaagcagctggtgttaatgtcacaaattctacggattcctttttctttcacccaactattaaaggttactacatggagtatgtaaaggcaatattaaccagaagaaacacttacagtggaatcaaatattgtgatgaacctgctatatttgcttgggaactcatgaatgagcctagatgtgtgtccaattcatcggtcttggatagaagaaatggcagcatatattaagagtttggacagaaagcatcttattacagtgggtactgaaggattttatggccctgggagaggtgagagactgggcgtaaatcctggagactgggcagcttcagtctgctctgactttatacagaactcagctgtcaaagatattgattttgcctcggttcacgcctatcctgatagctggtctgtatcattacattttcattactgaacaattttaattgtaccatgtcattgatgcatctttgctacaggctaccaaaggcaagtatggaagaaaaagtcaagtacctttctgtctgggttgattcacacttgaatgatagtgaatacgtcttgagaaagcctgtcttgtttacagaagtaggttacctccaacatgcagaagctaacagcacagttgatggagacattcttctaaaagttgtctatgataaactatacgattcggcaaaaaagctgcaagcaggaagtggcgctcttatttggcagttgatggtcgaaggcacgcagatgtaccatgatgacttctccatggtggcacgggatcgtccgtccacatataagctgatgaaggagcagtcatgccgactgcagagtctatatggaaaagagggagaccctacttggaaatgctcaccctaagggctagtttggcaacccaatttttctatggaattttcaattttctaaggaaaaataaactaatttcccttaaaaaaatgaaaaacctgtagaaaaatggggttcccaaattagccctaagttttttcttcttcctattggtttcgaaaccttccacttcatccaacaaactggattgttggaatcattcagaaagaggatgattagggaaatgatgaacaaacatctgtgtggtaaatagcttgttcatagatttgtagctgaagagctagactgctagtggaaaatccacttcttacaacaaacatgcattctgtcatatcacatcatgctgtacgttgtacaattaatatgacctattagtggtcaaagtgaaaagagcaccgatacaagttatgatatctact

SEQ ID NO: 79902 - DNA, 1872 bp, Zea Mays
cccgcggtacgtgccctccttctcgcgctcctaaacaatcgcccgacatcctccccttccattctaggctccgtgtctcgctgtccccactacgtctcctccggctccatctcatcccgctgccgctccttctcatcgtcgtcgtcccagtcccggagtcgctcccctcctctggctaagcgcaggtcaagctacattccgtgctattcaaaggccccaaggatgacgcaatggcaatgactatctaccaatggacatcgtggagctatcttccgatcatttgatagagaataaacctttgctgctaaaggatgtcaagttctaaaacgtacacgggcttaccagtgcttatggacctttgtttgttcgggacactacctttgctaatggggaacaggtaagcggtaggctatatatcttgtttctcttttgaaataatgcaaaatactcttacatctttacataagctttaatgttgattgttgcagatttttttggtccagggttaattatattttattttgttaatataattagaaatgatcacaataagggagctacatttgagttatttgagttgtagggtgcgttcaggagactatagggtcgtgggtgtaagatatggtttagagaatgtgtctactggaacatcctttgtaccaattccctgtatacatctatctatcgttaaaacaccttctattggaacatattttcactatacatacacttatgagtaaggtatttagctcaaatttatctatacaatatccttttgtattcctaaatagcctgccgaaagaagaagatagccacaattatgcatgaaagctccgtttctacgattgtataccgtcacaacgtacgggtattggactagtttgtatagaaaagagagaagggaaaatctgaattttcttgcctctacatgtccatctccaacaaagcaacaactacaacccaaaaataatgtattatatatatatatttaaaactgctacttttagctacctctacagatctgctaaaaatgcttgaatgaaggcattattagtctataattttttagatagccaacatctgctaaatcctatgtattcgacattgtgtgtcctaatctccccttataaaaaataactgcatgactgcattctcaatgtaacactttttttttacagataaatttcaattactatacttatagaaaataaacaaggtccaacgttgtttgctttccatttcccttctactttgatattatgtgatttggtttattcatattactgtccatagcatatttgttgtggacacagttataaattcgttttctcgacactgcacaggcaaggggaaaatcttcttatagatctgttccgtcactgtgacaatcatttgggagagaaacaaaaaactccatctggaagtgcacgacagccactacagttgactaacgatgtaaccaagatgatgcaaaagcatcagctagaaacgccacagttccatcagacccgattttccgttttacagaatgtaccgaggagcacagagaaagatgtctcctttttaattcctcattcttggctgcctgctatgttagatgatcagatgtcatttccatccttaagacaaacaagaactacaggctgcttccgtcttcacccaatcagggatgaggatgccaagttcaagctctgcaacaggaggtctgttcagtttgacgtcggcaacatggtcatggtgaccggcgggaggaacactgggcgtgtaggagtgatcaagaactgggagaagcacaagggcatcttcgaggaaaacatagaatggaattcaaatttggtggtcgtaaaagtgtggagacttgaattcaaataa

SEQ ID NO: 79903 - DNA, 1264 bp, Zea Mays
cccgcggtacgtgccctccttctcgcgctcctaaacaatcgcccgacatcctccccttccattctaggctccgtgtctcgctgtccccactacgtctcctccggctccatctcatcccgctgccgctccttctcatcgtcgtcgtcccagtcccggagtcgctcccctcctctggctaagcgcaggtcaagctacattccgtgctattcaaaggccccaaggatgacggtaagatttgcaactccctgtctgtctgggtctgtgagctaacggacttgtgccaaattgttagtttatatgttcaaagtagatagaagtactactttcctatgagttagtttcagcaacaaggatgtggaagtaaaccaactgctgctctaacggttacatgcagaattgcagaccatgagttcaaccccatcttttcacatggcactcatcagactctttatggaatagttaacattagtgttattaagaacaaaagttagattcataattaagtgagtctataattttgatgtccatataaaggagcactcatgtactagcgttgaatagatatttagctgaaatgcatatttatgtaataaatgtcagcaatggcaatgactatctaccaatggacatcgtggagctatcttccgatcatttgatagagaataaacctttgctgctaaaggatgtcaagttctaaaacgtacacgggcttaccagtgcttatggacctttgtttgttcgggacactacctttgctaatggggaacaggcaaggggaaaatcttcttatagatctgttccgtcactgtgacaatcatttgggagagaaacaagtaaacaacccttttttccataaaactccatctggaagtgcacgacagccactacagttgactaacgatgtaaccaagatgatgcaaaagcatcagctagaaacgccacagttccatcagacccgattttccgttttacagaatgtaccgaggagcacagagaaatgtcatttccatccttaagacaaacaagaactacaggctgcttccgtcttcacccaatcagggatgaggatgccaagttcaagctctgcaacaggaggtctgttcagtttgacgtcggcaacatggtcatggtgaccggcgggaggaacactgggcgtgtaggagtgatcaagaactgggagaagcacaagggcatcttcgaggaaaacatagaatggaattcaaatttggtggtcgtaaaagtgtggagacttgaattcaaataa

SEQ ID NO: 79904 - DNA, 807 bp, Zea Mays
cccgcggtacgtgccctccttctcgcgctcctaaacaatcgcccgacatcctccccttccattctaggctccgtgtctcgctgtccccactacgtctcctccggctccatctcatcccgctgccgctccttctcatcgtcgtcgtcccagtcccggagtcgctcccctcctctggctaagcgcaggtcaagctacattccgtgctattcaaaggccccaaggatgacgcaatggcaatgactatctaccaatggacatcgtggagctatcttccgatcatttgatagagaataaacctttgctgctaaaggatgtcaagttctaaaacgtacacgggcttaccagtgcttatggacctttgtttgttcgggacactacctttgctaatggggaacagaaaactccatctggaagtgcacgacagccactacagttgactaacgatgtaaccaagatgatgcaaaagcatcagctagaaacgccacagttccatcagacccgattttccgttttacagaatgtaccgaggagcacagagaaatgtcatttccatccttaagacaaacaagaactacaggctgcttccgtcttcacccaatcagggatgaggatgccaagttcaagctctgcaacaggaggtctgttcagtttgacgtcggcaacatggtcatggtgaccggcgggaggaacactgggcgtgtaggagtgatcaagaactgggagaagcacaagggcatcttcgaggaaaacatagaatggaattcaaatttggtggtcgtaaaagtgtggagacttgaattcaaataa

SEQ ID NO: 79905 - DNA, 1893 bp, Zea Mays
cccgcggtacgtgccctccttctcgcgctcctaaacaatcgcccgacatcctccccttccattctaggctccgtgtctcgctgtccccactacgtctcctccggctccatctcatcccgctgccgctccttctcatcgtcgtcgtcccagtcccggagtcgctcccctcctctggctaagcgcaggtcaagctacattccgtgctattcaaaggccccaaggatgacgcaatggcaatgactatctaccaatggacatcgtggagctatcttccgatcatttgatagagaataaacctttgctgctaaaggatgtcaagttctaaaacgtacacgggcttaccagtgcttatggacctttgtttgttcgggacactacctttgctaatggggaacaggtaagcggtaggctatatatcttgtttctcttttgaaataatgcaaaatactcttacatctttacataagctttaatgttgattgttgcagatttttttggtccagggttaattatattttattttgttaatataattagaaatgatcacaataagggagctacatttgagttatttgagttgtagggtgcgttcaggagactatagggtcgtgggtgtaagatatggtttagagaatgtgtctactggaacatcctttgtaccaattccctgtatacatctatctatcgttaaaacaccttctattggaacatattttcactatacatacacttatgagtaaggtatttagctcaaatttatctatacaatatccttttgtattcctaaatagcctgccgaaagaagaagatagccacaattatgcatgaaagctccgtttctacgattgtataccgtcacaacgtacgggtattggactagtttgtatagaaaagagagaagggaaaatctgaattttcttgcctctacatgtccatctccaacaaagcaacaactacaacccaaaaataatgtattatatatatatatttaaaactgctacttttagctacctctacagatctgctaaaaatgcttgaatgaaggcattattagtctataattttttagatagccaacatctgctaaatcctatgtattcgacattgtgtgtcctaatctccccttataaaaaataactgcatgactgcattctcaatgtaacactttttttttacagataaatttcaattactatacttatagaaaataaacaaggtccaacgttgtttgctttccatttcccttctactttgatattatgtgatttggtttattcatattactgtccatagcatatttgttgtggacacagttataaattcgttttctcgacactgcacaggcaaggggaaaatcttcttatagatctgttccgtcactgtgacaatcatttgggagagaaacaagtaaacaacccttttttccataaaactccatctggaagtgcacgacagccactacagttgactaacgatgtaaccaagatgatgcaaaagcatcagctagaaacgccacagttccatcagacccgattttccgttttacagaatgtaccgaggagcacagagaaagatgtctcctttttaattcctcattcttggctgcctgctatgttagatgatcagatgtcatttccatccttaagacaaacaagaactacaggctgcttccgtcttcacccaatcagggatgaggatgccaagttcaagctctgcaacaggaggtctgttcagtttgacgtcggcaacatggtcatggtgaccggcgggaggaacactgggcgtgtaggagtgatcaagaactgggagaagcacaagggcatcttcgaggaaaacatagaatggaattcaaatttggtggtcgtaaaagtgtggagacttgaattcaaataa

SEQ ID NO: 79906 - DNA, 2244 bp, Zea Mays
cccgcggtacgtgccctccttctcgcgctcctaaacaatcgcccgacatcctccccttccattctaggctccgtgtctcgctgtccccactacgtctcctccggctccatctcatcccgctgccgctccttctcatcgtcgtcgtcccagtcccggagtcgctcccctcctctggctaagcgcaggtcaagctacattccgtgctattcaaaggccccaaggatgacggtaagatttgcaactccctgtctgtctgggtctgtgagctaacggacttgtgccaaattgttagtttatatgttcaaagtagatagaagtactactttcctatgagttagtttcagcaacaaggatgtggaagtaaaccaactgctgctctaacggttacatgcagaattgcagaccatgagttcaaccccatcttttcacatggcactcatcagactctttatggaatagttaacattagtgttattaagaacaaaagttagattcataattaagtgagtctataattttgatgtccatataaaggagcactcatgtactagcgttgaatagatatttagctgaaatgcatatttatgtaataaatgtcagcaatggcaatgactatctaccaatggacatcgtggagctatcttccgatcatttgatagagaataaacctttgctgctaaaggatgtcaagttctaaaacgtacacgggcttaccagtgcttatggacctttgtttgttcgggacactacctttgctaatggggaacaggtaagcggtaggctatatatcttgtttctcttttgaaataatgcaaaatactcttacatctttacataagctttaatgttgattgttgcagatttttttggtccagggttaattatattttattttgttaatataattagaaatgatcacaataagggagctacatttgagttatttgagttgtagggtgcgttcaggagactatagggtcgtgggtgtaagatatggtttagagaatgtgtctactggaacatcctttgtaccaattccctgtatacatctatctatcgttaaaacaccttctattggaacatattttcactatacatacacttatgagtaaggtatttagctcaaatttatctatacaatatccttttgtattcctaaatagcctgccgaaagaagaagatagccacaattatgcatgaaagctccgtttctacgattgtataccgtcacaacgtacgggtattggactagtttgtatagaaaagagagaagggaaaatctgaattttcttgcctctacatgtccatctccaacaaagcaacaactacaacccaaaaataatgtattatatatatatatttaaaactgctacttttagctacctctacagatctgctaaaaatgcttgaatgaaggcattattagtctataattttttagatagccaacatctgctaaatcctatgtattcgacattgtgtgtcctaatctccccttataaaaaataactgcatgactgcattctcaatgtaacactttttttttacagataaatttcaattactatacttatagaaaataaacaaggtccaacgttgtttgctttccatttcccttctactttgatattatgtgatttggtttattcatattactgtccatagcatatttgttgtggacacagttataaattcgttttctcgacactgcacaggcaaggggaaaatcttcttatagatctgttccgtcactgtgacaatcatttgggagagaaacaaaaaactccatctggaagtgcacgacagccactacagttgactaacgatgtaaccaagatgatgcaaaagcatcagctagaaacgccacagttccatcagacccgattttccgttttacagaatgtaccgaggagcacagagaaagatgtctcctttttaattcctcattcttggctgcctgctatgttagatgatcagatgtcatttccatccttaagacaaacaagaactacaggctgcttccgtcttcacccaatcagggatgaggatgccaagttcaagctctgcaacaggaggtctgttcagtttgacgtcggcaacatggtcatggtgaccggcgggaggaacactgggcgtgtaggagtgatcaagaactgggagaagcacaagggcatcttcgaggaaaacatagaatggaattcaaatttggtggtcgtaaaagtgtggagacttgaattcaaataa

SEQ ID NO: 79907 - DNA, 1764 bp, Zea Mays
cccgcggtacgtgccctccttctcgcgctcctaaacaatcgcccgacatcctccccttccattctaggctccgtgtctcgctgtccccactacgtctcctccggctccatctcatcccgctgccgctccttctcatcgtcgtcgtcccagtcccggagtcgctcccctcctctggctaagcgcaggtcaagctacattccgtgctattcaaaggccccaaggatgacggcttaccagtgcttatggacctttgtttgttcgggacactacctttgctaatggggaacaggtaagcggtaggctatatatcttgtttctcttttgaaataatgcaaaatactcttacatctttacataagctttaatgttgattgttgcagatttttttggtccagggttaattatattttattttgttaatataattagaaatgatcacaataagggagctacatttgagttatttgagttgtagggtgcgttcaggagactatagggtcgtgggtgtaagatatggtttagagaatgtgtctactggaacatcctttgtaccaattccctgtatacatctatctatcgttaaaacaccttctattggaacatattttcactatacatacacttatgagtaaggtatttagctcaaatttatctatacaatatccttttgtattcctaaatagcctgccgaaagaagaagatagccacaattatgcatgaaagctccgtttctacgattgtataccgtcacaacgtacgggtattggactagtttgtatagaaaagagagaagggaaaatctgaattttcttgcctctacatgtccatctccaacaaagcaacaactacaacccaaaaataatgtattatatatatatatttaaaactgctacttttagctacctctacagatctgctaaaaatgcttgaatgaaggcattattagtctataattttttagatagccaacatctgctaaatcctatgtattcgacattgtgtgtcctaatctccccttataaaaaataactgcatgactgcattctcaatgtaacactttttttttacagataaatttcaattactatacttatagaaaataaacaaggtccaacgttgtttgctttccatttcccttctactttgatattatgtgatttggtttattcatattactgtccatagcatatttgttgtggacacagttataaattcgttttctcgacactgcacaggcaaggggaaaatcttcttatagatctgttccgtcactgtgacaatcatttgggagagaaacaaaaaactccatctggaagtgcacgacagccactacagttgactaacgatgtaaccaagatgatgcaaaagcatcagctagaaacgccacagttccatcagacccgattttccgttttacagaatgtaccgaggagcacagagaaagatgtctcctttttaattcctcattcttggctgcctgctatgttagatgatcagatgtcatttccatccttaagacaaacaagaactacaggctgcttccgtcttcacccaatcagggatgaggatgccaagttcaagctctgcaacaggaggtctgttcagtttgacgtcggcaacatggtcatggtgaccggcgggaggaacactgggcgtgtaggagtgatcaagaactgggagaagcacaagggcatcttcgaggaaaacatagaatggaattcaaatttggtggtcgtaaaagtgtggagacttgaattcaaataa

SEQ ID NO: 79908 - DNA, 1838 bp, Zea Mays
cccgcggtacgtgccctccttctcgcgctcctaaacaatcgcccgacatcctccccttccattctaggctccgtgtctcgctgtccccactacgtctcctccggctccatctcatcccgctgccgctccttctcatcgtcgtcgtcccagtcccggagtcgctcccctcctctggctaagcgcaggtcaagctacattccgtgctattcaaaggccccaaggatgacgcaatggcaatgactatctaccaatggacatcgtggagctatcttccgatcatttgatagagaataaacctttgctgctaaaggatgtcaagttctaaaacgtacacgggcttaccagtgcttatggacctttgtttgttcgggacactacctttgctaatggggaacaggtaagcggtaggctatatatcttgtttctcttttgaaataatgcaaaatactcttacatctttacataagctttaatgttgattgttgcagatttttttggtccagggttaattatattttattttgttaatataattagaaatgatcacaataagggagctacatttgagttatttgagttgtagggtgcgttcaggagactatagggtcgtgggtgtaagatatggtttagagaatgtgtctactggaacatcctttgtaccaattccctgtatacatctatctatcgttaaaacaccttctattggaacatattttcactatacatacacttatgagtaaggtatttagctcaaatttatctatacaatatccttttgtattcctaaatagcctgccgaaagaagaagatagccacaattatgcatgaaagctccgtttctacgattgtataccgtcacaacgtacgggtattggactagtttgtatagaaaagagagaagggaaaatctgaattttcttgcctctacatgtccatctccaacaaagcaacaactacaacccaaaaataatgtattatatatatatatttaaaactgctacttttagctacctctacagatctgctaaaaatgcttgaatgaaggcattattagtctataattttttagatagccaacatctgctaaatcctatgtattcgacattgtgtgtcctaatctccccttataaaaaataactgcatgactgcattctcaatgtaacactttttttttacagataaatttcaattactatacttatagaaaataaacaaggtccaacgttgtttgctttccatttcccttctactttgatattatgtgatttggtttattcatattactgtccatagcatatttgttgtggacacagttataaattcgttttctcgacactgcacaggcaaggggaaaatcttcttatagatctgttccgtcactgtgacaatcatttgggagagaaacaagtaaacaacccttttttccataaaactccatctggaagtgcacgacagccactacagttgactaacgatgtaaccaagatgatgcaaaagcatcagctagaaacgccacagttccatcagacccgattttccgttttacagaatgtaccgaggagcacagagaaatgtcatttccatccttaagacaaacaagaactacaggctgcttccgtcttcacccaatcagggatgaggatgccaagttcaagctctgcaacaggaggtctgttcagtttgacgtcggcaacatggtcatggtgaccggcgggaggaacactgggcgtgtaggagtgatcaagaactgggagaagcacaagggcatcttcgaggaaaacatagaatggaattcaaatttggtggtcgtaaaagtgtggagacttgaattcaaataa

SEQ ID NO: 79909 - DNA, 763 bp, Zea Mays
cccgcggtacgtgccctccttctcgcgctcctaaacaatcgcccgacatcctccccttccattctaggctccgtgtctcgctgtccccactacgtctcctccggctccatctcatcccgctgccgctccttctcatcgtcgtcgtcccagtcccggagtcgctcccctcctctggctaagcgcaggtcaagctacattccgtgctattcaaaggccccaaggatgacggcttaccagtgcttatggacctttgtttgttcgggacactacctttgctaatggggaacaggcaaggggaaaatcttcttatagatctgttccgtcactgtgacaatcatttgggagagaaacaaaaaactccatctggaagtgcacgacagccactacagttgactaacgatgtaaccaagatgatgcaaaagcatcagctagaaacgccacagttccatcagacccgattttccgttttacagaatgtaccgaggagcacagagaaatgtcatttccatccttaagacaaacaagaactacaggctgcttccgtcttcacccaatcagggatgaggatgccaagttcaagctctgcaacaggaggtctgttcagtttgacgtcggcaacatggtcatggtgaccggcgggaggaacactgggcgtgtaggagtgatcaagaactgggagaagcacaagggcatcttcgaggaaaacatagaatggaattcaaatttggtggtcgtaaaagtgtggagacttgaattcaaataa

SEQ ID NO: 79910 - DNA, 710 bp, Zea Mays
gtttgttctccatcaccaccccctaaaaaggcttcaccccctaggtcaagctacattccgtgctattcaaaggccccaaggatgacgcaatggcaatgactatctaccaatggacatcgtggagctatcttccgatcatttgatagagaataaacctttgctgctaaaggatgtcaagttctaaaacgtacacgggcttaccagtgcttatggacctttgtttgttcgggacactacctttgctaatggggaacaggcaaggggaaaatcttcttatagatctgttccgtcactgtgacaatcatttgggagagaaacaaaaaactccatctggaagtgcacgacagccactacagttgactaacgatgtaaccaagatgatgcaaaagcatcagctagaaacgccacagttccatcagacccgattttccgttttacagaatatgtcatttccatccttaagacaaacaagaactacaggctgcttccgtcttcacccaatcagggatgaggatgccaagttcaagctctgcaacaggaggtctgttcagtttgacgtcggcaacatggtcatggtgaccggcgggaggaacactgggcgtgtaggagtgatcaagaactgggagaagcacaagggcatcttcgaggaaaacatagaatggaattcaaatttggtggtcgtaaaagtgtggagacttgaattcaaataa

SEQ ID NO: 79911 - DNA, 1706 bp, Zea Mays
aaaaggcttcaccccctaggtcaagctacattccgtgctattcaaaggccccaaggatgacgcaatggcaatgactatctaccaatggacatcgtggagctatcttccgatcatttgatagagaataaacctttgctgctaaaggatgtcaagttctaaaacgtacacgggcttaccagtgcttatggacctttgtttgttcgggacactacctttgctaatggggaacaggtaagcggtaggctatatatcttgtttctcttttgaaataatgcaaaatactcttacatctttacataagctttaatgttgattgttgcagatttttttggtccagggttaattatattttattttgttaatataattagaaatgatcacaataagggagctacatttgagttatttgagttgtagggtgcgttcaggagactatagggtcgtgggtgtaagatatggtttagagaatgtgtctactggaacatcctttgtaccaattccctgtatacatctatctatcgttaaaacaccttctattggaacatattttcactatacatacacttatgagtaaggtatttagctcaaatttatctatacaatatccttttgtattcctaaatagcctgccgaaagaagaagatagccacaattatgcatgaaagctccgtttctacgattgtataccgtcacaacgtacgggtattggactagtttgtatagaaaagagagaagggaaaatctgaattttcttgcctctacatgtccatctccaacaaagcaacaactacaacccaaaaataatgtattatatatatatatttaaaactgctacttttagctacctctacagatctgctaaaaatgcttgaatgaaggcattattagtctataattttttagatagccaacatctgctaaatcctatgtattcgacattgtgtgtcctaatctccccttataaaaaataactgcatgactgcattctcaatgtaacactttttttttacagataaatttcaattactatacttatagaaaataaacaaggtccaacgttgtttgctttccatttcccttctactttgatattatgtgatttggtttattcatattactgtccatagcatatttgttgtggacacagttataaattcgttttctcgacactgcacaggcaaggggaaaatcttcttatagatctgttccgtcactgtgacaatcatttgggagagaaacaaaaaactccatctggaagtgcacgacagccactacagttgactaacgatgtaaccaagatgatgcaaaagcatcagctagaaacgccacagttccatcagacccgattttccgttttacagaatgtaccgaggagcacagagaaagatgtctcctttttaattcctcattcttggctgcctgctatgttagatgatcagatgtcatttccatccttaagacaaacaagaactacaggctgcttccgtcttcacccaatcagggatgaggatgccaagttcaagctctgcaacaggaggtctgttcagtttgacgtcggcaacatggtcatggtgaccggcgggaggaacactgggcgtgtaggagtgatcaagaactgggagaagcacaagggcatcttcgaggaaaacatagaatggaattcaaatttggtggtcgtaaaagtgtggagacttgaattcaaataa

SEQ ID NO: 79912 - DNA, 1191 bp, Zea Mays
aaaagttttcatacaaattgcatatgttactctggctatgtttattgataattatgtatatctataagcgtgttgtttcacttgtaatttgactatcattgttatctcatatatatatgaagtgattttagtttgtcaaataggatattgtatatgggctaatggtacaaaggatctttaaaattctctactatattaaagtaccagttttaacaatttataaaaaaacccttacacttctttaaattctaacccgcggtacgttgcccccttctcgcgctcccaaacaatcgtccagcctcctccccttccattctcctccccacgccgccatccgctccgctccaaccacgcttatagcttatatccctcaccggttgttattcctctccctagataagctttatctcaccaaactaatctcgctataaacaaggacccaatttcatccagtaatcccgctataaacaaggacccgatttcatcctttgcgagtaagaagcaaaaaaccaaggtgggcgaggacgcgaagaagcaagggagaaggacagagcgggaggaggatgctgcctgctgctttccctgctccttgacacgaaggccgccctggatggtggatccgaggggttccatggcctgccccatggcgtcaaggcgacatgctacgccgaggtggaggccgggttgaacgccgtataccggcagtgccggagccttgaccgctccttggggccgctagagatccgcatggtgtccctcgacgccgcgactacaacatcaccatgtccggcgccagcgcgcaagaggagttgtccatgtggcatcatctctggctccgccactctggtttgagggatgccgaggggttgtacctcgccagcgattcgaacaagcggctattgatctacttcccctttatgcaggtcaagctacattccgtgctattcaaaggccccaaggatgacgcaatggcaatgactatctaccaatggacatcgtggagctatcttccgatcatttgatagagaataaacctttgctgctaaaggatgtcaagttctaaaacgtacacgggcttaccagtgcttatggacctttgtttgttcgggacactacctttgctaatggggaacagcatatttgttgtggacacagttataaattcgttttctcgacactgcacaggcaagg

SEQ ID NO: 79913 - DNA, 2948 bp, Zea Mays
aaaagttttcatacaaattgcatatgttactctggctatgtttattgataattatgtatatctataagcgtgttgtttcacttgtaatttgactatcattgttatctcatatatatatgaagtgattttagtttgtcaaataggatattgtatatgggctaatggtacaaaggatctttaaaattctctactatattaaagtaccagttttaacaatttataaaaaaacccttacacttctttaaattctaacccgcggtacgttgcccccttctcgcgctcccaaacaatcgtccagcctcctccccttccattctcctccccacgccgccatccgctccgctccaaccacgcttatagcttatatccctcaccggttgttattcctctccctagataagctttatctcaccaaactaatctcgctataaacaaggacccaatttcatccagtaatcccgctataaacaaggacccgatttcatcctttgcgagtaagaagcaaaaaaccaaggtgggcgaggacgcgaagaagcaagggagaaggacagagcgggaggaggatgctgcctgctgctttccctgctccttgacacgaaggccgccctggatggtggatccgaggggttccatggcctgccccatggcgtcaaggcgacatgctacgccgaggtggaggccgggttgaacgccgtataccggcagtgccggagccttgaccgctccttggggccgctagagatccgcatggtgtccctcgacgccgcgactacaacatcaccatgtccggcgccagcgcgcaagaggagttgtccatgtggcatcatctctggctccgccactctggtttgagggatgccgaggggttgtacctcgccagcgattcgaacaagcggctattgatctacttcccctttatgcaggtcaagctacattccgtgctattcaaaggccccaaggatgacggtaagatttgcaactccctgtctgtctgggtctgtgagctaacggacttgtgccaaattgttagtttatatgttcaaagtagatagaagtactactttcctatgagttagtttcagcaacaaggatgtggaagtaaaccaactgctgctctaacggttacatgcagaattgcagaccatgagttcaaccccatcttttcacatggcactcatcagactctttatggaatagttaacattagtgttattaagaacaaaagttagattcataattaagtgagtctataattttgatgtccatataaaggagcactcatgtactagcgttgaatagatatttagctgaaatgcatatttatgtaataaatgtcagcaatggcaatgactatctaccaatggacatcgtggagctatcttccgatcatttgatagagaataaacctttgctgctaaaggatgtcaagttctaaaacgtacacgggcttaccagtgcttatggacctttgtttgttcgggacactacctttgctaatggggaacaggtaagcggtaggctatatatcttgtttctcttttgaaataatgcaaaatactcttacatctttacataagctttaatgttgattgttgcagatttttttggtccagggttaattatattttattttgttaatataattagaaatgatcacaataagggagctacatttgagttatttgagttgtagggtgcgttcaggagactatagggtcgtgggtgtaagatatggtttagagaatgtgtctactggaacatcctttgtaccaattccctgtatacatctatctatcgttaaaacaccttctattggaacatattttcactatacatacacttatgagtaaggtatttagctcaaatttatctatacaatatccttttgtattcctaaatagcctgccgaaagaagaagatagccacaattatgcatgaaagctccgtttctacgattgtataccgtcacaacgtacgggtattggactagtttgtatagaaaagagagaagggaaaatctgaattttcttgcctctacatgtccatctccaacaaagcaacaactacaacccaaaaataatgtattatatatatatatttaaaactgctacttttagctacctctacagatctgctaaaaatgcttgaatgaaggcattattagtctataattttttagatagccaacatctgctaaatcctatgtattcgacattgtgtgtcctaatctccccttataaaaaataactgcatgactgcattctcaatgtaacactttttttttacagataaatttcaattactatacttatagaaaataaacaaggtccaacgttgtttgctttccatttcccttctactttgatattatgtgatttggtttattcatattactgtccatagcatatttgttgtggacacagttataaattcgttttctcgacactgcacaggcaaggggaaaatcttcttatagatctgttccgtcactgtgacaatcatttgggagagaaacaagtaaacaacccttttttccataaaactccatctggaagtgcacgacagccactacagttgactaacgatgtaaccaagatgatgcaaaagcatcagctagaaacgccacagttccatcagacccgattttccgttttacagaatgtaccgaggagcacagagaaatgtcatttccatccttaagacaaacaagaactacaggctgcttccgtcttcacccaatcagggatgaggatgccaagttcaagctctgcaacaggaggtctgttcagtttgacgtcggcaacatggtcatggtgaccggcgggaggaacactgggcgtgtaggagtgatcaagaactgggagaagcacaagggcatcttcgaggaaaacatagaatggaattcaaatttggtggtcgtaaaagtgtggagacttgaattcaaataa

SEQ ID NO: 79914 - DNA, 2502 bp, Zea Mays
aaaagttttcatacaaattgcatatgttactctggctatgtttattgataattatgtatatctataagcgtgttgtttcacttgtaatttgactatcattgttatctcatatatatatgaagtgattttagtttgtcaaataggatattgtatatgggctaatggtacaaaggatctttaaaattctctactatattaaagtaccagttttaacaatttataaaaaaacccttacacttctttaaattctaacccgcggtacgttgcccccttctcgcgctcccaaacaatcgtccagcctcctccccttccattctcctccccacgccgccatccgctccgctccaaccacgcttatagcttatatccctcaccggttgttattcctctccctagataagctttatctcaccaaactaatctcgctataaacaaggacccaatttcatccagtaatcccgctataaacaaggacccgatttcatcctttgcgagtaagaagcaaaaaaccaaggtgggcgaggacgcgaagaagcaagggagaaggacagagcgggaggaggatgctgcctgctgctttccctgctccttgacacgaaggccgccctggatggtggatccgaggggttccatggcctgccccatggcgtcaaggcgacatgctacgccgaggtggaggccgggttgaacgccgtataccggcagtgccggagccttgaccgctccttggggccgctagagatccgcatggtgtccctcgacgccgcgactacaacatcaccatgtccggcgccagcgcgcaagaggagttgtccatgtggcatcatctctggctccgccactctggtttgagggatgccgaggggttgtacctcgccagcgattcgaacaagcggctattgatctacttcccctttatgcaggtcaagctacattccgtgctattcaaaggccccaaggatgacggcttaccagtgcttatggacctttgtttgttcgggacactacctttgctaatggggaacaggtaagcggtaggctatatatcttgtttctcttttgaaataatgcaaaatactcttacatctttacataagctttaatgttgattgttgcagatttttttggtccagggttaattatattttattttgttaatataattagaaatgatcacaataagggagctacatttgagttatttgagttgtagggtgcgttcaggagactatagggtcgtgggtgtaagatatggtttagagaatgtgtctactggaacatcctttgtaccaattccctgtatacatctatctatcgttaaaacaccttctattggaacatattttcactatacatacacttatgagtaaggtatttagctcaaatttatctatacaatatccttttgtattcctaaatagcctgccgaaagaagaagatagccacaattatgcatgaaagctccgtttctacgattgtataccgtcacaacgtacgggtattggactagtttgtatagaaaagagagaagggaaaatctgaattttcttgcctctacatgtccatctccaacaaagcaacaactacaacccaaaaataatgtattatatatatatatttaaaactgctacttttagctacctctacagatctgctaaaaatgcttgaatgaaggcattattagtctataattttttagatagccaacatctgctaaatcctatgtattcgacattgtgtgtcctaatctccccttataaaaaataactgcatgactgcattctcaatgtaacactttttttttacagataaatttcaattactatacttatagaaaataaacaaggtccaacgttgtttgctttccatttcccttctactttgatattatgtgatttggtttattcatattactgtccatagcatatttgttgtggacacagttataaattcgttttctcgacactgcacaggcaaggggaaaatcttcttatagatctgttccgtcactgtgacaatcatttgggagagaaacaaaaaactccatctggaagtgcacgacagccactacagttgactaacgatgtaaccaagatgatgcaaaagcatcagctagaaacgccacagttccatcagacccgattttccgttttacagaatgtaccgaggagcacagagaaagatgtctcctttttaattcctcattcttggctgcctgctatgttagatgatcagatgtcatttccatccttaagacaaacaagaactacaggctgcttccgtcttcacccaatcagggatgaggatgccaagttcaagctctgcaacaggaggtctgttcagtttgacgtcggcaacatggtcatggtgaccggcgggaggaacactgggcgtgtaggagtgatcaagaactgggagaagcacaagggcatcttcgaggaaaacatagaatggaattcaaatttggtggtcgtaaaagtgtggagacttgaattcaaataa

SEQ ID NO: 79915 - DNA, 1556 bp, Zea Mays
aaaagttttcatacaaattgcatatgttactctggctatgtttattgataattatgtatatctataagcgtgttgtttcacttgtaatttgactatcattgttatctcatatatatatgaagtgattttagtttgtcaaataggatattgtatatgggctaatggtacaaaggatctttaaaattctctactatattaaagtaccagttttaacaatttataaaaaaacccttacacttctttaaattctaacccgcggtacgttgcccccttctcgcgctcccaaacaatcgtccagcctcctccccttccattctcctccccacgccgccatccgctccgctccaaccacgcttatagcttatatccctcaccggttgttattcctctccctagataagctttatctcaccaaactaatctcgctataaacaaggacccaatttcatccagtaatcccgctataaacaaggacccgatttcatcctttgcgagtaagaagcaaaaaaccaaggtgggcgaggacgcgaagaagcaagggagaaggacagagcgggaggaggatgctgcctgctgctttccctgctccttgacacgaaggccgccctggatggtggatccgaggggttccatggcctgccccatggcgtcaaggcgacatgctacgccgaggtggaggccgggttgaacgccgtataccggcagtgccggagccttgaccgctccttggggccgctagagatccgcatggtgtccctcgacgccgcgactacaacatcaccatgtccggcgccagcgcgcaagaggagttgtccatgtggcatcatctctggctccgccactctggtttgagggatgccgaggggttgtacctcgccagcgattcgaacaagcggctattgatctacttcccctttatgcaggtcaagctacattccgtgctattcaaaggccccaaggatgacggcttaccagtgcttatggacctttgtttgttcgggacactacctttgctaatggggaacaggcaaggggaaaatcttcttatagatctgttccgtcactgtgacaatcatttgggagagaaacaaaaaactccatctggaagtgcacgacagccactacagttgactaacgatgtaaccaagatgatgcaaaagcatcagctagaaacgccacagttccatcagacccgattttccgttttacagaatgtaccgaggagcacagagaaagatgtctcctttttaattcctcattcttggctgcctgctatgttagatgatcagatgtcatttccatccttaagacaaacaagaactacaggctgcttccgtcttcacccaatcagggatgaggatgccaagttcaagctctgcaacaggaggtctgttcagtttgacgtcggcaacatggtcatggtgaccggcgggaggaacactgggcgtgtaggagtgatcaagaactgggagaagcacaagggcatcttcgaggaaaacatagaatggaattcaaatttggtggtcgtaaaagtgtggagacttgaattcaaataa

SEQ ID NO: 79916 - DNA, 2927 bp, Zea Mays
aaaagttttcatacaaattgcatatgttactctggctatgtttattgataattatgtatatctataagcgtgttgtttcacttgtaatttgactatcattgttatctcatatatatatgaagtgattttagtttgtcaaataggatattgtatatgggctaatggtacaaaggatctttaaaattctctactatattaaagtaccagttttaacaatttataaaaaaacccttacacttctttaaattctaacccgcggtacgttgcccccttctcgcgctcccaaacaatcgtccagcctcctccccttccattctcctccccacgccgccatccgctccgctccaaccacgcttatagcttatatccctcaccggttgttattcctctccctagataagctttatctcaccaaactaatctcgctataaacaaggacccaatttcatccagtaatcccgctataaacaaggacccgatttcatcctttgcgagtaagaagcaaaaaaccaaggtgggcgaggacgcgaagaagcaagggagaaggacagagcgggaggaggatgctgcctgctgctttccctgctccttgacacgaaggccgccctggatggtggatccgaggggttccatggcctgccccatggcgtcaaggcgacatgctacgccgaggtggaggccgggttgaacgccgtataccggcagtgccggagccttgaccgctccttggggccgctagagatccgcatggtgtccctcgacgccgcgactacaacatcaccatgtccggcgccagcgcgcaagaggagttgtccatgtggcatcatctctggctccgccactctggtttgagggatgccgaggggttgtacctcgccagcgattcgaacaagcggctattgatctacttcccctttatgcaggtcaagctacattccgtgctattcaaaggccccaaggatgacggtaagatttgcaactccctgtctgtctgggtctgtgagctaacggacttgtgccaaattgttagtttatatgttcaaagtagatagaagtactactttcctatgagttagtttcagcaacaaggatgtggaagtaaaccaactgctgctctaacggttacatgcagaattgcagaccatgagttcaaccccatcttttcacatggcactcatcagactctttatggaatagttaacattagtgttattaagaacaaaagttagattcataattaagtgagtctataattttgatgtccatataaaggagcactcatgtactagcgttgaatagatatttagctgaaatgcatatttatgtaataaatgtcagcaatggcaatgactatctaccaatggacatcgtggagctatcttccgatcatttgatagagaataaacctttgctgctaaaggatgtcaagttctaaaacgtacacgggcttaccagtgcttatggacctttgtttgttcgggacactacctttgctaatggggaacaggtaagcggtaggctatatatcttgtttctcttttgaaataatgcaaaatactcttacatctttacataagctttaatgttgattgttgcagatttttttggtccagggttaattatattttattttgttaatataattagaaatgatcacaataagggagctacatttgagttatttgagttgtagggtgcgttcaggagactatagggtcgtgggtgtaagatatggtttagagaatgtgtctactggaacatcctttgtaccaattccctgtatacatctatctatcgttaaaacaccttctattggaacatattttcactatacatacacttatgagtaaggtatttagctcaaatttatctatacaatatccttttgtattcctaaatagcctgccgaaagaagaagatagccacaattatgcatgaaagctccgtttctacgattgtataccgtcacaacgtacgggtattggactagtttgtatagaaaagagagaagggaaaatctgaattttcttgcctctacatgtccatctccaacaaagcaacaactacaacccaaaaataatgtattatatatatatatttaaaactgctacttttagctacctctacagatctgctaaaaatgcttgaatgaaggcattattagtctataattttttagatagccaacatctgctaaatcctatgtattcgacattgtgtgtcctaatctccccttataaaaaataactgcatgactgcattctcaatgtaacactttttttttacagataaatttcaattactatacttatagaaaataaacaaggtccaacgttgtttgctttccatttcccttctactttgatattatgtgatttggtttattcatattactgtccatagcatatttgttgtggacacagttataaattcgttttctcgacactgcacaggcaaggggaaaatcttcttatagatctgttccgtcactgtgacaatcatttgggagagaaacaaaaaactccatctggaagtgcacgacagccactacagttgactaacgatgtaaccaagatgatgcaaaagcatcagctagaaacgccacagttccatcagacccgattttccgttttacagaatgtaccgaggagcacagagaaatgtcatttccatccttaagacaaacaagaactacaggctgcttccgtcttcacccaatcagggatgaggatgccaagttcaagctctgcaacaggaggtctgttcagtttgacgtcggcaacatggtcatggtgaccggcgggaggaacactgggcgtgtaggagtgatcaagaactgggagaagcacaagggcatcttcgaggaaaacatagaatggaattcaaatttggtggtcgtaaaagtgtggagacttgaattcaaataa

SEQ ID NO: 79917 - DNA, 2610 bp, Zea Mays
aaaagttttcatacaaattgcatatgttactctggctatgtttattgataattatgtatatctataagcgtgttgtttcacttgtaatttgactatcattgttatctcatatatatatgaagtgattttagtttgtcaaataggatattgtatatgggctaatggtacaaaggatctttaaaattctctactatattaaagtaccagttttaacaatttataaaaaaacccttacacttctttaaattctaacccgcggtacgttgcccccttctcgcgctcccaaacaatcgtccagcctcctccccttccattctcctccccacgccgccatccgctccgctccaaccacgcttatagcttatatccctcaccggttgttattcctctccctagataagctttatctcaccaaactaatctcgctataaacaaggacccaatttcatccagtaatcccgctataaacaaggacccgatttcatcctttgcgagtaagaagcaaaaaaccaaggtgggcgaggacgcgaagaagcaagggagaaggacagagcgggaggaggatgctgcctgctgctttccctgctccttgacacgaaggccgccctggatggtggatccgaggggttccatggcctgccccatggcgtcaaggcgacatgctacgccgaggtggaggccgggttgaacgccgtataccggcagtgccggagccttgaccgctccttggggccgctagagatccgcatggtgtccctcgacgccgcgactacaacatcaccatgtccggcgccagcgcgcaagaggagttgtccatgtggcatcatctctggctccgccactctggtttgagggatgccgaggggttgtacctcgccagcgattcgaacaagcggctattgatctacttcccctttatgcaggtcaagctacattccgtgctattcaaaggccccaaggatgacgcaatggcaatgactatctaccaatggacatcgtggagctatcttccgatcatttgatagagaataaacctttgctgctaaaggatgtcaagttctaaaacgtacacgggcttaccagtgcttatggacctttgtttgttcgggacactacctttgctaatggggaacaggtaagcggtaggctatatatcttgtttctcttttgaaataatgcaaaatactcttacatctttacataagctttaatgttgattgttgcagatttttttggtccagggttaattatattttattttgttaatataattagaaatgatcacaataagggagctacatttgagttatttgagttgtagggtgcgttcaggagactatagggtcgtgggtgtaagatatggtttagagaatgtgtctactggaacatcctttgtaccaattccctgtatacatctatctatcgttaaaacaccttctattggaacatattttcactatacatacacttatgagtaaggtatttagctcaaatttatctatacaatatccttttgtattcctaaatagcctgccgaaagaagaagatagccacaattatgcatgaaagctccgtttctacgattgtataccgtcacaacgtacgggtattggactagtttgtatagaaaagagagaagggaaaatctgaattttcttgcctctacatgtccatctccaacaaagcaacaactacaacccaaaaataatgtattatatatatatatttaaaactgctacttttagctacctctacagatctgctaaaaatgcttgaatgaaggcattattagtctataattttttagatagccaacatctgctaaatcctatgtattcgacattgtgtgtcctaatctccccttataaaaaataactgcatgactgcattctcaatgtaacactttttttttacagataaatttcaattactatacttatagaaaataaacaaggtccaacgttgtttgctttccatttcccttctactttgatattatgtgatttggtttattcatattactgtccatagcatatttgttgtggacacagttataaattcgttttctcgacactgcacaggcaaggggaaaatcttcttatagatctgttccgtcactgtgacaatcatttgggagagaaacaaaaaactccatctggaagtgcacgacagccactacagttgactaacgatgtaaccaagatgatgcaaaagcatcagctagaaacgccacagttccatcagacccgattttccgttttacagaatgtaccgaggagcacagagaaagatgtctcctttttaattcctcattcttggctgcctgctatgttagatgatcagatgtcatttccatccttaagacaaacaagaactacaggctgcttccgtcttcacccaatcagggatgaggatgccaagttcaagctctgcaacaggaggtctgttcagtttgacgtcggcaacatggtcatggtgaccggcgggaggaacactgggcgtgtaggagtgatcaagaactgggagaagcacaagggcatcttcgaggaaaacatagaatggaattcaaatttggtggtcgtaaaagtgtggagacttgaattcaaataa

SEQ ID NO: 79918 - DNA, 3003 bp, Zea Mays
aaaagttttcatacaaattgcatatgttactctggctatgtttattgataattatgtatatctataagcgtgttgtttcacttgtaatttgactatcattgttatctcatatatatatgaagtgattttagtttgtcaaataggatattgtatatgggctaatggtacaaaggatctttaaaattctctactatattaaagtaccagttttaacaatttataaaaaaacccttacacttctttaaattctaacccgcggtacgttgcccccttctcgcgctcccaaacaatcgtccagcctcctccccttccattctcctccccacgccgccatccgctccgctccaaccacgcttatagcttatatccctcaccggttgttattcctctccctagataagctttatctcaccaaactaatctcgctataaacaaggacccaatttcatccagtaatcccgctataaacaaggacccgatttcatcctttgcgagtaagaagcaaaaaaccaaggtgggcgaggacgcgaagaagcaagggagaaggacagagcgggaggaggatgctgcctgctgctttccctgctccttgacacgaaggccgccctggatggtggatccgaggggttccatggcctgccccatggcgtcaaggcgacatgctacgccgaggtggaggccgggttgaacgccgtataccggcagtgccggagccttgaccgctccttggggccgctagagatccgcatggtgtccctcgacgccgcgactacaacatcaccatgtccggcgccagcgcgcaagaggagttgtccatgtggcatcatctctggctccgccactctggtttgagggatgccgaggggttgtacctcgccagcgattcgaacaagcggctattgatctacttcccctttatgcaggtcaagctacattccgtgctattcaaaggccccaaggatgacggtaagatttgcaactccctgtctgtctgggtctgtgagctaacggacttgtgccaaattgttagtttatatgttcaaagtagatagaagtactactttcctatgagttagtttcagcaacaaggatgtggaagtaaaccaactgctgctctaacggttacatgcagaattgcagaccatgagttcaaccccatcttttcacatggcactcatcagactctttatggaatagttaacattagtgttattaagaacaaaagttagattcataattaagtgagtctataattttgatgtccatataaaggagcactcatgtactagcgttgaatagatatttagctgaaatgcatatttatgtaataaatgtcagcaatggcaatgactatctaccaatggacatcgtggagctatcttccgatcatttgatagagaataaacctttgctgctaaaggatgtcaagttctaaaacgtacacgggcttaccagtgcttatggacctttgtttgttcgggacactacctttgctaatggggaacaggtaagcggtaggctatatatcttgtttctcttttgaaataatgcaaaatactcttacatctttacataagctttaatgttgattgttgcagatttttttggtccagggttaattatattttattttgttaatataattagaaatgatcacaataagggagctacatttgagttatttgagttgtagggtgcgttcaggagactatagggtcgtgggtgtaagatatggtttagagaatgtgtctactggaacatcctttgtaccaattccctgtatacatctatctatcgttaaaacaccttctattggaacatattttcactatacatacacttatgagtaaggtatttagctcaaatttatctatacaatatccttttgtattcctaaatagcctgccgaaagaagaagatagccacaattatgcatgaaagctccgtttctacgattgtataccgtcacaacgtacgggtattggactagtttgtatagaaaagagagaagggaaaatctgaattttcttgcctctacatgtccatctccaacaaagcaacaactacaacccaaaaataatgtattatatatatatatttaaaactgctacttttagctacctctacagatctgctaaaaatgcttgaatgaaggcattattagtctataattttttagatagccaacatctgctaaatcctatgtattcgacattgtgtgtcctaatctccccttataaaaaataactgcatgactgcattctcaatgtaacactttttttttacagataaatttcaattactatacttatagaaaataaacaaggtccaacgttgtttgctttccatttcccttctactttgatattatgtgatttggtttattcatattactgtccatagcatatttgttgtggacacagttataaattcgttttctcgacactgcacaggcaaggggaaaatcttcttatagatctgttccgtcactgtgacaatcatttgggagagaaacaagtaaacaacccttttttccataaaactccatctggaagtgcacgacagccactacagttgactaacgatgtaaccaagatgatgcaaaagcatcagctagaaacgccacagttccatcagacccgattttccgttttacagaatgtaccgaggagcacagagaaagatgtctcctttttaattcctcattcttggctgcctgctatgttagatgatcagatgtcatttccatccttaagacaaacaagaactacaggctgcttccgtcttcacccaatcagggatgaggatgccaagttcaagctctgcaacaggaggtctgttcagtttgacgtcggcaacatggtcatggtgaccggcgggaggaacactgggcgtgtaggagtgatcaagaactgggagaagcacaagggcatcttcgaggaaaacatagaatggaattcaaatttggtggtcgtaaaagtgtggagacttgaattcaaataa

SEQ ID NO: 79919 - DNA, 1645 bp, Zea Mays
atgtccggcgccagcgcgcaagaggagttgtccatgtggcatcatctctggctccgccactctggtttgagggatgccgaggggttgtacctcgccagcgattcgaacaagcggctattgatctacttcccctttatgcaggtcaagctacattccgtgctattcaaaggccccaaggatgacggcttaccagtgcttatggacctttgtttgttcgggacactacctttgctaatggggaacaggtaagcggtaggctatatatcttgtttctcttttgaaataatgcaaaatactcttacatctttacataagctttaatgttgattgttgcagatttttttggtccagggttaattatattttattttgttaatataattagaaatgatcacaataagggagctacatttgagttatttgagttgtagggtgcgttcaggagactatagggtcgtgggtgtaagatatggtttagagaatgtgtctactggaacatcctttgtaccaattccctgtatacatctatctatcgttaaaacaccttctattggaacatattttcactatacatacacttatgagtaaggtatttagctcaaatttatctatacaatatccttttgtattcctaaatagcctgccgaaagaagaagatagccacaattatgcatgaaagctccgtttctacgattgtataccgtcacaacgtacgggtattggactagtttgtatagaaaagagagaagggaaaatctgaattttcttgcctctacatgtccatctccaacaaagcaacaactacaacccaaaaataatgtattatatatatatatttaaaactgctacttttagctacctctacagatctgctaaaaatgcttgaatgaaggcattattagtctataattttttagatagccaacatctgctaaatcctatgtattcgacattgtgtgtcctaatctccccttataaaaaataactgcatgactgcattctcaatgtaacactttttttttacagataaatttcaattactatacttatagaaaataaacaaggtccaacgttgtttgctttccatttcccttctactttgatattatgtgatttggtttattcatattactgtccatagcatatttgttgtggacacagttataaattcgttttctcgacactgcacaggcaaggggaaaatcttcttatagatctgttccgtcactgtgacaatcatttgggagagaaacaaaaaactccatctggaagtgcacgacagccactacagttgactaacgatgtaaccaagatgatgcaaaagcatcagctagaaacgccacagttccatcagacccgattttccgttttacagaatatgtcatttccatccttaagacaaacaagaactacaggctgcttccgtcttcacccaatcagggatgaggatgccaagttcaagctctgcaacaggaggtctgttcagtttgacgtcggcaacatggtcatggtgaccggcgggaggaacactgggcgtgtaggagtgatcaagaactgggagaagcacaagggcatcttcgaggaaaacatagaatggaattcaaatttggtggtcgtaaaagtgtggagacttgaattcaaataa

SEQ ID NO: 79920 - DNA, 164 bp, Zea Mays
cccatgtgcgtttagcatcaattcatcagctagaagttcgaaatgggggtcaagtttttagtccttctcggtgttgtcctggcctctcttgtcttccaggacgtggcatttgctagagagctcactgaggccaataatgtgataaaagcttcttcttgcacatg

SEQ ID NO: 79921 - DNA, 1799 bp, Zea Mays
aaatcgtccctcacacggcggcagcaaaaacagaggacacgggtgcgagagacatgcgacagagaatccatggcggcggcggcgtggtgggagacgctggtggtggcagcggcggcggatggaaccggtgggagcagcaccacggtggtgtccatctgcatgttcacgacggtgctgtgcctgtgcctcgtcgcgggccacctcctcgaggagaacaagtgggtcaatgagtccatcaccgccctcgtcatcgggtgcatcataggagtgatcgtatttctgctgaccaaggggaagcactcacacatcctgcggttcgatgagcagctcttcttcatctacgtgcttccaccgataatcttcaacgccgggtttcaggtcaagaaaaagcagttcttccacaacttcatgaccatcatgtccttcggcgtgttcggcgttttcatctcaggtgcaatagtttcggcaggctgctattggctcttcccgaaagtcgggtttggagaacttggtgcggtagattatttagcactgggagccatattttcttcaacagacaccgtgtgcacgttgcaggtcataaaccaagatgagacaccaaggctgtacagcctggtgtttggagaaggagttgtcaacgatgcaacggcggtcgttcttttcaatgccatcaaggatctcgatatcagtcggctcaagggtggggttgtgctaaaagtgatatttgacttcctctatctctttgcaaccagcactgtcctcggaatctcaatcggtctagtaactgcatatgttctcaaagctctgtattttggtaggcattcgaccgatagagaggttgccttgatggctctcatggcctatctatcgtatatgctggcagagttgctagagctgagtggaattttgaccgtgttcttttgcggcattgtcatgtcccattatgcatggcacaacgtgacagagagctcaaggattacaacaaagcatatatttgcaacattatctttcattgccgagacattcatcttcctttacgtcggtatggatgctcttgacattgataagtggaggacatcaaaggaaagcttcaagacatccatcggtatctttggcatcctcatattgctcatactactgggacgagtggcatttgttttccctatatccattttgtcaaatatcatgagtggaagttctgaaagaaccccgatcacattcaagcaccaggttgttatttggtgggctgggctcatgagaggtgctgtttccattgcactagcatacaatcagttcacattttcaggtgtaacatcggatccagttcatgccaccatcatcactagcacaataatcgtcgtcttcttcaccactctggcccctgatcagtggcatgctcccgcaccagtcgagggcgctgtccagaggccatagcacaggcagcaactccccgaaggatgacttcaccctgccgttcctgtcgggcgatgaaggcgcgtcaggcagcggtatcgtcttggagcaagccaagaggagcttgtctatgatgctggagaggcccgtccacacggttcacatctactggaggaagttcgatgacaggttcatgaggccaatctttggtggaccgcggtcgcactgactgcaggtgcatataagaggagttagtttctctgaattctgtcagcatagttcgcccatggcactgtaaagttgataacactgaatgctttcaagcaactctttattatttttagtacttatattacatcactgcaatcttacaaacataatttttt

SEQ ID NO: 79922 - DNA, 1806 bp, Zea Mays
aaatcgtccctcacacggcggcagcaaaaacagaggacacgggtgcgagagacatgcgacagagaatccatggcggcggcggcgtggtgggagacgctggtggtggcagcggcggcggatggaaccggtgggagcagcaccacggtggtgtccatctgcatgttcacgacggtgctgtgcctgtgcctcgtcgcgggccacctcctcgaggagaacaagtgggtcaatgagtccatcaccgccctcgtcatcgggtgcatcataggagtgatcgtatttctgctgaccaaggggaagcactcacacatcctgcggttcgatgagcagctcttcttcatctacgtgcttccaccgataatcttcaacgccgggtttcaggtcaagaaaaagcagttcttccacaacttcatgaccatcatgtccttcggcgtgttcggcgttttcatctcaggtgcaatagtttcggcaggctgctattggctcttcccgaaagtcgggtttggagaacttggtgcggtagattatttagcactgggagccatattttcttcaacagacaccgtgtgcacgttgcaggtcataaaccaagatgagacaccaaggctgtacagcctggtgtttggagaaggagttgtcaacgatgcaacggcggtcgttcttttcaatgccatcaaggatctcgatatcagtcggctcaagggtggggttgtgctaaaagtgatatttgacttcctctatctctttgcaaccagcactgtcctcggaatctcaatcggtctagtaactgcatatgttctcaaagctctgtattttggtaggcattcgaccgatagagaggttgccttgatggctctcatggcctatctatcgtatatgctggcagagttgctagagctgagtggaattttgaccgtgttcttttgcggcattgtcatgtcccattatgcatggcacaacgtgacagagagctcaaggattacaacaaagcatatatttgcaacattatctttcattgccgagacattcatcttcctttacgtcggtatggatgctcttgacattgataagtggaggacatcaaaggaaagcttcaagacatccatcggtatctttggcatcctcatattgctcatactactgggacgagtggcatttgttttccctatatccattttgtcaaatatcatgagtggaagttctgaaagaaccccgatcacattcaagcaccaggttgttatttggtgggctgggctcatgagaggtgctgtttccattgcactagcatacaatcaggtgtaacatcggatccagttcatgccaccatcatcactagcacaataatcgtcgtcttcttcaccactctggtgtttggcttcttgaccaggcccctgatcagtggcatgctcccgcaccagtcgagggcgctgtccagaggccatagcacaggcagcaactccccgaaggatgacttcaccctgccgttcctgtcgggcgatgaaggcgcgtcaggcagcggtatcgtcttggagcaagccaagaggagcttgtctatgatgctggagaggcccgtccacacggttcacatctactggaggaagttcgatgacaggttcatgaggccaatctttggtggaccgcggtcgcactgactgcaggtgcatataagaggagttagtttctctgaattctgtcagcatagttcgcccatggcactgtaaagttgataacactgaatgctttcaagcaactctttattatttttagtacttatattacatcactgcaatcttacaaacataatttttt

SEQ ID NO: 79923 - DNA, 3481 bp, Zea Mays
gttgcacctcctctttacgcacatgtccagtttgtccaatcgcctgttcatccactatagcctcttctcagcggttttccccagaaatggtcaccggtgctgtcgcgcttcacctcgccgtggctgagcccctgtcgcttgtttaattctgtggatagccgggaacgctgcctcatcgccggacttcgccgtggaatgccacttgcacggtgactggtccatccacttctacaccggcttgaccaatccttgttctcagtatctggaaagtccatgaagcttattacatcttcagtttgagccctaccgtgccatagccgtaggaacatggtcacctcgccgcggttctcgcgagagcccgttctagtattttggggtaggttccgagcctcgtttcttgttcataggcctacattttaagtcggatttggtgtagaagtaatttttagctcatgtcgtagcttgtctcggccaagccaagctcacttcctctcttgctgggtgtcgtggacttagtttgtgaaggaacgaaagtgggaggggtctcagtgagattgtcagtgaaacatgtgaatagtgcttaggattatttaccagttgtttgaatcgacaggtggcttggtgcaaaatgaaaacatgggtgcaggccgtgcgctggtgcacggtttttgctgtggctgggctggtttgggccggatttagcccagttcctgtttcacgtttttcctttattgtttgtctgaaatattgtgaaagctgccaaaaattgtagaaaaatgaaacatgttaatatttttagagctaataataaattttaagtgattaaaaggtgtctattttaagcctatttgaattttagaaataaaatctgaacttaaaaattatgaatttttttcagtgagcttaatatgtttattgtagcctctaggtaaagttttaatctgtttggaggtcatttgactagaaaacccgttattgcccaaaataaagacactttaatgtaaaatcaagtgacaaattaagtgttggataaaaaataataagttatctaatgatttttggatattaaattaaattcaaatatgtttaagctcgctgaagactcttagttggaaaaggtagcttataatgatccttaagagattaaatatctagttggttataatgttttgtattgcaccgtgaaggaaagtcgtattcaacaaatctagtttgttctcatttattcaattttgcattttatgacttaaacattcatgaccatatcatcacatgagcattcattatcatatttgacttgtagaacactcaaaagagattgtggtagaagaagaagcatctccagaatctgaggatcctcttattgagaaaaacactaattgtgacatccgagtagaggaacccgaatctccttctcatcaaggcaagccttggtgcatcttacctttccttgttgtttacaaagctttttctcaccttgaataatgctttaagggcatgtttggtttcaattagtcctaggactaaactttagtcctaagactaaactttagtccctatatgtttggttttagggactaaatagattctaaagtcattaaatacactatacaaagactcaaatacccttagaatatactcataatattagttatctataaaaaaggtaagggcaatatgataattatgggcttttagtctcttttagcacctatgtgaaggactaaagactaaatcattttagtccatattttagtcctagtgtttggcaaaaaagggactaaaaactagagactaatctttagtccctctaaccaaacaccccctaagtgataagagttgtatgttaaacgattgatgcattacccttccttggaatattgattaccacccttgccaccagttttatgaaaacttagaaatgcttagtgaaagctctcttgtgggttttggtgtttggatgacaacccaattaaaggactaacaagtgtgctaagtgttgaacaggagcttaatgcaaagctaatagggttcaacacaagtaaacaagtgcgatggtccaaagactggattatctatagataatggacatcacaagtaagatggacattgcttaagtgagactcggtgtgcataactcagagacaaccgatcaagccaacgatggaggcaagaagagcttcgaggtaccgagtgcacgtgagaaggtaaggggaccaagaacccaaagccaggggtgaagaagaagacttgcaaagtcaaggttgatcgagttaagaagagttatggtgcatcaaggatcactacataaggacatgacttacaaccaatgaggtaacatctacaattgtgaggtgtaagtcataaggcttaagatcaagctcaagaagtgaacaaggtcactagaaggaggagcagtgtcaaagccagaactggaagcagcccaaaagagctaagttcaccttgatctttagattgggttgttcctatgtttggatatattctatgtgacctttgcagggggttggaactcagatatgtcaatatagatcaagtcaagttgacttgatagcttatatgtccaacacatgtcaatgtaatatgtgctaaatggttaagacatgcaagtctaagaatcaaggtatatctctggccctagtgaattgtttttagagctaacatatttctctaagtgccagggaccaatttgagtcaaatccaaaagagcaaaggaagtccatctgaaaggccaatggagtacctgctgcgggtgcaccggacagtgtccggtgccccagcagctcggctggcaaactagcagctctcgggaatcgatgggggcgctgtggctaaaattcaccggactgtccggtgtgcaccagattgtccggtgaacctacaatgcccgcactaatggtcggcagcgcaatcagcgggcgacgcgtggcctgagccaacgatcagttggcgcaccggactgtccggtgcgccaagaggaccgagggcgcaacggtcggcttcgccagaaaaggaaggatatcgggcaccggacaagatactgttcatgtccgatggtgcaccggactgtccggtacgatacccgacagaagacaaggatagctttccaaatgaagctccaacagctcctaggccctttggggctataaaagggacccctaggcgcctcaaacaagaaaagaagagcagccaacaagtgcatacatcatttggatcaattctctctctccctctcttgtgtatctctctagtttgtgtagaggtgaagttataagcctttagagagaggggaagtgctgctgagagctagagcaaaatcttgagcgcattgttactctgccggagtgctgtcaagaagattgtaagcagccacgacatcgttgtaactgacatcaacatagtggaaggctctatctgtcgcactgatagatccgagcaaacagaggaagaagttgaaatagac

SEQ ID NO: 79924 - DNA, 2048 bp, Zea Mays
gtctctcccaccaccacccaaacgcctcgacccggacgaccggaggcagatacgtgtgcgaccctggacgcgcgagaagatccatccctccacacggatctcctcctgtccaccaggctacttaactgatgagacggcacggccaaaagattctcgtggacgtctccggcgcccaattgtatagtagcccgcgcgctctagcgagaagctagcgcgccatcgccgccggcgtcgtgtcatggaaatggtagagtgctccctcgttgctacacttgctccgcgcccgctgcccggacaggttcggaaggccttgccccggccggcggcttttggggcgagagcgagactccgggtgcggtccgtgggccgagaggagcctctgcatccgcagcagacggcagtccgggcttccggaccggatcacggaggccgggcgctggggcaggctgcggtggggttcgccgccgctgccgttgtgtcactaaccgggttctccggggatgtgtccccgctgccgacgccgcctgcccgggccgagtcgctcaccgtcgcgttccccgtctccaaggcgcgcgaagtgaacagagtgcagaggacgctggtggagacgtgggggctgatccgtgagacctttgttgatcccaccttcaaccaccaagattgggatcagaaactacagcaaaccatggtagagatatttccactgaaatcagcggatgctgcctacagtaagattagtgggatgctgtccacactcggcgacccatttacaaggatcatcagccccaaggagtaccagagttttaggataggaagtgatgggaatgtgcaaggggtcggggtgtttataaacaaggagccaagctctggacgattgcttgttatggactgcattcagggaggcccagcagatcgagcaggcatacatgaaggcgatgagctagtcgagatagacggcaaaagtgtttctggtttggatggagaggctgcagctcagaggcttagaggccgtgtaggaacaacagtgaaagtgaagttggaactgacgatgaaaggggtgggggtttaagacaaaaggaggtccagctgtctcgtgaaattatcaacctttcacctctgtcaactgcaattatctctcatagaacagacgatggccatgagtgcaagactggctatgttagattagcttccttttatcagggaggtttagtaaaagctggtcttgatgtggctcaaatttggttggatggagatgaaacccttgtcaacactattgatcgtgaagggaatgtgctaccaataaatatgatccaagggcattcattaacgcatgatccccttgttgtgcttgtcaatgaaggaagcgcaagtgcaagtgaaatcttggcaggggcattacatgacaatggacgagctattctggttggccatagaacctttggtaaaggaaaaattcaggcaagactaacttcacaaaacacttatgctattcttttctgtaaaacacttcatttcggtatgcttcacgatcctgttctgttgcgcagagtgtgactgagctggacgacggatctgctctgtttatcacagttgcaaagtatctatctccagcgctgcatgaaatcgatcaagtaggaatccaacctgacatacaatgcagccctgacatcctttctttgccaagagcgccttcgctaagagaaaacagcaacgccacaaatttggagatggattcgtgtatcatggtagcagaacaagcgttggaaattcagcaaagcaagggttccgcttcttagatgcactatgggctctgtacattatttgcattctacagtagattggatagcttaccttagagacttataaagttctgtagcggtatatagagagaggctgatcctcacatgtttcattttaggcattatctattcggtgattcatgggaatgtatataagttgaccttgtcatatatctgtgtcgggttcattcttgactatccatactcagaaatataacgtgcaatttttttgcaaaaacaaaaaactaa

SEQ ID NO: 79925 - DNA, 2380 bp, Zea Mays
ccaccaccacccaaacgcctcgacccggacgaccggaggcagatacgtgtgcgaccctggacgcgcgagaagatccatccctccacacggatctcctcctgtccaccaggctacttaactgatgagacggcacggccaaaagattctcgtggacgtctccggcgcccaattgtatagtagcccgcgcgctctagcgagaagctagcgcgccatcgccgccggcgtcgtgtcatggaaatggtagagtgctccctcgttgctacacttgctccgcgcccgctgcccggacaggttcggaaggccttgccccggccggcggcttttggggcgagagcgagactccgggtgcggtccgtgggccgagaggagcctctgcatccgcagcagacggcagtccgggcttccggaccggatcacggaggccgggcgctggggcaggctgcggtggggttcgccgccgctgccgttgtgtcactaaccgggttctccggggatgtgtccccgctgccgacgccgcctgcccgggccgagtcgctcaccgtcgcgttccccgtctccaaggcgcgcgaagtgaacagagtgcagaggacgctggtggagacgtgggggctgatccgtgagacctttgttgatcccaccttcaaccaccaagattgggatcagaaactacagcaaaccatggtagagatatttccactgaaatcagcggatgctgcctacagtaagattagtgggatgctgtccacactcggcgacccatttacaaggatcatcagccccaaggagtaccagagttttaggataggaagtgatgggaatgtgcaaggggtcggggtgtttataaacaaggagccaagctctggacgattgcttgttatggactgcattcagggaggcccagcagatcgagcaggcatacatgaaggcgatgagctagtcgagatagacggcaaaagtgtttctggtttggatggagaggctgcagctcagaggcttagaggccgtgtaggaacaacagtgaaagtgaagttgttagatgtatttccttaccttgagcttcatagtagatacttagcttcagttaaatctattttgctggttgtgaagtatacttcaacttgagatgtgccagttcaacattaaggcacttgtttaaaaaaaacattcagagattgaataagtggccaaggttttggtttatagaactaaaaaaacatcgcgtttttttggttcaccgaagtctggcatactaggcttctattatattatatcatatcctgaatcccctttatgtaatttggtgaactcagccatggaaacgttgctcctcgtctttgtatttactttcttaccgatgcatatttatatccagggaactgacgatgaaaggggtgggggtttaagacaaaaggaggtccagctgtctcgtgaaattatcaacctttcacctctgtcaactgcaattatctctcatagaacagacgatggccatgagtgcaagactggctatgttagattagcttccttttatcagactgcagcagctgaaatggaaaatgccgtaaaaaggatggaggatatcggtgtccagtcttatattctagatctgcggaataacccaggaggtttagtaaaagctggtcttgatgtggctcaaatttggttggatggagatgaaacccttgtcaacactattgatcgtgaagggaatgtgctaccaataaatatgatccaagggcattcattaacgcatgatccccttgttgtgcttgtcaatgaaggaagcgcaagtgcaagtgaaatcttggcaggggcattacatgacaatggacgagctattctggttggccatagaacctttggtaaaggaaaaattcagagtgtgactgagctggacgacggatctgctctgtttatcacagttgcaaagtatctatctccagcgctgcatgaaatcgatcaagtaggaatccaacctgacatacaatgcagccctgacatcctttctttgccaagagcgccttcgctaagagaaaacagcaacgccacaaatttggagatggattcgtgtatcatggtagcagaacaagcgttggaaattcagcaaagcaagggttccgcttcttagatgcactatgggctctgtacattatttgcattctacagtagattggatagcttaccttagagacttataaagttctgtagcggtatatagagagaggctgatcctcacatgtttcattttaggcattatctattcggtgattcatgggaatgtatataagttgaccttgtcatatatctgtgtcgggttcattcttgactatccatactcagaaatataacgtgcaatttttttgcaaaaacaaaaaactaa

SEQ ID NO: 79926 - DNA, 2272 bp, Zea Mays
gacccggacgaccggaggcagatacgtgtgcgaccctggacgcgcgagaagatccatccctccacacggatctcctcctgtccaccaggctacttaactgatgagacggcacggccaaaagattctcgtggacgtctccggcgcccaattgtatagtagcccgcgcgctctagcgagaagctagcgcgccatcgccgccggcgtcgtgtcatggaaatggtagagtgctccctcgttgctacacttgctccgcgcccgctgcccggacaggttcggaaggccttgccccggccggcggcttttggggcgagagcgagactccgggtgcggtccgtgggccgagaggagcctctgcatccgcagcagacggcagtccgggcttccggaccggatcacggaggccgggcgctggggcaggctgcggtggggttcgccgccgctgccgttgtgtcactaaccgggttctccggggatgtgtccccgctgccgacgccgcctgcccgggccgagtcgctcaccgtcgcgttccccgtctccaaggcgcgcgaagtgaacagagtgcagaggacgctggtggagacgtgggggctgatccgtgagacctttgttgatcccaccttcaaccaccaagattgggatcagaaactacagcaaaccatggtagagatatttccactgaaatcagcggatgctgcctacagtaagattagtgggatgctgtccacactcggcgacccatttacaaggatcatcagccccaaggagtaccagagttttaggataggaagtgatgggaatgtgcaaggggtcggggtgtttataaacaaggagccaagctctggacgattgcttgttatggactgcattcagggaggcccagcagatcgagcaggcatacatgaaggcgatgagctagtcgagatagacggcaaaagtgtttctggtttggatggagaggctgcagctcagaggcttagaggccgtgtaggaacaacagtgaaagtgaagttgttagatgtatttccttaccttgagcttcatagtagatacttagcttcagttaaatctattttgctggttgtgaagtatacttcaacttgagatgtgccagttcaacattaaggcacttgtttaaaaaaaacattcagagattgaataagtggccaaggttttggtttatagaactaaaaaaacatcgcgtttttttggttcaccgaagtctggcatactaggcttctattatattatatcatatcctgaatcccctttatgtaatttggtgaactcagccatggaaacgttgctcctcgtctttgtatttactttcttaccgatgcatatttatatccagggaactgacgatgaaaggggtgggggtttaagacaaaaggaggtccagctgtctcgtgaaattatcaacctttcacctctgtcaactgcaattatctctcatagaacagacgatggccatgagtgcaagactggctatgttagattagcttccttttatcagggaggtttagtaaaagctggtcttgatgtggctcaaatttggttggatggagatgaaacccttgtcaacactattgatcgtgaagggaatgtgctaccaataaatatgatccaagggcattcattaacgcatgatccccttgttgtgcttgtcaatgaaggaagcgcaagtgcaagtgaaatcttggcaggggcattacatgacaatggacgagctattctggttggccatagaacctttggtaaaggaaaaattcagagtgtgactgagctggacgacggatctgctctgtttatcacagttgcaaagtatctatctccagcgctgcatgaaatcgatcaagtaggaatccaacctgacatacaatgcagccctgacatcctttctttgccaagagcgccttcgctaagagaaaacagcaacgccacaaatttggagatggattcgtgtatcatggtagcagaacaagcgttggaaattcagcaaagcaagggttccgcttcttagatgcactatgggctctgtacattatttgcattctacagtagattggatagcttaccttagagacttataaagttctgtagcggtatatagagagaggctgatcctcacatgtttcattttaggcattatctattcggtgattcatgggaatgtatataagttgaccttgtcatatatctgtgtcgggttcattcttgactatccatactcagaaatataacgtgcaatttttttgcaaaaacaaaaaactaa

SEQ ID NO: 79927 - DNA, 2564 bp, Zea Mays
gacccggacgaccggaggcagatacgtgtgcgaccctggacgcgcgagaagatccatccctccacacggatctcctcctgtccaccaggctacttaactgatgagacggcacggccaaaagattctcgtggacgtctccggcgcccaattgtatagtagcccgcgcgctctagcgagaagctagcgcgccatcgccgccggcgtcgtgtcatggaaatggtagagtgctccctcgttgctacacttgctccgcgcccgctgcccggacaggttcggaaggccttgccccggccggcggcttttggggcgagagcgagactccgggtgcggtccgtgggccgagaggagcctctgcatccgcagcagacggcagtccgggcttccggaccggatcacggaggccgggcgctggggcaggctgcggtggggttcgccgccgctgccgttgtgtcactaaccgggttctccggggatgtgtccccgctgccgacgccgcctgcccgggccgagtcgctcaccgtcgcgttccccgtctccaaggcgcgcgaagtgaacagagtgcagaggacgctggtggagacgtgggggctgatccgtgagacctttgttgatcccaccttcaaccaccaagattgggatcagaaactacagcaaaccatggtagagatatttccactgaaatcagcggatgctgcctacagtaagattagtgggatgctgtccacactcggcgacccatttacaaggatcatcagccccaaggagtaccagagttttaggataggaagtgatgggaatgtgcaaggggtcggggtgtttataaacaaggagccaagctctggacgattgcttgttatggactgcattcagggaggcccagcagatcgagcaggcatacatgaaggcgatgagctagtcgagatagacggcaaaagtgtttctggtttggatggagaggctgcagctcagaggcttagaggccgtgtaggaacaacagtgaaagtgaagttgttagatgtatttccttaccttgagcttcatagtagatacttagcttcagttaaatctattttgctggttgtgaagtatacttcaacttgagatgtgccagttcaacattaaggcacttgtttaaaaaaaacattcagagattgaataagtggccaaggttttggtttatagaactaaaaaaacatcgcgtttttttggttcaccgaagtctggcatactaggcttctattatattatatcatatcctgaatcccctttatgtaatttggtgaactcagccatggaaacgttgctcctcgtctttgtatttactttcttaccgatgcatatttatatccagggaactgacgatgaaaggggtgggggtttaagacaaaaggaggtaatgcctaacttgctgaacgaagaattgtaaaatcttaagatttttatatgtgtaatttgaaatgtatgatctgtgcctacagagctcatcaaattgcagtagccattctgttaaaaattcattaaccacaagagaaccattttccaactaagacagtgatcgagtgtttcctaattatgtccactaccttttgtttccaaaggtccagctgtctcgtgaaattatcaacctttcacctctgtcaactgcaattatctctcatagaacagacgatggccatgagtgcaagactggctatgttagattagcttccttttatcagactgcagcagctgaaatggaaaatgccgtaaaaaggatggaggatatcggtgtccagtcttatattctagatctgcggaataacccaggaggtttagtaaaagctggtcttgatgtggctcaaatttggttggatggagatgaaacccttgtcaacactattgatcgtgaagggaatgtgctaccaataaatatgatccaagggcattcattaacgcatgatccccttgttgtgcttgtcaatgaaggaagcgcaagtgcaagtgaaatcttggcaggggcattacatgacaatggacgagctattctggttggccatagaacctttggtaaaggaaaaattcagagtgtgactgagctggacgacggatctgctctgtttatcacagttgcaaagtatctatctccagcgctgcatgaaatcgatcaagtaggaatccaacctgacatacaatgcagccctgacatcctttctttgccaagagcgccttcgctaagagaaaacagcaacgccacaaatttggagatggattcgtgtatcatggtagcagaacaagcgttggaaattcagcaaagcaagggttccgcttcttagatgcactatgggctctgtacattatttgcattctacagtagattggatagcttaccttagagacttataaagttctgtagcggtatatagagagaggctgatcctcacatgtttcattttaggcattatctattcggtgattcatgggaatgtatataagttgaccttgtcatatatctgtgtcgggttcattcttgactatccatactcagaaatataacgtgcaatttttttgcaaaaacaaaaaactaa

SEQ ID NO: 79928 - DNA, 1984 bp, Zea Mays
atttgataccccgcgggtcacgtttccgcaaagggaaagcctcaaaaggcgacgcgcaagggccgaggagagaaaggaacctgaggaaggcacaccagtttcaagcaatccctaggccgtggcgacgtgctgggaaggattcaaatcaggggcgaagcctaggtgacggcgctgttagtcgcctctagtagctgcgcgacgcgggctggcttgtccgatcggtttgcctcggccatgtcgactaagaaagttctttgcaagttcttcatgcatggagcttgcttgaaaggagagtactgtgaattctcccacgactggagtgatcaagcaaataatgtttgcacattctaccaaaaaggtgcatgctcgtatggtagccgttgcagatatgaccatgtcaaagtttctcgtaaccccacagtgccaccaccacgcccaacgtcaagtacttcaagacgtgcatctacttctcttcaactttcaagttacaatcatccacctcatatggtgcaccaaacagattcaagcaaccaaagacatcagatatctgtggatgtgttggcacattctgccagtaagcctgcatggagaaatgattttcagcatgatattgtttcagatgatggaattgactggtcttctaatcaaaatttgataaaccagacatcattgaaacctgtggatctccctatttgttcttttgctgctgctggtaattgtccttatggggaagggtgccctcaaatgcatggagatctgtgtgcaacctgtggaaaactgtgcttgcatccttatcgtcctgatgagagggaggagcatatcaagttatgtgagaaaaatcacaaacgccttgtagctctgaaacgcagccaagaaatagaatgcagtgtatgtttggatcgtgtgctttcaaagcctactgctgctgaaaggaagtttggactcttatccgaatgtgatcatcctttctgtattgaatgcattagaaattggcgtagcaattctcctgcatctggtatggatgtgaactcagcattgagggcttgtccaatatgtcggaaactttcatactatgtcattccaagtgttctttggtacttctcaaaggaagagaaagaggagatcactgaaagctacaaatccaagctcaagtctattgattgcaagtacttcgactttgggactggctcatgccccttcggaacaagttgtttctataagcatgcctacagagatggccgcttggaagaggtaatactgcggcatcttgatgctgatgatggaagtacagtaattgcaaaaagtatcaggttatcagacttccttggtaggatggatctttagggaccagcagctgtattgatatcaaatatgctgggattaccttttcagagcactgttgacctgagggcgacggaaacaagtctgacaacaattgtgcttgaatatcaaaacagaagtaatactcgtatttatagacttcactaagtgtggctctatgtatcaattgctggtcttctaggccaccagataatagctgaacatttcctggccgacaagtgaaaggggcagccgtataaatttgcttccattccacctgaatgttctcttcatattgtggaagggtactgcaccaataggtccaataaggccatttgtttgctttacttaatatacaaaaaaagtatagcagatgaaatgcaatgacaactgtaatgcagcattgttgaatgtgagcgtgagcggtggttttttatcgatgacctgctgaggaaggtcctcttagtaggcaggtaaactgagaacatttttttgttatatatatacagcataattgtacgagaaaaatagcaaatgaaccgagaatgatcattaaatgcagtcgtcggttgtatggttgtaacatctcaaaaccatcagttaaaaataatacatgtagaatattagtggtaataatattaaataaaattttatttcttcaagt

SEQ ID NO: 79929 - DNA, 2508 bp, Zea Mays
gtcacgtttccgcaaagggaaagcctcaaaaggcgacgcgcaagggccgaggagagaaaggaacctgaggaaggcacaccagtttcaagcaatccctaggccgtggcgacgtgctgggaaggattcaaatcaggggcgaagcctaggtgacggcgctgttagtcgcctctagtagctgcgcgacgcgggctggcttgtccgatcggtttgcctcggccatgtcgactaagaaagttctttgcaagttcttcatgcatggagcttgcttgaaaggagagtactgtgaattctcccacgactggagtgatcaagcaaataatgtttgcacattctaccaaaaaggtgcatgctcgtatggtagccgttgcagatatgaccatgtcaaagtttctcgtaaccccacagtgccaccaccacgcccaacgtcaagtacttcaagacgtgcatctacttctcttcaactttcaagttacaatcatccacctcatatggtgcaccaaacagattcaagcaaccaaagacatcagatatctgtggatgtgttggcacattctgccagtaagcctgcatggagaaatgattttcagcatgatattgtttcagatgatggaattgactggtcttctaatcaaaatttgataaaccagacatcattgaaacctgtggatctccctatttgttcttttgctgctgctggtaattgtccttatggggaagggtgccctcaaatgcatggagatctgtgtgcaacctgtggaaaactgtgcttgcatccttatcgtcctgatgagagggaggagcatatcaagttatgtgagaaaaatcacaaacgccttgtagctctgaaacgcagccaagaaatagaatgcagtgtatgtttggatcgtgtgctttcaaagcctactgctgctgaaaggaagtttggactcttatccgaatgtgatcatcctttctgtattgaatgcattagaaattggcgtagcaattctcctgcatctggtatggatgtgaactcagcattgagggcttgtccaatatgtcggaaactttcatactatgtcattccaagtgttctttggtacttctcaaaggaagagaaagaggagatcactgaaagctacaaatccaagctcaacatgcctacagagatggccgcttggaagaggtaatactgcggcatcttgatgctgatgatggaagtacagtaattgcaaaaagtatcaggttatcagacttccttggtaggatggatctttagggaccagcagctgtattgatatcaaatgtaagatccacttttagtgcccagtctgcatcaatattctatttctggccaaataatccaatatgcaatgcatgcctagaaatgccatttttattttctaatataggagtttggtaatagttatgtggcatcattgaacaattccaaatttgcaattggatgtagtaggtgtattagggatcttttttgcaattactatgcttttgactcttcatcaatattcgcttggtcttgcattcattttcttttgctcacaaattttcattcatttggtgtttcattcttgcaaaattattttcctcatttgaccaagtgaagtgaaacatttggaaccaggcattctgggatatcgttatccaccaattatttacaatattctgaagatcagtttagcttgaggcatcttcggaaagtacagctttgtctccatttagtggttggttgctttgtcgccagttgaaacaaggcaatccttgtgcgctaaaaattcgctgttccttttcttttatcttgcatagttcactcgcataatcttttattcttagctatatgcctaatattgaacactccattcaaatcagaaagtttgaagatctccatggtcctgtagatgctgggattaccttttcagagcactgttgacctgagggcgacggaaacaagtctgacaacaattgtgcttgaatatcaaaacagaagtaatactcgtatttatagacttcactaagtgtggctctatgtatcaattgctggtcttctaggccaccagataatagctgaacatttcctggccgacaagtgaaaggggcagccgtataaatttgcttccattccacctgaatgttctcttcatattgtggaagggtactgcaccaataggtccaataaggccatttgtttgctttacttaatatacaaaaaaagtatagcagatgaaatgcaatgacaactgtaatgcagcattgttgaatgtgagcgtgagcggtggttttttatcgatgacctgctgaggaaggtcctcttagtaggcaggtaaactgagaacatttttttgttatatatatacagcataattgtacgagaaaaatagcaaatgaaccgagaatgatcattaaatgcagtcgtcggttgtatggttgtaacatctcaaaaccatcagttaaaaataatacatgtagaatattagtggtaataatattaaataaaattttatttcttcaagt

SEQ ID NO: 79930 - DNA, 2578 bp, Zea Mays
gtcacgtttccgcaaagggaaagcctcaaaaggcgacgcgcaagggccgaggagagaaaggaacctgaggaaggcacaccagtttcaagcaatccctaggccgtggcgacgtgctgggaaggattcaaatcaggggcgaagcctaggtgacggcgctgttagtcgcctctagtagctgcgcgacgcgggctggcttgtccgatcggtttgcctcggccatgtcgactaagaaagttctttgcaagttcttcatgcatggagcttgcttgaaaggagagtactgtgaattctcccacgactggagtgatcaagcaaataatgtttgcacattctaccaaaaaggtgcatgctcgtatggtagccgttgcagatatgaccatgtcaaagtttctcgtaaccccacagtgccaccaccacgcccaacgtcaagtacttcaagacgtgcatctacttctcttcaactttcaagttacaatcatccacctcatatggtgcaccaaacagattcaagcaaccaaagacatcagatatctgtggatgtgttggcacattctgccagtaagcctgcatggagaaatgattttcagcatgatattgtttcagatgatggaattgactggtcttctaatcaaaatttgataaaccagacatcattgaaacctgtggatctccctatttgttcttttgctgctgctggtaattgtccttatggggaagggtgccctcaaatgcatggagatctgtgtgcaacctgtggaaaactgtgcttgcatccttatcgtcctgatgagagggaggagcatatcaagttatgtgagaaaaatcacaaacgccttgtagctctgaaacgcagccaagaaatagaatgcagtgtatgtttggatcgtgtgctttcaaagcctactgctgctgaaaggaagtttggactcttatccgaatgtgatcatcctttctgtattgaatgcattagaaattggcgtagcaattctcctgcatctggtatggatgtgaactcagcattgagggcttgtccaatatgtcggaaactttcatactatgtcattccaagtgttctttggtacttctcaaaggaagagaaagaggagatcactgaaagctacaaatccaagctcaagtctattgattgcaagtacttcgactttgggactggctcatgccccttcggaacaagttgtttctataagcatgcctacagagatggccgcttggaagaggtaatactgcggcatcttgatgctgatgatggaagtacagtaattgcaaaaagtatcaggttatcagacttccttggtaggatggatctttagggaccagcagctgtattgatatcaaatgtaagatccacttttagtgcccagtctgcatcaatattctatttctggccaaataatccaatatgcaatgcatgcctagaaatgccatttttattttctaatataggagtttggtaatagttatgtggcatcattgaacaattccaaatttgcaattggatgtagtaggtgtattagggatcttttttgcaattactatgcttttgactcttcatcaatattcgcttggtcttgcattcattttcttttgctcacaaattttcattcatttggtgtttcattcttgcaaaattattttcctcatttgaccaagtgaagtgaaacatttggaaccaggcattctgggatatcgttatccaccaattatttacaatattctgaagatcagtttagcttgaggcatcttcggaaagtacagctttgtctccatttagtggttggttgctttgtcgccagttgaaacaaggcaatccttgtgcgctaaaaattcgctgttccttttcttttatcttgcatagttcactcgcataatcttttattcttagctatatgcctaatattgaacactccattcaaatcagaaagtttgaagatctccatggtcctgtagatgctgggattaccttttcagagcactgttgacctgagggcgacggaaacaagtctgacaacaattgtgcttgaatatcaaaacagaagtaatactcgtatttatagacttcactaagtgtggctctatgtatcaattgctggtcttctaggccaccagataatagctgaacatttcctggccgacaagtgaaaggggcagccgtataaatttgcttccattccacctgaatgttctcttcatattgtggaagggtactgcaccaataggtccaataaggccatttgtttgctttacttaatatacaaaaaaagtatagcagatgaaatgcaatgacaactgtaatgcagcattgttgaatgtgagcgtgagcggtggttttttatcgatgacctgctgaggaaggtcctcttagtaggcaggtaaactgagaacatttttttgttatatatatacagcataattgtacgagaaaaatagcaaatgaaccgagaatgatcattaaatgcagtcgtcggttgtatggttgtaacatctcaaaaccatcagttaaaaataatacatgtagaatattagtggtaataatattaaataaaattttatttcttcaagt

SEQ ID NO: 79931 - DNA, 2112 bp, Zea Mays
agggaaagcctcaaaaggcgacgcgcaagggccgaggagagaaaggaacctgaggaaggcacaccagtttcaagcaatccctaggccgtggcgacgtgctgggaaggattcaaatcaggggcgaagcctaggtgacggcgctgttagtcgcctctagtagctgcgcgacgcgggctggcttgtccgatcggtttgcctcggccatgtcgactaagaaagttctttgcaagttcttcatgcatggagcttgcttgaaaggagagtactgtgaattctcccacgactggagtgatcaagcaaataatgtttgcacattctaccaaaaaggtgcatgctcgtatggtagccgttgcagatatgaccatgtcaaagtttctcgtaaccccacagtgccaccaccacgcccaacgtcaagtacttcaagacgtgcatctacttctcttcaactttcaagttacaatcatccacctcatatggtgcaccaaacagattcaagcaaccaaagacatcagatatctgtggatgtgttggcacattctgccagtaagcctgcatggagaaatgattttcagcatgatattgtttcagatgatggaattgactggtcttctaatcaaaatttgataaaccagacatcattgaaacctgtggatctccctatttgttcttttgctgctgctggtaattgtccttatggggaagggtgccctcaaatgcatggagatctgtgtgcaacctgtggaaaactgtgcttgcatccttatcgtcctgatgagagggaggagcatatcaagttatgtgagaaaaatcacaaacgccttgtagctctgaaacgcagccaagaaatagaatgcagtgtatgtttggatcgtgtgctttcaaagcctactgctgctgaaaggaagtttggactcttatccgaatgtgatcatcctttctgtattgaatgcattagaaattggcgtagcaattctcctgcatctggtatggatgtgaactcagcattgagggcttgtccaatatgtcggaaactttcatactatgtcattccaagtgttctttggtacttctcaaaggaagagaaagaggagatcactgaaagctacaaatccaagctcaagtctattgattgcaagtacttcgactttgggactggctcatgccccttcggaacaagttgtttctataagcatgcctacagagatggccgcttggaagaggtaatactgcggcatcttgatgctgatgatggaagtacagtaattgcaaaaagtatcaggttatcagacttccttggtaggatggatctttagggaccagcagctgtattgatatcaaatgcattctgggatatcgttatccaccaattatttacaatattctgaagatcagtttagcttgaggcatcttcggaaagtacagctttgtctccatttagtggttggttgctttgtcgccagttgaaacaagaaagtttgaagatctccatggtcctgtagatgctgggattaccttttcagagcactgttgacctgagggcgacggaaacaagtctgacaacaattgtgcttgaatatcaaaacagaagtaatactcgtatttatagacttcactaagtgtggctctatgtatcaattgctggtcttctaggccaccagataatagctgaacatttcctggccgacaagtgaaaggggcagccgtataaatttgcttccattccacctgaatgttctcttcatattgtggaagggtactgcaccaataggtccaataaggccatttgtttgctttacttaatatacaaaaaaagtatagcagatgaaatgcaatgacaactgtaatgcagcattgttgaatgtgagcgtgagcggtggttttttatcgatgacctgctgaggaaggtcctcttagtaggcaggtaaactgagaacatttttttgttatatatatacagcataattgtacgagaaaaatagcaaatgaaccgagaatgatcattaaatgcagtcgtcggttgtatggttgtaacatctcaaaaccatcagttaaaaataatacatgtagaatattagtggtaataatattaaataaaattttatttcttcaagt

SEQ ID NO: 79932 - DNA, 2012 bp, Zea Mays
agggaaagcctcaaaaggcgacgcgcaagggccgaggagagaaaggaacctgaggaaggcacaccagtttcaagcaatccctaggccgtggcgacgtgctgggaaggattcaaatcaggggcgaagcctaggtgacggcgctgttagtcgcctctagtagctgcgcgacgcgggctggcttgtccgatcggtttgcctcggccatgtcgactaagaaagttctttgcaagttcttcatgcatggagcttgcttgaaaggagagtactgtgaattctcccacgactggagtgatcaagcaaataatgtttgcacattctaccaaaaaggtgcatgctcgtatggtagccgttgcagatatgaccatgtcaaagtttctcgtaaccccacagtgccaccaccacgcccaacgtcaagtacttcaagacgtgcatctacttctcttcaactttcaagttacaatcatccacctcatatggtgcaccaaacagattcaagcaaccaaagacatcagatatctgtggatgtgttggcacattctgccagtaagcctgcatggagaaatgattttcagcatgatattgtttcagatgatggaattgactggtcttctaatcaaaatttgataaaccagacatcattgaaacctgtggatctccctatttgttcttttgctgctgctggtaattgtccttatggggaagggtgccctcaaatgcatggagatctgtgtgcaacctgtggaaaactgtgcttgcatccttatcgtcctgatgagagggaggagcatatcaagttatgtgagaaaaatcacaaacgccttgtagctctgaaacgcagccaagaaatagaatgcagtgtatgtttggatcgtgtgctttcaaagcctactgctgctgaaaggaagtttggactcttatccgaatgtgatcatcctttctgtattgaatgcattagaaattggcgtagcaattctcctgcatctggtatggatgtgaactcagcattgagggcttgtccaatatgtcggaaactttcatactatgtcattccaagtgttctttggtacttctcaaaggaagagaaagaggagatcactgaaagctacaaatccaagctcaacatgcctacagagatggccgcttggaagaggtaatactgcggcatcttgatgctgatgatggaagtacagtaattgcaaaaagtatcaggttatcagacttccttggtaggatggatctttagggaccagcagctgtattgatatcaaatgcattctgggatatcgttatccaccaattatttacaatattctgaagatcagtttagcttgaggcatcttcggaaagtacagctttgtctccatttagtgaaagtttgaagatctccatggtcctgtagatgctgggattaccttttcagagcactgttgacctgagggcgacggaaacaagtctgacaacaattgtgcttgaatatcaaaacagaagtaatactcgtatttatagacttcactaagtgtggctctatgtatcaattgctggtcttctaggccaccagataatagctgaacatttcctggccgacaagtgaaaggggcagccgtataaatttgcttccattccacctgaatgttctcttcatattgtggaagggtactgcaccaataggtccaataaggccatttgtttgctttacttaatatacaaaaaaagtatagcagatgaaatgcaatgacaactgtaatgcagcattgttgaatgtgagcgtgagcggtggttttttatcgatgacctgctgaggaaggtcctcttagtaggcaggtaaactgagaacatttttttgttatatatatacagcataattgtacgagaaaaatagcaaatgaaccgagaatgatcattaaatgcagtcgtcggttgtatggttgtaacatctcaaaaccatcagttaaaaataatacatgtagaatattagtggtaataatattaaataaaattttatttcttcaagt

SEQ ID NO: 79933 - DNA, 2082 bp, Zea Mays
agggaaagcctcaaaaggcgacgcgcaagggccgaggagagaaaggaacctgaggaaggcacaccagtttcaagcaatccctaggccgtggcgacgtgctgggaaggattcaaatcaggggcgaagcctaggtgacggcgctgttagtcgcctctagtagctgcgcgacgcgggctggcttgtccgatcggtttgcctcggccatgtcgactaagaaagttctttgcaagttcttcatgcatggagcttgcttgaaaggagagtactgtgaattctcccacgactggagtgatcaagcaaataatgtttgcacattctaccaaaaaggtgcatgctcgtatggtagccgttgcagatatgaccatgtcaaagtttctcgtaaccccacagtgccaccaccacgcccaacgtcaagtacttcaagacgtgcatctacttctcttcaactttcaagttacaatcatccacctcatatggtgcaccaaacagattcaagcaaccaaagacatcagatatctgtggatgtgttggcacattctgccagtaagcctgcatggagaaatgattttcagcatgatattgtttcagatgatggaattgactggtcttctaatcaaaatttgataaaccagacatcattgaaacctgtggatctccctatttgttcttttgctgctgctggtaattgtccttatggggaagggtgccctcaaatgcatggagatctgtgtgcaacctgtggaaaactgtgcttgcatccttatcgtcctgatgagagggaggagcatatcaagttatgtgagaaaaatcacaaacgccttgtagctctgaaacgcagccaagaaatagaatgcagtgtatgtttggatcgtgtgctttcaaagcctactgctgctgaaaggaagtttggactcttatccgaatgtgatcatcctttctgtattgaatgcattagaaattggcgtagcaattctcctgcatctggtatggatgtgaactcagcattgagggcttgtccaatatgtcggaaactttcatactatgtcattccaagtgttctttggtacttctcaaaggaagagaaagaggagatcactgaaagctacaaatccaagctcaagtctattgattgcaagtacttcgactttgggactggctcatgccccttcggaacaagttgtttctataagcatgcctacagagatggccgcttggaagaggtaatactgcggcatcttgatgctgatgatggaagtacagtaattgcaaaaagtatcaggttatcagacttccttggtaggatggatctttagggaccagcagctgtattgatatcaaatgcattctgggatatcgttatccaccaattatttacaatattctgaagatcagtttagcttgaggcatcttcggaaagtacagctttgtctccatttagtgaaagtttgaagatctccatggtcctgtagatgctgggattaccttttcagagcactgttgacctgagggcgacggaaacaagtctgacaacaattgtgcttgaatatcaaaacagaagtaatactcgtatttatagacttcactaagtgtggctctatgtatcaattgctggtcttctaggccaccagataatagctgaacatttcctggccgacaagtgaaaggggcagccgtataaatttgcttccattccacctgaatgttctcttcatattgtggaagggtactgcaccaataggtccaataaggccatttgtttgctttacttaatatacaaaaaaagtatagcagatgaaatgcaatgacaactgtaatgcagcattgttgaatgtgagcgtgagcggtggttttttatcgatgacctgctgaggaaggtcctcttagtaggcaggtaaactgagaacatttttttgttatatatatacagcataattgtacgagaaaaatagcaaatgaaccgagaatgatcattaaatgcagtcgtcggttgtatggttgtaacatctcaaaaccatcagttaaaaataatacatgtagaatattagtggtaataatattaaataaaattttatttcttcaagt

SEQ ID NO: 79934 - DNA, 786 bp, Zea Mays
ggaatctgctcatcattacatgtgattgttcttccatgtgttctatttgggcaggaaatatttctaatttgatgctcactcttgtggcacattgtttttgtggggtcttgtgaaacatgaaccgtgctttgaagctccatcctgtgttgtgcaacaccttcaagaagaaagcccccaatgctataaaggaaatcaggaagtttgcacagaaggcaatgggcaccactgacatcaggattgatgtgaaactcaacaagcacatctggagcagtggtatccggagtgtgccgaggcgtgtccgtgtcaggatcgcacgcaagaggaacgatgaggaagacgccaaggaagagctttactctcttgttaccgttgctgagatccccccagaaggcctgaagggtctgggtaccaaggttgtggaggacgacgagtagatctgcctgggtactgatctgtgtcaactgtcaaatcattttttttggtgtttttgagtttgttagcactaagtcgatagccttgtgagaaatctttgagttttctgatggcgcgcttgttctcgtctggttttgaacttttgaagatacccgcaccaagtactgtagtctgtcgttccaaatcttttctgtaggcatcagatatgcagcatgtctgagtctgacgaattttgtttcattcgcatttgaacttggtaagtacgaattatttcaaagcaaattagttacaattagttacaaatggaatcctcttcgtagctgccaaaccgaaatggaaacctcttcgttgctg

SEQ ID NO: 79935 - DNA, 2962 bp, Zea Mays
tttctttttttttggtcatatatgaactgaattattagttccacacaatttcccagcttctggttcggcatgtagataaactgaattattaagcttcacacgattccccagcttctggtccggcatgtagatgaactgaattacagtacatgttattatggccactctacgcagatggaacccgaacgggaaaccagatctgtcagtactcagttgccgccagcgcagaggagggcgtcaaccttgtccttgaggtgcgcctcgtcgtccccgaggcgggcggcggcggcgccatcctcccagcggatcagcgttggcacgcccttgagcccgaacctggggtccaccctccacgggtgcgccgggtcgcgccaagtgggcttgtccccgacgtaggcgcgcaggagcaccgcgtccttgccctccagtgcctccagccgctcgtagatcaccggctccgccacgttgcagtctgccgcgccgcacaacgacgacggtgggtaagtacgggaccagagcgtcaccacgactagagctgaattcccagaatctgggcttaccggggcaccaggagagggaggagccaggcttgcggtcggccaggaagagcagcagcttcaccttgccgtcggaggcggcgtccggggaagcgaagaggcgatcgaagtgggcgtcgaagtcggaaagccccgcgtccaccttctccaccgtcatctcgccctcctctccccttccgctggccgagtaaagagagcgaattggagcagcaagaaagattgggagacagattggtggaagtggaatgaccgaatgacctaggaagcacacgagacggcgtgccgtgtgattcctttctgggatttctcgcagcctgccggtggtccccgcatctcaacccgcgtgttgcgtacgcgagccggaatcgggggaggtttgggtatggactgaagaggcccaagagctaccgtcgagcccaacaaccaaatgcagccgagtccaacagagtcatcctcatacatcgttcactacttcactctcgtcgttctccccgatcggttccggcctcgcgttcgtcgtctccttccccctcgccggccgcgtgatctgcctgccgcgcggacgccgcgggcgcgacgatgcacgacccgtcggagatccgcaacctccccatcgacatcgcctttggccgcctccaggagtggctcgtggaccgcaagcgagtgccgcacgactggcggaagcgcctcgccggtattcgcgcccgcatcgcgcccgctttctccgccctgccgcggaacctgcacccctcactcctcgccctcgatccagaagaaattggctaccttgaagcaaagaagatatacagcattctcctagaatccaacaccgagagtcgcaacatatttggccgcctgacgggatccgcgggtgaatgggagtcaattattaaagcttacgagaaggaccatgtcttccttggagaggcagcgcagatcatggttcaaaatgttaactatgacataggaagcagatgcagaagactcagcagcagcttgcagagcttgatcgaagggaggctgacatcaagcgtcttgcggcattgtcagcgactagatatgtagaagcctgccaggaactcggtttacagggaataaatgtgagggaagaactaatagagtccgcaaaaacactcccatctacttttagcaaaatcttggaggtcctgaacagtgatcctgtctcaaatgctatggagtactacacaacttttgttaaggactgccatactgaggacaagagaaatagtgattctgtgctacccaaactgaaagacttgcaggccaatcctccttctttgcatgtctcagtatataatgagatcaagagttctcttggagaggcatcaaaatctcctgggtttactgtgatcgcgggagaaattgactcaaatgttgctgctgctgatgatattgattgggacatttctgtggatactaatgaaattgattgggacattggtgctgtggaacaacctggtgaagaatctggcgatggctttggatcgtatgaaattattgatgctaatatagagctggccggttctgaaaattataatgttggtgtctcagacaaatcaatgaacaaagaagatcttgcatcatctgagtctggtatttgctgggacatcactgctgatagttctgaagaaattgctagtatacagaatgcttcatctgtattagagcaatctcagtctcaaatgatagctgaagatagaagtttgttgctggaaaaagaatataggaataatattctggatgatttactcgaggtaaaatcatttttgactcaacgcttaggggagatgaggaatgcagacacatcatctctacagcatcaagtgcaagctgtctcaccttttgttctccagcagcatgctcctgacagtttggagaacatgcttgtagagatctcgtcagcaatctcattgctaactaatcagaagactcttgaccttataatgatccttaactctaaaaggtttctggatagattagtttcaagcttagaagagaagaagcatcacgaagtaaaactacgggaaggtttaggtgatttatctgttaagcgtatggagctgcaaaacgcactgtcatcatcatggccaaagcaagaggcagcaattacaaaaacaagggaactaaagaagctgtgtgagtcgacactgtcgtctgtttttgatggaagaccagtgtatataattggagagatcaatactttactgagctcaagtgttagtcaattagctggatgactgtatttccgttcctggaccaaataagattgcaaaaatattatcttatggtatatacttctgaatatttatggtttcctggtcctgtttctttgctgcacggaagtgcggatgtatgggtttgaattaaagtgtcagcttcatcgt

SEQ ID NO: 79936 - DNA, 2934 bp, Zea Mays
tttctttttttttggtcatatatgaactgaattattagttccacacaatttcccagcttctggttcggcatgtagataaactgaattattaagcttcacacgattccccagcttctggtccggcatgtagatgaactgaattacagtacatgttattatggccactctacgcagatggaacccgaacgggaaaccagatctgtcagtactcagttgccgccagcgcagaggagggcgtcaaccttgtccttgaggtgcgcctcgtcgtccccgaggcgggcggcggcggcgccatcctcccagcggatcagcgttggcacgcccttgagcccgaacctggggtccaccctccacgggtgcgccgggtcgcgccaagtgggcttgtccccgacgtaggcgcgcaggagcaccgcgtccttgccctccagtgcctccagccgctcgtagatcaccggctccgccacgttgcagtctgccgcgccgcacaacgacgacggtgggtaagtacgggaccagagcgtcaccacgactagagctgaattcccagaatctgggcttaccggggcaccaggagagggaggagccaggcttgcggtcggccaggaagagcagcagcttcaccttgccgtcggaggcggcgtccggggaagcgaagaggcgatcgaagtgggcgtcgaagtcggaaagccccgcgtccaccttctccaccgtcatctcgccctcctctccccttccgctggccgagtaaagagagcgaattggagcagcaagaaagattgggagacagattggtggaagtggaatgaccgaatgacctaggaagcacacgagacggcgtgccgtgtgattcctttctgggatttctcgcagcctgccggtggtccccgcatctcaacccgcgtgttgcgtacgcgagccggaatcgggggaggtttgggtatggactgaagaggcccaagagctaccgtcgagcccaacaaccaaatgcagccgagtccaacagagtcatcctcatacatcgttcactacttcactctcgtcgttctccccgatcggttccggcctcgcgttcgtcgtctccttccccctcgccggccgcgtgatctgcctgccgcgcggacgccgcgggcgcgacgatgcacgacccgtcggagatccgcaacctccccatcgacatcgcctttggccgcctccaggagtggctcgtggaccgcaagcgagtgccgcacgactggcggaagcgcctcgccggtattcgcgcccgcatcgcgcccgctttctccgccctgccgcggaacctgcacccctcactcctcgccctcgatccagaagaaattggctaccttgaagcaaagaagatatacagcattctcctagaatccaacaccgagagtcgcaacatatttggccgcctgacgggatccgcgggtgaatgggagtcaattattaaagcttacgagaaggaccatgtcttccttggagaggcagcgcagatcatggttcaaaatgttaactatgacataggaagcagatgcagaagactcagcagcagcttgcagagcttgatcgaagggaggctgacatcaagcgtcttgcggcattgtcagcgactagatatgtagaagcctgccaggaactcggtttacagggaataaatgtgagggaagaactaatagagtccgcaaaaacactcccatctacttttagcaaaatcttggaggtcctgaacagtgatcctgtctcaaatgctatggagtactacacaacttttgttaaggactgccatactgaggacaagagaaatagtgattctgtgctacccaaactgaaagacttgcaggccaatcctccttctttgcatgtctcagtatataatgagatcaagagttctcttggagaggcatcaaaatctcctgggtttactgtgatcgcgggagaaattgactcaaatgttgctgctgctgatgatattgattgggacatttctgtggatactaatgaaattgattgggacattggtgctgtggaacaacctggtgaagaatctggcgatggctttggatcgtatgaaattattgatgctaatatagagctggccggttctgaaaattataatgttggtgtctcagacaaatcaatgaacaaagaagatcttgcatcatctgagtctggtatttgctgggacatcactgctgatagttctgaagaaattgctagtatacagaatgcttcatctgtattagagcaatctcagtctcaaatgatagctgaagatagaagtttgttgctggaaaaagaatataggaataatattctggatgatttactcgaggggagatgaggaatgcagacacatcatctctacagcatcaagtgcaagctgtctcaccttttgttctccagcagcatgctcctgacagtttggagaacatgcttgtagagatctcgtcagcaatctcattgctaactaatcagaagactcttgaccttataatgatccttaactctaaaaggtttctggatagattagtttcaagcttagaagagaagaagcatcacgaagtaaaactacgggaaggtttaggtgatttatctgttaagcgtatggagctgcaaaacgcactgtcatcatcatggccaaagcaagaggcagcaattacaaaaacaagggaactaaagaagctgtgtgagtcgacactgtcgtctgtttttgatggaagaccagtgtatataattggagagatcaatactttactgagctcaagtgttagtcaattagctggatgactgtatttccgttcctggaccaaataagattgcaaaaatattatcttatggtatatacttctgaatatttatggtttcctggtcctgtttctttgctgcacggaagtgcggatgtatgggtttgaattaaagtgtcagcttcatcgt

SEQ ID NO: 79937 - DNA, 2968 bp, Zea Mays
tttctttttttttggtcatatatgaactgaattattagttccacacaatttcccagcttctggttcggcatgtagataaactgaattattaagcttcacacgattccccagcttctggtccggcatgtagatgaactgaattacagtacatgttattatggccactctacgcagatggaacccgaacgggaaaccagatctgtcagtactcagttgccgccagcgcagaggagggcgtcaaccttgtccttgaggtgcgcctcgtcgtccccgaggcgggcggcggcggcgccatcctcccagcggatcagcgttggcacgcccttgagcccgaacctggggtccaccctccacgggtgcgccgggtcgcgccaagtgggcttgtccccgacgtaggcgcgcaggagcaccgcgtccttgccctccagtgcctccagccgctcgtagatcaccggctccgccacgttgcagtctgccgcgccgcacaacgacgacggtgggtaagtacgggaccagagcgtcaccacgactagagctgaattcccagaatctgggcttaccggggcaccaggagagggaggagccaggcttgcggtcggccaggaagagcagcagcttcaccttgccgtcggaggcggcgtccggggaagcgaagaggcgatcgaagtgggcgtcgaagtcggaaagccccgcgtccaccttctccaccgtcatctcgccctcctctccccttccgctggccgagtaaagagagcgaattggagcagcaagaaagattgggagacagattggtggaagtggaatgaccgaatgacctaggaagcacacgagacggcgtgccgtgtgattcctttctgggatttctcgcagcctgccggtggtccccgcatctcaacccgcgtgttgcgtacgcgagccggaatcgggggaggtttgggtatggactgaagaggcccaagagctaccgtcgagcccaacaaccaaatgcagccgagtccaacagagtcatcctcatacatcgttcactacttcactctcgtcgttctccccgatcggttccggcctcgcgttcgtcgtctccttccccctcgccggccgcgtgatctgcctgccgcgcggacgccgcgggcgcgacgatgcacgacccgtcggagatccgcaacctccccatcgacatcgcctttggccgcctccaggagtggctcgtggaccgcaagcgagtgccgcacgactggcggaagcgcctcgccggtattcgcgcccgcatcgcgcccgctttctccgccctgccgcggaacctgcacccctcactcctcgccctcgatccagaaggtagtagagttgttcctccctctcagcgggtcatcagtaaattggctaccttgaagcaaagaagatatacagcattctcctagaatccaacaccgagagtcgcaacatatttggccgcctgacgggatccgcgggtgaatgggagtcaattattaaagcttacgagaaggaccatgtcttccttggagaggcagcgcagatcatggttcaaaatgttaactatgacattccatatcagaggaagcagatgcagaagactcagcagcagcttgcagagcttgatcgaagggaggctgacatcaagcgtcttgcggcattgtcagcgactagatatgtagaagcctgccaggaactcggtttacagggaataaatgtgagggaagaactaatagagtccgcaaaaacactcccatctacttttagcaaaatcttggaggtcctgaacagtgatcctgtctcaaatgctatggagtactacacaacttttgttaaggactgccatactgaggacaaggccaatcctccttctttgcatgtctcagtatataatgagatcaagagttctcttggagaggcatcaaaatctcctgggtttactgtgatcgcgggagaaattgactcaaatgttgctgctgctgatgatattgattgggacatttctgtggatactaatgaaattgattgggacattggtgctgtggaacaacctggtgaagaatctggcgatggctttggatcgtatgaaattattgatgctaatatagagctggccggttctgaaaattataatgttggtgtctcagacaaatcaatgaacaaagaagatcttgcatcatctgagtctggtatttgctgggacatcactgctgatagttctgaagaaattgctagtatacagaatgcttcatctgtattagagcaatctcagtctcaaatgatagctgaagatagaagtttgttgctggaaaaagaatataggaataatattctggatgatttactcgaggtaaaatcatttttgactcaacgcttaggggagatgaggaatgcagacacatcatctctacagcatcaagtgcaagctgtctcaccttttgttctccagcagcatgctcctgacagtttggagaacatgcttgtagagatctcgtcagcaatctcattgctaactaatcagaagactcttgaccttataatgatccttaactctaaaaggtttctggatagattagtttcaagcttagaagagaagaagcatcacgaagtaaaactacgggaaggtttaggtgatttatctgttaagcgtatggagctgcaaaacgcactgtcatcatcatggccaaagcaagaggcagcaattacaaaaacaagggaactaaagaagctgtgtgagtcgacactgtcgtctgtttttgatggaagaccagtgtatataattggagagatcaatactttactgagctcaagtgttagtcaattagctggatgactgtatttccgttcctggaccaaataagattgcaaaaatattatcttatggtatatacttctgaatatttatggtttcctggtcctgtttctttgctgcacggaagtgcggatgtatgggtttgaattaaagtgtcagcttcatcgt

SEQ ID NO: 79938 - DNA, 2877 bp, Zea Mays
tttctttttttttggtcatatatgaactgaattattagttccacacaatttcccagcttctggttcggcatgtagataaactgaattattaagcttcacacgattccccagcttctggtccggcatgtagatgaactgaattacagtacatgttattatggccactctacgcagatggaacccgaacgggaaaccagatctgtcagtactcagttgccgccagcgcagaggagggcgtcaaccttgtccttgaggtgcgcctcgtcgtccccgaggcgggcggcggcggcgccatcctcccagcggatcagcgttggcacgcccttgagcccgaacctggggtccaccctccacgggtgcgccgggtcgcgccaagtgggcttgtccccgacgtaggcgcgcaggagcaccgcgtccttgccctccagtgcctccagccgctcgtagatcaccggctccgccacgttgcagtctgccgcgccgcacaacgacgacggtgggtaagtacgggaccagagcgtcaccacgactagagctgaattcccagaatctgggcttaccggggcaccaggagagggaggagccaggcttgcggtcggccaggaagagcagcagcttcaccttgccgtcggaggcggcgtccggggaagcgaagaggcgatcgaagtgggcgtcgaagtcggaaagccccgcgtccaccttctccaccgtcatctcgccctcctctccccttccgctggccgagtaaagagagcgaattggagcagcaagaaagattgggagacagattggtggaagtggaatgaccgaatgacctaggaagcacacgagacggcgtgccgtgtgattcctttctgggatttctcgcagcctgccggtggtccccgcatctcaacccgcgtgttgcgtacgcgagccggaatcgggggaggtttgggtatggactgaagaggcccaagagctaccgtcgagcccaacaaccaaatgcagccgagtccaacagagtcatcctcatacatcgttcactacttcactctcgtcgttctccccgatcggttccggcctcgcgttcgtcgtctccttccccctcgccggccgcgtgatctgcctgccgcgcggacgccgcgggcgcgacgatgcacgacccgtcggagatccgcaacctccccatcgacatcgcctttggccgcctccaggagtggctcgtggaccgcaagcgagtgccgcacgactggcggaagcgcctcgccggtattcgcgcccgcatcgcgcccgctttctccgccctgccgcggaacctgcacccctcactcctcgccctcgatccagaagggtgaatgggagtcaattattaaagcttacgagaaggaccatgtcttccttggagaggcagcgcagatcatggttcaaaatgttaactatgacattccatatcagaggaagcagatgcagaagactcagcagcagcttgcagagcttgatcgaagggaggctgacatcaagcgtcttgcggcattgtcagcgactagatatgtagaagcctgccaggaactcggtttacagggaataaatgtgagggaagaactaatagagtccgcaaaaacactcccatctacttttagcaaaatcttggaggtcctgaacagtgatcctgtctcaaatgctatggagtactacacaacttttgttaaggactgccatactgaggacaagagaaatagtgattctgtgctacccaaactgaaagacttgcaggccaatcctccttctttgcatgtctcagtatataatgagatcaagagttctcttggagaggcatcaaaatctcctgggtttactgtgatcgcgggagaaattgactcaaatgttgctgctgctgatgatattgattgggacatttctgtggatactaatgaaattgattgggacattggtgctgtggaacaacctggtgaagaatctggcgatggctttggatcgtatgaaattattgatgctaatatagagctggccggttctgaaaattataatgttggtgtctcagacaaatcaatgaacaaagaagatcttgcatcatctgagtctggtatttgctgggacatcactgctgatagttctgaagaaattgctagtatacagaatgcttcatctgtattagagcaatctcagtctcaaatgatagctgaagatagaagtttgttgctggaaaaagaatataggaataatattctggatgatttactcgaggtaaaatcatttttgactcaacgcttaggggagatgaggaatgcagacacatcatctctacagcatcaagtgcaagctgtctcaccttttgttctccagcagcatgctcctgacagtttggagaacatgcttgtagagatctcgtcagcaatctcattgctaactaatcagaagactcttgaccttataatgatccttaactctaaaaggtttctggatagattagtttcaagcttagaagagaagaagcatcacgaagtaaaactacgggaaggtttaggtgatttatctgttaagcgtatggagctgcaaaacgcactgtcatcatcatggccaaagcaagaggcagcaattacaaaaacaagggaactaaagaagctgtgtgagtcgacactgtcgtctgtttttgatggaagaccagtgtatataattggagagatcaatactttactgagctcaagtgttagtcaattagctggatgactgtatttccgttcctggaccaaataagattgcaaaaatattatcttatggtatatacttctgaatatttatggtttcctggtcctgtttctttgctgcacggaagtgcggatgtatgggtttgaattaaagtgtcagcttcatcgt

SEQ ID NO: 79939 - DNA, 2951 bp, Zea Mays
tttctttttttttggtcatatatgaactgaattattagttccacacaatttcccagcttctggttcggcatgtagataaactgaattattaagcttcacacgattccccagcttctggtccggcatgtagatgaactgaattacagtacatgttattatggccactctacgcagatggaacccgaacgggaaaccagatctgtcagtactcagttgccgccagcgcagaggagggcgtcaaccttgtccttgaggtgcgcctcgtcgtccccgaggcgggcggcggcggcgccatcctcccagcggatcagcgttggcacgcccttgagcccgaacctggggtccaccctccacgggtgcgccgggtcgcgccaagtgggcttgtccccgacgtaggcgcgcaggagcaccgcgtccttgccctccagtgcctccagccgctcgtagatcaccggctccgccacgttgcagtctgccgcgccgcacaacgacgacggtgggtaagtacgggaccagagcgtcaccacgactagagctgaattcccagaatctgggcttaccggggcaccaggagagggaggagccaggcttgcggtcggccaggaagagcagcagcttcaccttgccgtcggaggcggcgtccggggaagcgaagaggcgatcgaagtgggcgtcgaagtcggaaagccccgcgtccaccttctccaccgtcatctcgccctcctctccccttccgctggccgagtaaagagagcgaattggagcagcaagaaagattgggagacagattggtggaagtggaatgaccgaatgacctaggaagcacacgagacggcgtgccgtgtgattcctttctgggatttctcgcagcctgccggtggtccccgcatctcaacccgcgtgttgcgtacgcgagccggaatcgggggaggtttgggtatggactgaagaggcccaagagctaccgtcgagcccaacaaccaaatgcagccgagtccaacagagtcatcctcatacatcgttcactacttcactctcgtcgttctccccgatcggttccggcctcgcgttcgtcgtctccttccccctcgccggccgcgtgatctgcctgccgcgcggacgccgcgggcgcgacgatgcacgacccgtcggagatccgcaacctccccatcgacatcgcctttggccgcctccaggagtggctcgtggaccgcaagcgagtgccgcacgactggcggaagcgcctcgccggtattcgcgcccgcatcgcgcccgctttctccgccctgccgcggaacctgcacccctcactcctcgccctcgatccagaagaaattggctaccttgaagcaaagaagatatacagcattctcctagaatccaacaccgagagtcgcaacatatttggccgcctgacgggatccgcgggtgaatgggagtcaattattaaagcttacgagaaggaccatgtcttccttggagaggcagcgcagatcatggttcaaaatgttaactatgacattccatatcagaggaagcagatgcagaagactcagcagcagcttgcagagcttgatcgaagggaggctgacatcaagcgtcttgcggcattgtcagcgactagatatgtagaagcctgccaggaactcggtttacagggaataaatgtgagggaagaactaatagagtccgcaaaaacactcccatctacttttagcaaaatcttggaggtcctgaacagtgatcctgtctcaaatgctatggagtactacacaacttttgttaaggactgccatactgaggacaagagaaatagtgattctgtgctacccaaactgaaagacttgcaggccaatcctccttctttgcatgtctcagtatataatgagatcaagagttctcttggagaggcatcaaaatctcctgggtttactgtgatcgcgggagaaattgactcaaatgttgctgctgctgatgatattgattgggacatttctgtggatactaatgaaattgattgggacattggtgctgtggaacaacctggtgaagaatctggcgatggctttggatcgtatgaaattattgatgctaatatagagctggccggttctgaaaattataatgttggtgtctcagacaaatcaatgaacaaagaagatcttgcatcatctgagtctggtatttgctgggacatcactgctgatagttctgaagaaattgctagtatacagaatgcttcatctgtattagagcaatctcagtctcaaatgatagctgaagatagaagtttgttgctggaaaaagaatataggaataatattctggatgatttactcgaggtaaaatcatttttgactcaacgcttaggggagatgaggaatgcagacacatcatctctacagcatcaagtgcaagctgtctcaccttttgttctccagcagcatgctcctgacagtttggagaacatgcttgtagagatctcgtcagcaatctcattgctaactaatcagaagactcttgaccttataatgatccttaactctaaaaggtttctggatagattagtttcaagcttagaagagaagaagcatcacgaagtaaaactacgggaaggtttaggtgatttatctgttaagcgtatggagctgcaaaacgcactgtcatcatcatggccaaagcaagaggcagcaattacaaaaacaagggaactaaagaagctgtgtgagtcgacactgtcgtctgtttttgatggaagaccagtgtatataattggagagatcaatactttactgagctcaagtgttagtcaattagctggatgactgtatttccgttcctggaccaaataagattgcaaaaatattatcttatggcaggaagatatctcagttgttgcaagcaaagctttgcttggtgcggctggactgattatcaaaagcaaagatggg

SEQ ID NO: 79940 - DNA, 2829 bp, Zea Mays
tttctttttttttggtcatatatgaactgaattattagttccacacaatttcccagcttctggttcggcatgtagataaactgaattattaagcttcacacgattccccagcttctggtccggcatgtagatgaactgaattacagtacatgttattatggccactctacgcagatggaacccgaacgggaaaccagatctgtcagtactcagttgccgccagcgcagaggagggcgtcaaccttgtccttgaggtgcgcctcgtcgtccccgaggcgggcggcggcggcgccatcctcccagcggatcagcgttggcacgcccttgagcccgaacctggggtccaccctccacgggtgcgccgggtcgcgccaagtgggcttgtccccgacgtaggcgcgcaggagcaccgcgtccttgccctccagtgcctccagccgctcgtagatcaccggctccgccacgttgcagtctgccgcgccgcacaacgacgacggtgggtaagtacgggaccagagcgtcaccacgactagagctgaattcccagaatctgggcttaccggggcaccaggagagggaggagccaggcttgcggtcggccaggaagagcagcagcttcaccttgccgtcggaggcggcgtccggggaagcgaagaggcgatcgaagtgggcgtcgaagtcggaaagccccgcgtccaccttctccaccgtcatctcgccctcctctccccttccgctggccgagtaaagagagcgaattggagcagcaagaaagattgggagacagattggtggaagtggaatgaccgaatgacctaggaagcacacgagacggcgtgccgtgtgattcctttctgggatttctcgcagcctgccggtggtccccgcatctcaacccgcgtgttgcgtacgcgagccggaatcgggggaggtttgggtatggactgaagaggcccaagagctaccgtcgagcccaacaaccaaatgcagccgagtccaacagagtcatcctcatacatcgttcactacttcactctcgtcgttctccccgatcggttccggcctcgcgttcgtcgtctccttccccctcgccggccgcgtgatctgcctgccgcgcggacgccgcgggcgcgacgatgcacgacccgtcggagatccgcaacctccccatcgacatcgcctttggccgcctccaggagtggctcgtggaccgcaagcgagtgccgcacgactggcggaagcgcctcgccggtattcgcgcccgcatcgcgcccgctttctccgccctgccgcggaacctgcacccctcactcctcgccctcgatccagaagaaattggctaccttgaagcaaagaagatatacagcattctcctagaatccaacaccgagagtcgcaacatatttggccgcctgacgggatccgcgggtgaatgggagtcaattattaaagcttacgagaaggaccatgtcttccttggagaggcagcgcagatcatggttcaaaatgttaactatgacattccatatcagaggaagcagatgcagaagactcagcagcagcttgcagagcttgatcgaagggaggctgacatcaagcgtcttgcggcattgtcagcgactagatatgtagaagcctgccaggaactcggtttacagggaataaatgtgagggaagaactaatagagtccgcaaaaacactcccatctacttttagcaaaatcttggaggtcctgaacagtgatcctgtctcaaatgctatggagtactacacaacttttgttaaggactgccatactgaggacaagagaaatagtgattctgtgctacccaaactgaaagacttgcaggccaatcctccttctttgcatgtctcagtatataatgagatcaagagttctcttggagaggcatcaaaatctcctgggtttactgtgatcgcgggagaaattgactcaaatgttgctgctgctgatgatattgattgggacatttctgtggatactaatgaaattgattgggacattggtgctgtggaacaacctggtgaagaatctggcgatggctttggatcgtatgaaattattgatgctaatatagagctggccggttctgaaaattataatgttggtgtctcagacaaatcaatgaacaaagaagatcttgcatcatctgagtctggtatttgctgggacatcactgctgatagttctgaagaaattgctagtatacagaatgcttcatctgtattagagcaatctcagtctcaaatgatagctgaagatagaagtttgttgctggaaaaagaatataggaataatattctggatgatttactcgaggtaaaatcatttttgactcaacgcttaggggagatgaggaatgcagacacatcatctctacagcatcaagtgcaagctgtctcaccttttgttctccagcagcatgctcctgacagtttggagaacatgcttgtagagatctcgtcagcaatctcattgctaactaatcagaagactcttgaccttataatgatccttaactctaaaaggtttctggatagattagtttcaagcttagaagagaagaagcatcacgaagtaaaactacgggaaggtttaggtgatttatctgttaagcgtatggagctgcaaaacgcactgtcatcatcatggccaaagcaagcaggaagatatctcagttgttgcaagcaaagctttgcttggtgcggctggactgattatcaaaagcaaagatgggggcagcctagttggaccaacaaaggggtccgaagatgagagcaaagatctggatcttgaggaagacaac

SEQ ID NO: 79941 - DNA, 3161 bp, Zea Mays
tttctttttttttggtcatatatgaactgaattattagttccacacaatttcccagcttctggttcggcatgtagataaactgaattattaagcttcacacgattccccagcttctggtccggcatgtagatgaactgaattacagtacatgttattatggccactctacgcagatggaacccgaacgggaaaccagatctgtcagtactcagttgccgccagcgcagaggagggcgtcaaccttgtccttgaggtgcgcctcgtcgtccccgaggcgggcggcggcggcgccatcctcccagcggatcagcgttggcacgcccttgagcccgaacctggggtccaccctccacgggtgcgccgggtcgcgccaagtgggcttgtccccgacgtaggcgcgcaggagcaccgcgtccttgccctccagtgcctccagccgctcgtagatcaccggctccgccacgttgcagtctgccgcgccgcacaacgacgacggtgggtaagtacgggaccagagcgtcaccacgactagagctgaattcccagaatctgggcttaccggggcaccaggagagggaggagccaggcttgcggtcggccaggaagagcagcagcttcaccttgccgtcggaggcggcgtccggggaagcgaagaggcgatcgaagtgggcgtcgaagtcggaaagccccgcgtccaccttctccaccgtcatctcgccctcctctccccttccgctggccgagtaaagagagcgaattggagcagcaagaaagattgggagacagattggtggaagtggaatgaccgaatgacctaggaagcacacgagacggcgtgccgtgtgattcctttctgggatttctcgcagcctgccggtggtccccgcatctcaacccgcgtgttgcgtacgcgagccggaatcgggggaggtttgggtatggactgaagaggcccaagagctaccgtcgagcccaacaaccaaatgcagccgagtccaacagagtcatcctcatacatcgttcactacttcactctcgtcgttctccccgatcggttccggcctcgcgttcgtcgtctccttccccctcgccggccgcgtgatctgcctgccgcgcggacgccgcgggcgcgacgatgcacgacccgtcggagatccgcaacctccccatcgacatcgcctttggccgcctccaggagtggctcgtggaccgcaagcgagtgccgcacgactggcggaagcgcctcgccggtattcgcgcccgcatcgcgcccgctttctccgccctgccgcggaacctgcacccctcactcctcgccctcgatccagaagaaattggctaccttgaagcaaagaagatatacagcattctcctagaatccaacaccgagagtcgcaacatatttggccgcctgacgggatccgcgggtgaatgggagtcaattattaaagcttacgagaaggaccatgtcttccttggagaggcagcgcagatcatggttcaaaatgttaactatgacattccatatcagaggaagcagatgcagaagactcagcagcagcttgcagagcttgatcgaagggaggctgacatcaagcgtcttgcggcattgtcagcgactagatatgtagaagcctgccaggaactcggtttacagggaataaatgtgagggaagaactaatagagtccgcaaaaacactcccatctacttttagcaaaatcttggaggtcctgaacagtgatcctgtctcaaatgctatggagtactacacaacttttgttaaggactgccatactgaggacaagagaaatagtgattctgtgctacccaaactgaaagacttgcaggccaatcctccttctttgcatgtctcagtatataatgagatcaagagttctcttggagaggcatcaaaatctcctgggtttactgtgatcgcgggagaaattgactcaaatgttgctgctgctgatgatattgattgggacatttctgtggatactaatgaaattgattgggacattggtgctgtggaacaacctggtgaagaatctggcgatggctttggatcgtatgaaattattgatgctaatatagagctggccggttctgaaaattataatgttggtgtctcagacaaatcaatgaacaaagaagatcttgcatcatctgagtctggtatttgctgggacatcactgctgatagttctgaagaaattgctagtatacagaatgcttcatctgtattagagcaatctcagtctcaaatgatagctgaagatagaagtttgttgctggaaaaagaatataggaataatattctggatgatttactcgaggtaaaatcatttttgactcaacgcttaggggagatgaggaatgcagacacatcatctctacagcatcaagtgcaagctgtctcaccttttgttctccagcagcatgctcctgacagtttggagaacatgcttgtagagatctcgtcagcaatctcattgctaactaatcagaagactcttgaccttataatgatccttaactctaaaaggtttctggatagattagtttcaagcttagaagagaagaagcatcacgaagtaaaactacgggaaggtttaggtgatttatctgttaagcgtatggagctgcaaaacgcactgtcatcatcatggccaaagcaagaggcagcaattacaaaaacaagggaactaaagaagctgtgtgagtcgacactgtcgtctgtttttgatggaagaccagtgtatataattggagagatcaatactttactgagctcaagtgttagtcaattagctggatgactgtatttccgttcctggaccaaataagattgcaaaaatattatcttatggtatatacttctgaatatttatggtttcctggtcctgtttctttgctgcacggaagtgcggatgtatgggtttgaattaaagtgtcagcttcatcgtagggaccggtcatattatagcactctcaggacaaagatattgaggcaggaagatatctcagttgttgcaagcaaagctttgcttggtgcggctggactgattatcaaaagcaaagatgggggcagcctagttggaccaacaaaggggtccgaagatgagagcaaagatctggatcttgaggaagacaac

SEQ ID NO: 79942 - DNA, 1483 bp, Zea Mays
caagcacttaggggttagaaatattttgacgcatagggctctcattgttaattatggtgctctagaaatattagattgtttttgttttcaatatatgtagaatgcaagaccactctaaattatcgtggtgctaattttccttggatcactatctatccttctgtacacactattgccttactaaagttagttatttcttctttgtctacaggaatgttatagcttaatgccctaatctttatatgcctcttcttatatctgcacttccatgggcactgggcgacactaaattcacaagataccccctccacctcaagatattagatcccttgattatcatgaaagatgctggcattattcattgtgatctaaatccaggaaaaaattcttatagctccaacatgagttaattcttctcgatgccaatgttggcatcttgtgccctgatgactaagtggtgacttttgcagtgtagaaacagcagctagagtgaaagtaattgattttggatcagcacttccatggagggtaaacccatttatttatattcaagttttgtttgaatccacctagcagtctaaatttaatgctatagtagtattttgtggatttcaagtcaagcttctgccctttctttttttagatccgttattataggtctccaggagtacttgtttatccgtatcatgtgtgtcatctctacaatcagacactatctataattacacaagcatcacatgatgcttaagttgttatgcttttatgcatttcagaggtatttactagaccgatttttttttatcttttttgttccataatgtgcattatttttcagttattcccatgttaaaaataaaatatttgtccctgttctttgtatgttctgtaggttcttgatggtaagccatacaacaataagtgtggtgtttacagttttggcatttgtttatgggaaatctatttgtttatgggaaatctattgttaaattacagttaatgggctgaagcgcgaggcggcgtcccgcggcggtgccacggggcacggcaaaccgcggctgctcatcatctcccggcgtggctcacgacggttcctgaacgagcgggagatggagcgtgccgcgggcgacgccgggtttgagatgtgtggtaatggagtccgttgcttcggtcggtttatagccgagattgaaaatctgtaagggacagctaggtaatgcattgcggcttcacagtaaaacattgtatttctacagacacttccagtaactgaactctattttttagttgttcccataatagtcagccacctggtatactgttattgtctttcagatttcagacatcaaccccttgcagctatctgaaacttagtgtttggccggggcgagggagattgggaaggaagtggaggagagcatgctcccaacaccgctagagagttttcagttttttctcttatatcacgttccttggacttcgtgtt

SEQ ID NO: 79943 - DNA, 381 bp, Zea Mays
caacgacctcctcggacgccatctgctacgcataagtagccttcacggacccctatcgtgaaagccctagcctagattttgcgccgccgccgcagagtgggtgaggagggagatgcaccgcgagcccttcggcgaatctttcccgctggtcgccgccgaccgatatcaagcgtgggcggtcacatcggggtgtggtggaagtgttcgcaggggcagaagggaggttggacccgtggcgatcgcgggattgctcatcggagtcgcgtttccgctgagcttgcgtcccgccgtggccgtaaccaccagagcaacgatccaagcaatgaggtcacgaggatctgaagaatcatcctggtacctggaatctcaagtgacaggcaa

SEQ ID NO: 79944 - DNA, 478 bp, Zea Mays
gcattacatgaacggagactaaagtgcattgttaggaaagattcttttaccatccaacactttagttacagtgaaataaaaaatagatcctcaacatctccatcataatgttatttggtggaaaggtagcacacattattggtataaatcggtaatatcataaaaaatactatcttattatgttaatgttagtagttactgcataaaatcgaatgttactcgccagagctgtgtctaaaccaaccagttgtgctactggccagtctgaaagccacgggagccggcgtgaacctcaaagctgcctcgatggtgtgtcggtgtacctgtttgacccctagtggaaccctagggtagaggagcaggctatggatagaatgcactaatgcagcagataggacataagaaagaggtgaaggtgaggataaggctcactgtgaagggcagcaccgagtagggtattgattagggctggacattc

SEQ ID NO: 79945 - DNA, 2486 bp, Zea Mays
gggatctccagccgcccagccgctctccatcttccttctcggcaatcccctctgctccgtcttcctctgcgcacgtgtctgtgttttgcgccgcgtcctcagctctaggccatggcgcactcccgctccagcttgcctctgctcggagctccttccttcccctcccatggcgtcctggcccctgctcggattggtcaagctcgcgtgcgattcccatgatgcgcgctatgcttcttggtcgccatggcgctcgcccttgcgagcgagctctatggtctccctgctccctcgcggcgtcctgctggccggcgcttggactgcgcccaagctcctccatgtcgcgcccttttctctctctctcgagtctctgtaccgcgccctagcgtctgcgcccgacgatgctcccagctcaagctccttcctgctccgcgccatggcggctcctagtccctcgttgctcctccggctgagttctctgttttttcttctcccagttttctgcgctcgccgagcaacctccatggccggatctccctgctcctcgctgctcgccctaagctctcagccatggccgtcgagtccccctgttcccatggccgatctcggttctgtttgtcacggcagccgactctactgcttgcttccctgcgcgtcgtgctcctctgctctctgtctgcgcgcgtgctgtgctcgacgtcttcccatggcgctcgactgttggccgtgccgtggagcctgcgcgctcagtcctgcctatctcgtagtgtttggattcagcgcagctcgtgtttgccagcgtgttctctcggctcgcttggcccgaattcctatcgcgtcgtcgatcttgccaagtatcgtcgttcgtcgtcgcgctgtgcgtgcaacagccctgagtctatgtcgccccggtcttgttgtcgacaccgctcgccgtagctcagcttgctagttcgtcgtgtcgcgtcgtgtgccgatattctctcccggcaggcctcgccgtcgacgatgttcaagtgattgtttggctcctcgcatcccgcctattcaataaaacacccaaatccatagactgtcgagacactgctgccatacgcagctgtctccgtcacttgcgtcagctcgccagacctacagctccatatatgtcactctcccgtatcgtcgtcgagcccggcgaacctcgttcttctctgctcgatctcgtcgaaccacgaatcccggactttagacaaaaataagcgaggtccttatgcatcgcttatcaagtactcggtcgaagacttcaatcgaagatcgtcgtcatttcgtgcgtcatcgaggaatcccaaggatcggatgaagacgaagctagcagcgatattccccaagcgcttgacaaattgcctgaatcggaaaatcgctaccgatctcgtggattcatgtcagctgtggaaacggtaagctgataaattattcagaatagttcgatcggtgcatttaatgtgctagtgcgatgctcatttaggtgctcaataaattgcgcaagtcatgaaactctcgtcgacttcgcagttcttgcgattatcgagccagattcagttatagtgagttatttcactatttcggtcaattagcggaattagtgtaccgagtagaatatgagtaggcctatgtgatgataaaatattttaatcacttctatatatatatatatatatatatatatatatatatatttacgataaagaaatgtttgagtaattgttgacatgaaaaacatgtgaggagtaaaataaaattaaaatagttctgtgggagcgatgtagtataatttattaaacgagggataagtttagaatttaattaattagctgataagttgtgttaggctaatcatattaaatgtgtctaatttgttgtttcatgatgtttgcgataggttcgagaagtgtaattattgtgcttaatcatacgtcgataactagtattttcgtataaaattgttcaacgcctcgccgctaggtgtttaattcgctatcgcaagcactatttaggtttgcgatattcctatctatatgcattcatgtgcataacgcatttcattcaggtacgtgaattaaccacgtgatgtggagaaccataactgagtcgaccacaagctggtgctgatgaacggaactgaaggtggacagatgaaacaagtatcagaacaaaagatggtcgtcaagtggacgtcacctaacaaacactaacgtagtgtttattccaggcaagccccggtgcgctgtggcagaacctcccaagttattgggcccacatgtacctgtccttgtctcaaagacctcagactgttatgcatgtgcaccagataacttaacaggatccgtccgattgccccaaggacatcggataaaccacttacaaccagaaccgcggggataagtaaacacaaatcacacaccaacattttttcagtggaaatctttttactaaattttacatgttac

SEQ ID NO: 79946 - DNA, 2921 bp, Zea Mays
aagcactagattcaccaaaacaaagtggcaggtctagcctagctattaaacgacaaagctcaattctagcaacagaaggggaatactcccagtgtttaatagatccatctgcattatatttaagcaaagattgagtttttctagatctatccttttctttcttagcagggcaaagatccaggtgtcggatcaaatggccagttccagataaagatttagcagacatgctattcttgtagtgaagacaaattgtagatattcttacctccttaccattttgcatcgcagttacctcctcaaagtgtagccataccttagaggccggatctctcctcctagaacgtttaccaggcatagggacaaaggtgctcgcgtcggtcgtcgggcttgtggagcccgtgtgcgtgtctgttcccgtcgtccccgggcccgtttgtgtaccgacgccgtccagatcgatggcaccagctgaggtggtaccaaggaggaggcaccgggcatcgtctgccttattctatgcttcaagccgccgctcctcgaccacggcatcgagactgagctcatcgtctgccgagtccatggacatggccaccgcctcggtaggcttctctccggctcctcacggcgcgcgacgcacacacacacgacgcacacctcaacaaatcgaggtttagggttagggttacagtgaccaagcagagcgagaaaggaagaggagaggactgagagaccgagatttagggttacctgcaacaccggagcaccggatccaccaaccagagggcagacgacagaggcataggagcgagcttggcgcagatcgaggtttagggatagggttacagtgactaggcgaagcgagaaaggaagatgagaggacagagcgagagaggaagatgaagattagcgccggccgaagttcttctccaccggcgccgcccacgggcatggtaggcgacaacacgcgctaacggcggcacagacaatcgccaagccgagacgcctgcgagagaggaaaaggcaggtgctaggtttctgaaatgtgttgcgcgatgtccatgacggcctcatccataggttctcccctttttgtcgggccgagaccgattcaatcgactaatcgggctatgccgatgccgacaccgcgtgccaggtcgccagtcaagcacggcacgggcacgacagcctatctgccagccgcccagccgcggccgtgttagggctgcggcccggtttggacatgtataggtgctggcgccttgcgtctcatcatccgcttctgtcagttccttttctaaaagaaaaaaatacagtcgcatctcgcctccagcagggtgagttcgcctcggcagggtgtggcataccatggagagctcgtcgccgtcagtgccgttcccgctgctgcaggcgccggtcgagagcacctaccgcgcctgcaccatcccctaccgtttcccctccgacaacccgcgcaaggccacccctgtcgagatccaatggattgacctctttctcaactctgtcccgtccttcaaacagcgggcggagaacgaccccaccgtacccgatgcgcccgcgaaagcggagaagttcgcgcagaggtacacgtcaatgcttgaagagttgaagaagaatccggagagccatggaggaccaccagattgcatagcttcgtgagctagtactcagagagctgggatttagggatatcttcaagaaggtcaaggatgaggagaatgccaaggctatgtcactttttgagggagttattaagcggaatgacgaaattgaggatgacggcaaaagaattgagaacttggtccgtggaattttagctggaaacatttttgatctaggatctgcacagcttgcagaagtttttgctaaagatggcatgtcatttttggcaagttgccagaatcttgtatctcgaccatgggttattgatgaccttgatgcttttaagagtaaatggaccaagaaatcatgggaaaaggcagttatttttgttgataactctggtgctgatattatcttgggtatattaccatttgcgagggagttgctccgacgtggcacaaaggtgatacttgctgctaatgatatgccttcgatcaacgatgtcacgtatccagagcttgttgagattataaacaagctcaaggatgcagatggaaagctatcaaatgtggacgcatctggcctccttgttgccaactctggcaacgatctgcctgtaattgatttgtctagtgtatcaccagagcttgcctttatggcaaatgatgctgacctggtggtgctcgaaggcatgggaagagcaattgaaactaacctatatgcgcagatgaaatgtgactcgatcaagattggaatggttaagcatcctgaggtcgcccaatttttaggaggaagactttatgattgcgtcttcaagttcaatgaggcctgaactacgagatacatttgataacacaataccggccgcactagtggtggcttagttctccccaagatcagcttgttaggtgttgcactgaacataattttgttagtatcagcaataatttcaatcaaaataagctacgtatatgtggtggtttatggaagtgtcaggaagggtggttatgaggctgttggattttgtacgaaatctgatgcaccagttcccatttaacgcatcggtagccaagccacgcccgtctgaacttgagctcatgtccgtttgtgcttatggtccgtaataattggttagctaccactggcttgtaaacatcacacttagacgctctggtggcccctttgtgatggtattcataaaagtgtttgtcccgaaactaaaggggtgcgggtgattatggggtgggaaatgtctatggcaatcgaaggaagaaaactctccaaactagaggaaaaaataa

SEQ ID NO: 79947 - DNA, 1857 bp, Zea Mays
aagaggagaggactgagagaccgagatttagggttacctgcaacaccggagcaccggatccaccaaccagagggcagacgacagaggcataggagcgagcttggcgcagatcgaggtttagggatagggttacagtgactaggcgaagcgagaaaggaagatgagaggacagagcgagagaggaagatgaagattagcgccggccgaagttcttctccaccggcgccgcccacgggcatggtaggcgacaacacgcgctaacggcggcacagacaatcgccaagccgagacgcctggtgtggcataccatggagagctcgtcgccgtcagtgccgttcccgctgctgcaggcgccggtcgagagcacctaccgcgcctgcaccatcccctaccgtttcccctccgacaacccgcgcaaggccacccctgtcgagatccaatggattgacctctttctcaactctgtcccgtccttcaaacagcgggcggagaacgaccccaccgtacccgatgcgcccgcgaaagcggagaagttcgcgcagaggtacacgtcaatgcttgaagagttgaagaagaatccggagagccatggaggaccaccagattgcatagcttcgtgagctagtactcagagagctgggatttagggatatcttcaagaaggtcaaggatgaggagaatgccaaggctatgtcactttttgagggagttattaagcggaatgacgaaattgaggatgacggcaaaagaattgagaacttggtccgtggaattttagctggaaacatttttgatctaggatctgcacagaagtttttgctaaagatggcatgtcatttttggcaagttgccagaatcttgtatctcgaccatgggttattgatgaccttgatgcttttaagagtaaatggaccaagaaatcatgggaaaaggcagttatttttgttgataactctggtgctgatattatcttgggtatattaccatttgcgagggagttgctccgacgtggcacaaaggtgatacttgctgctaatgatatgccttcgatcaacgatgtcacgtatccagagcttgttgagattataaacaagctcaaggatgcagatggaaagctatcaaatgtggacgcatctggcctccttgttgccaactctggcaacgatctgcctgtaattgatttgtctagtgtatcaccagagcttgcctttatggcaaatgatgctgacctggtggtgctcgaaggcatgggaagagcaattgaaactaacctatatgcgcagatgaaatgtgactcgatcaagattggaatggttaagcatcctgaggtcgcccaatttttaggaggaagactttatgattgcgtcttcaagttcaatgaggcctgaactacgagatacatttgataacacaataccggccgcactagtggtggcttagttctccccaagatcagcttgttaggtgttgcactgaacataattttgttagtatcagcaataatttcaatcaaaataagctacgtatatgtggtggtttatggaagtgtcaggaagggtggttatgaggctgttggattttgtacgaaatctgatgcaccagttcccatttaacgcatcggtagccaagccacgcccgtctgaacttgagctcatgtccgtttgtgcttatggtccgtaataattggttagctaccactggcttgtaaacatcacacttagacgctctggtggcccctttgtgatggtattcataaaagtgtttgtcccgaaactaaaggggtgcgggtgattatggggtgggaaatgtctatggcaatcgaaggaagaaaactctccaaactagaggaaaaaataa

SEQ ID NO: 79948 - DNA, 1344 bp, Zea Mays
cgcgtctgcagctttcattattaggtacacgtcaatgcttgaagagttgaagaagaatccggagagccatggaggaccaccagattgcatagcttcgtgagctagtactcagagagctgggatttagggatatcttcaagaaggtcaaggatgaggagaatgccaaggctatgtcactttttgagggagttattaagcggaatgacgaaattgaggatgacggcaaaagaattgagaacttggtccgtggaattttagctggaaacatttttgatctaggatctgcacagcttgcagaagtttttgctaaagatggcatgtcatttttggcaagttgccagaatcttgtatctcgaccatgggttattgatgaccttgatgcttttaagagtaaatggaccaagaaatcatgggaaaaggcagttatttttgttgataactctggtgctgatattatcttgggtatattaccatttgcgagggagttgctccgacgtggcacaaaggtgatacttgctgctaatgatatgccttcgatcaacgatgtcacgtatccagagcttgttgagattataaacaagctcaaggatgcagatggaaagctatcaaatgtggacgcatctggcctccttgttgccaactctggcaacgatctgcctgtaattgatttgtctagtgtatcaccagagcttgcctttatggcaaatgatgctgacctggtggtgctcgaaggcatgggaagagcaattgaaactaacctatatgcgcagatgaaatgtgactcgatcaagattggaatggttaagcatcctgaggtcgcccaatttttaggaggaagactttatgattgcgtcttcaagttcaatgaggcctgaactacgagatacatttgataacacaataccggccgcactagtggtggcttagttctccccaagatcagcttgttaggtgttgcactgaacataattttgttagtatcagcaataatttcaatcaaaataagctacgtatatgtggtggtttatggaagtgtcaggaagggtggttatgaggctgttggattttgtacgaaatctgatgcaccagttcccatttaacgcatcggtagccaagccacgcccgtctgaacttgagctcatgtccgtttgtgcttatggtccgtaataattggttagctaccactggcttgtaaacatcacacttagacgctctggtggcccctttgtgatggtattcataaaagtgtttgtcccgaaactaaaggggtgcgggtgattatggggtgggaaatgtctatggcaatcgaaggaagaaaactctccaaactagaggaaaaaataa

SEQ ID NO: 79949 - DNA, 1390 bp, Zea Mays
gaacagttgatggcgtacaaaaagattgctaagatgagaatgcactgtgctctaataatgtacacgtcaatgcttgaagagttgaagaagaatccggagagccatggaggaccaccagattgcatacttctttgtaggcttcgtgagctagtactcagagagctgggatttagggatatcttcaagaaggtcaaggatgaggagaatgccaaggctatgtcactttttgagggagttattaagcggaatgacgaaattgaggatgacggcaaaagaattgagaacttggtccgtggaattttagctggaaacatttttgatctaggatctgcacagcttgcagaagtttttgctaaagatggcatgtcatttttggcaagttgccagaatcttgtatctcgaccatgggttattgatgaccttgatgcttttaagagtaaatggaccaagaaatcatgggaaaaggcagttatttttgttgataactctggtgctgatattatcttgggtatattaccatttgcgagggagttgctccgacgtggcacaaaggtgatacttgctgctaatgatatgccttcgatcaacgatgtcacgtatccagagcttgttgagattataaacaagctcaaggatgcagatggaaagctatcaaatgtggacgcatctggcctccttgttgccaactctggcaacgatctgcctgtaattgatttgtctagtgtatcaccagagcttgcctttatggcaaatgatgctgacctggtggtgctcgaaggcatgggaagagcaattgaaactaacctatatgcgcagatgaaatgtgactcgatcaagattggaatggttaagcatcctgaggtcgcccaatttttaggaggaagactttatgattgcgtcttcaagttcaatgaggcctgaactacgagatacatttgataacacaataccggccgcactagtggtggcttagttctccccaagatcagcttgttaggtgttgcactgaacataattttgttagtatcagcaataatttcaatcaaaataagctacgtatatgtggtggtttatggaagtgtcaggaagggtggttatgaggctgttggattttgtacgaaatctgatgcaccagttcccatttaacgcatcggtagccaagccacgcccgtctgaacttgagctcatgtccgtttgtgcttatggtccgtaataattggttagctaccactggcttgtaaacatcacacttagacgctctggtggcccctttgtgatggtattcataaaagtgtttgtcccgaaactaaaggggtgcgggtgattatggggtgggaaatgtctatggcaatcgaaggaagaaaactctccaaactagaggaaaaaataa

SEQ ID NO: 79950 - DNA, 1323 bp, Zea Mays
tgagaatgcactgtgctctaataatgtacacgtcaatgcttgaagagttgaagaagaatccggagagccatggaggaccaccagattgcatacttctttgtaggcttcgtgagctagtactcagagagctgggatttagggatatcttcaagaaggtcaaggatgaggagaatgccaaggctatgtcactttttgagggagttattaagcggaatgacgaaattgaggatgacggcaaaagaattgagaacttggtccgtggaattttagctggaaacatttttgatctaggatctgcacagcttgcagaagtttttgctaaagatggcatgtcatttttggcaagttgccagaatcttgtatctcgaccatgggttattgatgaccttgatgcttttaagagtaaatggaccaagaaatcatgggaaaaggcagttatttttgttgataactctggtgctgatattatcttgggtatattaccatttgcgagggagttgctccgacgtggcacaaaggtgatacttgctgctaatgatatgccttcgatcaacgatgtcacgtatccagagcttgttgagattataaacaagctcaaggatgcagatggaaagctatcaaatgtggacgcatctggcctccttgttgccaactctggcaacgatctgcctgtaattgatttgtctagtgtatcaccagagcttgcctttatggcaaatgatgctgacctggtggtgctcgaaggcatgatgaaatgtgactcgatcaagattggaatggttaagcatcctgaggtcgcccaatttttaggaggaagactttatgattgcgtcttcaagttcaatgaggcctgaactacgagatacatttgataacacaataccggccgcactagtggtggcttagttctccccaagatcagcttgttaggtgttgcactgaacataattttgttagtatcagcaataatttcaatcaaaataagctacgtatatgtggtggtttatggaagtgtcaggaagggtggttatgaggctgttggattttgtacgaaatctgatgcaccagttcccatttaacgcatcggtagccaagccacgcccgtctgaacttgagctcatgtccgtttgtgcttatggtccgtaataattggttagctaccactggcttgtaaacatcacacttagacgctctggtggcccctttgtgatggtattcataaaagtgtttgtcccgaaactaaaggggtgcgggtgattatggggtgggaaatgtctatggcaatcgaaggaagaaaactctccaaactagaggaaaaaataa

SEQ ID NO: 79951 - DNA, 1342 bp, Zea Mays
gaatgcactgtgctctaataatgtacacgtcaatgcttgaagagttgaagaagaatccggagagccatggaggaccaccagattgcatagcttcgtgagctagtactcagagagctgggatttagggatatcttcaagaaggtcaaggatgaggagaatgccaaggctatgtcactttttgagggagttattaagcggaatgacgaaattgaggatgacggcaaaagaattgagaacttggtccgtggaattttagctggaaacatttttgatctaggatctgcacagcttgcagaagtttttgctaaagatggcatgtcatttttggcaagttgccagaatcttgtatctcgaccatgggttattgatgaccttgatgcttttaagagtaaatggaccaagaaatcatgggaaaaggcagttatttttgttgataactctggtgctgatattatcttgggtatattaccatttgcgagggagttgctccgacgtggcacaaaggtgatacttgctgctaatgatatgccttcgatcaacgatgtcacgtatccagagcttgttgagattataaacaagctcaaggatgcagatggaaagctatcaaatgtggacgcatctggcctccttgttgccaactctggcaacgatctgcctgtaattgatttgtctagtgtatcaccagagcttgcctttatggcaaatgatgctgacctggtggtgctcgaaggcatgggaagagcaattgaaactaacctatatgcgcagatgaaatgtgactcgatcaagattggaatggttaagcatcctgaggtcgcccaatttttaggaggaagactttatgattgcgtcttcaagttcaatgaggcctgaactacgagatacatttgataacacaataccggccgcactagtggtggcttagttctccccaagatcagcttgttaggtgttgcactgaacataattttgttagtatcagcaataatttcaatcaaaataagctacgtatatgtggtggtttatggaagtgtcaggaagggtggttatgaggctgttggattttgtacgaaatctgatgcaccagttcccatttaacgcatcggtagccaagccacgcccgtctgaacttgagctcatgtccgtttgtgcttatggtccgtaataattggttagctaccactggcttgtaaacatcacacttagacgctctggtggcccctttgtgatggtattcataaaagtgtttgtcccgaaactaaaggggtgcgggtgattatggggtgggaaatgtctatggcaatcgaaggaagaaaactctccaaactagaggaaaaaataa

SEQ ID NO: 79952 - DNA, 1309 bp, Zea Mays
cactgatagatgaagttctttgagaaattctcccaccgtaacagacttctttgtaggcttcgtgagctagtactcagagagctgggatttagggatatcttcaagaaggtcaaggatgaggagaatgccaaggctatgtcactttttgagggagttattaagcggaatgacgaaattgaggatgacggcaaaagaattgagaacttggtccgtggaattttagctggaaacatttttgatctaggatctgcacagcttgcagaagtttttgctaaagatggcatgtcatttttggcaagttgccagaatcttgtatctcgaccatgggttattgatgaccttgatgcttttaagagtaaatggaccaagaaatcatgggaaaaggcagttatttttgttgataactctggtgctgatattatcttgggtatattaccatttgcgagggagttgctccgacgtggcacaaaggtgatacttgctgctaatgatatgccttcgatcaacgatgtcacgtatccagagcttgttgagattataaacaagctcaaggatgcagatggaaagctatcaaatgtggacgcatctggcctccttgttgccaactctggcaacgatctgcctgtaattgatttgtctagtgtatcaccagagcttgcctttatggcaaatgatgctgacctggtggtgctcgaaggcatgggaagagcaattgaaactaacctatatgcgcagatgaaatgtgactcgatcaagattggaatggttaagcatcctgaggtcgcccaatttttaggaggaagactttatgattgcgtcttcaagttcaatgaggcctgaactacgagatacatttgataacacaataccggccgcactagtggtggcttagttctccccaagatcagcttgttaggtgttgcactgaacataattttgttagtatcagcaataatttcaatcaaaataagctacgtatatgtggtggtttatggaagtgtcaggaagggtggttatgaggctgttggattttgtacgaaatctgatgcaccagttcccatttaacgcatcggtagccaagccacgcccgtctgaacttgagctcatgtccgtttgtgcttatggtccgtaataattggttagctaccactggcttgtaaacatcacacttagacgctctggtggcccctttgtgatggtattcataaaagtgtttgtcccgaaactaaaggggtgcgggtgattatggggtgggaaatgtctatggcaatcgaaggaagaaaactctccaaactagaggaaaaaataa

SEQ ID NO: 79953 - DNA, 953 bp, Zea Mays
gcttaccgtacatgacagtcagtctcaagcagttatttttgttgataactctggtgctgatattatcttgggtatattaccatttgcgagggagttgctccgacgtggcacaaaggtgatacttgctgctaatgatatgccttcgatcaacgatgtcacgtatccagagcttgttgagattataaacaagctcaaggatgcagatggaaagctatcaaatgtggacgcatctggcctccttgttgccaactctggcaacgatctgcctgtaattgatttgtctagtgtatcaccagagcttgcctttatggcaaatgatgctgacctggtggtgctcgaaggcatgggaagagcaattgaaactaacctatatgcgcagatgaaatgtgactcgatcaagattggaatggttaagcatcctgaggtcgcccaatttttaggaggaagactttatgattgcgtcttcaagttcaatgaggcctgaactacgagatacatttgataacacaataccggccgcactagtggtggcttagttctccccaagatcagcttgttaggtgttgcactgaacataattttgttagtatcagcaataatttcaatcaaaataagctacgtatatgtggtggtttatggaagtgtcaggaagggtggttatgaggctgttggattttgtacgaaatctgatgcaccagttcccatttaacgcatcggtagccaagccacgcccgtctgaacttgagctcatgtccgtttgtgcttatggtccgtaataattggttagctaccactggcttgtaaacatcacacttagacgctctggtggcccctttgtgatggtattcataaaagtgtttgtcccgaaactaaaggggtgcgggtgattatggggtgggaaatgtctatggcaatcgaaggaagaaaactctccaaactagaggaaaaaataa

SEQ ID NO: 79954 - DNA, 1940 bp, Zea Mays
cttcccccacacctacggccagccgctggtacactttctcacgaagacggccaacgtgcatgacgctaccatcgtaacagagcaccctgttgtcaggattggcgttgtcttcagtgggaggcaatcccccggagggcacaatgttatatggggcctctatgatgttgtaaaggctcacaactccaacagcaaaattattggttttcttggaggaaccgatggattatttgcacagaaaactattgaaatcactgatgaagctcttccatcctataaaaatcaaggtggttatgacatgcttggtcgtacaagggatcagatcagaacaactgagcaggtaaaggcaacaataggtacatgtcaagcattgaagttggacgctcttgttataattggaggtgtcacatccaacacggatgctgctcagcttgctgagacatttgctcagttgaaatgtccaacaaaggtagttggtgttcctgtaactctaaatggagatctcaagaaccaatttgttgaaacaacagttggttttgataccatatgcaaggtgaactcgcagttaataagcaatgcatgcatagatgccctttctgctgaaaagtattactactttattcggatgatgggacggaaagcatctcatgtagcattggaatgtgctcttcagtcacatccaaatatggttatcctaggcgaggaggtttctgtgtcaaaacttacaatatttgatattacaaagcagatatgtgatgctgtgcaggcaagagctgaaaaagacaaatatcatggagttgtacttattcctgagggccttgttgagagtattcctgaactgtatgctttgctccaggaaattcatggactgcataataaaggtgtttctgttgagaacatctcttctcatctttcaccttgggcatctgcactatttgaatttttgcctccatttattagaaagcagctgcttctccatcctggatctgacgattcagctcaactgtcccagattgaaattgagaagcttctagcacaattggttgagaccgaaatggacaaacgcctaaaggaaggcacttataatggaaagaagttcaatgctatctgccacttttttggataccaggccaggggtgccctgccttctaaatttgattgcgattatggctacgttcttggacatgtatgttatcacatcgtagcggctggtttgaacggctacatggccactgtgaccaaccttaagagtccagtaaacaaatggaaatgtggtgctgctcccattacatctatgatgactgtgaagagatggtcacgtggtgctgccaccagtcaaatcggtaagcctgctgtccacatggcgagtgttgacttaaaaggaaaagcatatgagttgttgagacaaaattcttctagcttcatgatggaagacatctaccgaaaccctgggccacttcagttcgaagggtcaggtgctgatacaaagcctatttcattgtgcgttgaagatcaggattacatgggaagaatcaagaagttgcaggagtatttggagaaggtgaaaagcattgtgaagcccgggtgctcgcaggatgtccttaaagcagcggtaagcgccatggcttctgtgacggagatgttgaccatcatgtcttccctttcatttagtggacaggcgaccatctgaaggccaagctgaagatgtcatatgctgttgcgctctcatgtcccgaacatatttgtgtttttttgggaaagaaacatacaatttttgttctcattctagtatcgtctacctatgtcaaactacaatatgataggacccttgctaaataattgtttcgtttgctggtatttctcatctttgatgctaggcatgttgaaaagttgattgagatgagttaaaataagagcataatttgaactggttacaattacaa

SEQ ID NO: 79955 - DNA, 1941 bp, Zea Mays
cttcccccacacctacggccagccgctggtacactttctcacgaagacggccaacgtgcatgacgctaccatcgtaacagagcaccctgttgtcaggattggcgttgtcttcagtgggaggcaatcccccggagggcacaatgttatatggggcctctatgatgttgtaaaggctcacaactccaacagcaaaattattggttttcttggaggaaccgatggattatttgcacagaaaactattgaaatcactgatgaagctcttccatcctataaaaatcaaggtggttatgacatgcttggtcgtacaagggatcagatcagaacaactgagcaggtaaaggcaacaataggtacatgtcaagcattgaagttggacgctcttgttataattggaggtgtcacatccaacacggatgctgctcagcttgctgagacatttgctcagttgaaatgtccaacaaaggtagttggtgttcctgtaactctaaatggagatctcaagaaccaatttgttgaaacaacagttggttttgataccatatgcaaggtgaactcgcagttaataagcaatgcatgcatagatgccctttctgctgaaaagtattactactttattcggatgatgggacggaaagcatctcatgtagcattggaatgtgctcttcagtcacatccaaatatggttatcctaggcgaggaggtttctgtgtcaaaacttacaatatttgatattacaaagcagatatgtgatgctgtgcaggcaagagctgaaaaagacaaatatcatggagttgtacttattcctgagggccttgttgagagtattcctgaactgtatgctttgctccaggaaattcatggactgcataataaaggtgtttctgttgagaacatctcttctcatctttcaccttgggcatctgcactatttgaatttttgcctccatttattagaaagcagctgcttctccatcctggatctgacgattcagctcaactgtcccagattgaaattgagaagcttctagcacaattggttgagaccgaaatggacaaacgcctagaaggaaggcacttataatggaaagaagttcaatgctatctgccacttttttggataccaggccaggggtgccctgccttctaaatttgattgcgattatggctacgttcttggacatgtatgttatcacatcgtagcggctggtttgaacggctacatggccactgtgaccaaccttaagagtccagtaaacaaatggaaatgtggtgctgctcccattacatctatgatgactgtgaagagatggtcacgtggtgctgccaccagtcaaatcggtaagcctgctgtccacatggcgagtgttgacttaaaaggaaaagcatatgagttgttgagacaaaattcttctagcttcatgatggaagacatctaccgaaaccctgggccacttcagttcgaagggtcaggtgctgatacaaagcctatttcattgtgcgttgaagatcaggattacatgggaagaatcaagaagttgcaggagtatttggagaaggtgaaaagcattgtgaagcccgggtgctcgcaggatgtccttaaagcagcggtaagcgccatggcttctgtgacggagatgttgaccatcatgtcttccctttcatttagtggacaggcgaccatctgaaggccaagctgaagatgtcatatgctgttgcgctctcatgtcccgaacatatttgtgtttttttgggaaagaaacatacaatttttgttctcattctagtatcgtctacctatgtcaaactacaatatgataggacccttgctaaataattgtttcgtttgctggtatttctcatctttgatgctaggcatgttgaaaagttgattgagatgagttaaaataagagcataatttgaactggttacaattacaa

SEQ ID NO: 79956 - DNA, 1835 bp, Zea Mays
cttcccccacacctacggccagccgctggtacactttctcacgaagacggccaacgtgcatgacgctaccatcgtaacagagcaccctgttgtcaggattggcgttgtcttcagtgggaggcaatcccccggagggcacaatgttatatggggcctctatgatgttgtaaaggctcacaactccaacagcaaaattattggttttcttggaggaaccgatggattatttgcacagaaaactattgaaatcactgatgaagctcttccatcctataaaaatcaaggtggttatgacatgcttggtcgtacaagggatcagatcagaacaactgagcaggtaaaggcaacaataggtacatgtcaagcattgaagttggacgctcttgttataattggaggtgtcacatccaacacggatgctgctcagcttgctgagacatttgctcagttgaaatgtccaacaaaggtagttggtgttcctgtaactctaaatggagatctcaagaaccaatttgttgaaacaacagttggttttgataccatatgcaaggtgaactcgcagttaataagcaatgcatgcatagatgccctttctgctgaaaagtattactactttattcggatgatgggacggaaagcatctcatgtagcattggaatgtgctcttcagtcacatccaaatatggttatcctaggcgaggaggtttctgtgtcaaaacttacaatatttgatattacaaagcagatatgtgatgctgtgcaggcaagagctgaaaaagacaaatatcatggagttgtacttattcctgagggccttgttgagagtattcctgaactgtatgctttgctccaggaaattcatggactgcataataaaggtgtttctgttgagaacatctcttctcatctttcaccttgggcatctgcactatttgaatttttgcctccatttattagaaagcagctgcttctccatcctggatctgacgattcagctcaactgtcccagattgaaattgagaagcttctagcacaattggttgagaccgaaatggacaaacgcctagttcttggacatgtatgttatcacatcgtagcggctggtttgaacggctacatggccactgtgaccaaccttaagagtccagtaaacaaatggaaatgtggtgctgctcccattacatctatgatgactgtgaagagatggtcacgtggtgctgccaccagtcaaatcggtaagcctgctgtccacatggcgagtgttgacttaaaaggaaaagcatatgagttgttgagacaaaattcttctagcttcatgatggaagacatctaccgaaaccctgggccacttcagttcgaagggtcaggtgctgatacaaagcctatttcattgtgcgttgaagatcaggattacatgggaagaatcaagaagttgcaggagtatttggagaaggtgaaaagcattgtgaagcccgggtgctcgcaggatgtccttaaagcagcggtaagcgccatggcttctgtgacggagatgttgaccatcatgtcttccctttcatttagtggacaggcgaccatctgaaggccaagctgaagatgtcatatgctgttgcgctctcatgtcccgaacatatttgtgtttttttgggaaagaaacatacaatttttgttctcattctagtatcgtctacctatgtcaaactacaatatgataggacccttgctaaataattgtttcgtttgctggtatttctcatctttgatgctaggcatgttgaaaagttgattgagatgagttaaaataagagcataatttgaactggttacaattacaa

SEQ ID NO: 79957 - DNA, 1888 bp, Zea Mays
cttcccccacacctacggccagccgctggtacactttctcacgaagacggccaacgtgcatgacgctaccatcgtaacagagcaccctgttgtcaggattggcgttgtcttcagtgggaggcaatcccccggagggcacaatgttatatggggcctctatgatgttgtaaaggctcacaactccaacagcaaaattattggttttcttggaggaaccgatggattatttgcacagaaaactattgaaatcactgatgaagctcttccatcctataaaaatcaaggtggttatgacatgcttggtcgtacaagggatcagatcagaacaactgagcaggtaaaggcaacaataggtacatgtcaagcattgaagttggacgctcttgttataattggaggtgtcacatccaacacggatgctgctcagcttgctgagacatttgctcagttgaaatgtccaacaaaggtagttggtgttcctgtaactctaaatggagatctcaagaaccaatttgttgaaacaacagttggttttgataccatatgcaaggtgaactcgcagttaataagcaatgcatgcatagatgccctttctgctgaaaagtattactactttattcggatgatgggacggaaagcatctcatgtagcattggaatgtgctcttcagtcacatccaaatatggttatcctaggcgaggaggtttctgtgtcaaaacttacaatatttgatattacaaagcagatatgtgatgctgtgcaggcaagagctgaaaaagacaaatatcatggagttgtacttattcctgagggccttgttgagagtattcctgaactgtatgctttgctccaggaaattcatggactgcataataaaggtgtttctgttgagaacatctcttctcatctttcaccttgggcatctgcactatttgaatttttgcctccatttattagaaagcagctgcttctccatcctggatctgacgattcagctcaactgtcccagattgaaattgagaagcttctagcacaattggttgagaccgaaatggacaaacgcctaaaggaaggcacttataatggaaagaagttcaatgctatctgccacttttttggataccaggccaggggtgccctgccttctaaatttgattgcgattatggctacgttcttggacatgtatgttatcacatcgtagcggctggtttgaacggctacatggccactgtgaccaaccttaagagtccagtaaacaaatggaaatgtggtgctgctcccattacatctatgatgactgtgaagagatggtcacgtggtgctgccaccagtcaaatcggttgttgagacaaaattcttctagcttcatgatggaagacatctaccgaaaccctgggccacttcagttcgaagggtcaggtgctgatacaaagcctatttcattgtgcgttgaagatcaggattacatgggaagaatcaagaagttgcaggagtatttggagaaggtgaaaagcattgtgaagcccgggtgctcgcaggatgtccttaaagcagcggtaagcgccatggcttctgtgacggagatgttgaccatcatgtcttccctttcatttagtggacaggcgaccatctgaaggccaagctgaagatgtcatatgctgttgcgctctcatgtcccgaacatatttgtgtttttttgggaaagaaacatacaatttttgttctcattctagtatcgtctacctatgtcaaactacaatatgataggacccttgctaaataattgtttcgtttgctggtatttctcatctttgatgctaggcatgttgaaaagttgattgagatgagttaaaataagagcataatttgaactggttacaattacaa

SEQ ID NO: 79958 - DNA, 1837 bp, Zea Mays
cttcccccacacctacggccagccgctggtacactttctcacgaagacggccaacgtgcatgacgctaccatcgtaacagagcaccctgttgtcaggattggcgttgtcttcagtgggaggcaatcccccggagggcacaatgttatatggggcctctatgatgttgtaaaggctcacaactccaacagcaaaattattggttttcttggaggaaccgatggattatttgcacagaaaactattgaaatcactgatgaagctcttccatcctataaaaatcaaggtggttatgacatgcttggtcgtacaagggatcagatcagaacaactgagcaggtaaaggcaacaataggtacatgtcaagcattgaagttggacgctcttgttataattggaggtgtcacatccaacacggatgctgctcagcttgctgagacatttgctcagttgaaatgtccaacaaaggtagttggtgttcctgtaactctaaatggagatctcaagaaccaatttgttgaaacaacagttggttttgataccatatgcaaggtgaactcgcagttaataagcaatgcatgcatagatgccctttctgctgaaaagtattactactttattcggatgatgggacggaaagcatctcatgtagcattggaatgtgctcttcagtcacatccaaatatggttatcctaggcgaggaggtttctgtgtcaaaacttacaatatttgatattacaaagcagatatgtgatgctgtgcaggcaagagctgaaaaagacaaatatcatggagttgtacttattcctgagggccttgttgagagtattcctgaactgtatgctttgctccaggaaattcatggactgcataataaaggtgtttctgttgagaacatctcttctcatctttcaccttgggcatctgcactatttgaatttttgcctccatttattagaaagcagctgcttctccatcctggatctgacgattcagctcaactgtcccagattgaaattgagaagcttctagcacaattggttgagaccgaaatggacaaacgcctagtgttcttggacatgtatgttatcacatcgtagcggctggtttgaacggctacatggccactgtgaccaaccttaagagtccagtaaacaaatggaaatgtggtgctgctcccattacatctatgatgactgtgaagagatggtcacgtggtgctgccaccagtcaaatcggtaagcctgctgtccacatggcgagtgttgacttaaaaggaaaagcatatgagttgttgagacaaaattcttctagcttcatgatggaagacatctaccgaaaccctgggccacttcagttcgaagggtcaggtgctgatacaaagcctatttcattgtgcgttgaagatcaggattacatgggaagaatcaagaagttgcaggagtatttggagaaggtgaaaagcattgtgaagcccgggtgctcgcaggatgtccttaaagcagcggtaagcgccatggcttctgtgacggagatgttgaccatcatgtcttccctttcatttagtggacaggcgaccatctgaaggccaagctgaagatgtcatatgctgttgcgctctcatgtcccgaacatatttgtgtttttttgggaaagaaacatacaatttttgttctcattctagtatcgtctacctatgtcaaactacaatatgataggacccttgctaaataattgtttcgtttgctggtatttctcatctttgatgctaggcatgttgaaaagttgattgagatgagttaaaataagagcataatttgaactggttacaattacaa

SEQ ID NO: 79959 - DNA, 1987 bp, Zea Mays
cttcccccacacctacggccagccgctggtacactttctcacgaagacggccaacgtgcatgacgctaccatcgtaacagagcaccctgttgtcaggattggcgttgtcttcagtgggaggcaatcccccggagggcacaatgttatatggggcctctatgatgttgtaaaggctcacaactccaacagcaaaattattggttttcttggaggaaccgatggattatttgcacagaaaactattgaaatcactgatgaagctcttccatcctataaaaatcaaggtggttatgacatgcttggtcgtacaagggatcagatcagaacaactgagcaggtaaaggcaacaataggtacatgtcaagcattgaagttggacgctcttgttataattggaggtgtcacatccaacacggatgctgctcagcttgctgagacatttgctcagttgaaatgtccaacaaaggtagttggtgttcctgtaactctaaatggagatctcaagaaccaatttgttgaaacaacagttggttttgataccatatgcaaggtgaactcgcagttaataagcaatgcatgcatagatgccctttctgctgaaaagtattactactttattcggatgatgggacggaaagcatctcatgtagcattggaatgtgctcttcagtcacatccaaatatggttatcctaggcgaggaggtttctgtgtcaaaacttacaatatttgatattacaaagcagatatgtgatgctgtgcaggcaagagctgaaaaagacaaatatcatggagttgtacttattcctgagggccttgttgagagtattcctgaactgtatgctttgctccaggaaattcatggactgcataataaaggtgtttctgttgagaacatctcttctcatctttcaccttgggcatctgcactatttgaatttttgcctccatttattagaaagcagctgcttctccatcctggatctgacgattcagctcaactgtcccagattgaaattgagaagcttctagcacaattggttgagaccgaaatggacaaacgcctagttcttggacatgtatgttatcacatcgtagcggctggtttgaacggctacatggccactgtgaccaaccttaagagtccagtaaacaaatggaaatgtggtgctgctcccattacatctatgatgactgtgaagagatggtcacgtggtgctgccaccagtcaaatcggtaagcctgctgtccacatggcgagtgttgacttaaaaggaaaagcatatgagttgttgagacaaaattcttctagcttcatgatggaagacatctaccgaaaccctgggccacttcagttcgaagggtcaggtgctgatacaaagcctatttcattgtgcgttgaagatcaggattacatgggaagaatcaagaagttgcaggagtatttggagaaggtgaaaagcattgtgaagcccgggtgctcgcaggatgtccttaaagcagcggttttttcagaaaagatttgctgagaatctggatctccgtggataatctaactgtcataagaatctaaatattgtgcggcttacgtgtggagaaagatgaagggatccatagaatttcggatctaaaaagcgatggatttctcacatcaagacgactcgatggattcttcattcacgttaatttgagcgattttcataaaagcgattctacataagcagattgagaagtgacgcgaaagcgatggatttctcccatcaagacgactcgacggattcttcattcacgttaatttgagcgatcataaaagcgattctacataagcagactgagaagtgacgtgtttggctgacagaattggattctgatggctagaaattgattttaagataaaacaaacaccccctgtatatattgacttctcaatctttgtgtttttgacattatatatttaatgaacctaagataacggatagcgttgccat

SEQ ID NO: 79960 - DNA, 1784 bp, Zea Mays
ccaacgtgcatgacgctaccatcgtaacagagcaccctgttgtcaggattggcgttgtcttcagtgggaggcaatcccccggagggcacaatgttatatggggcctctatgatgttgtaaaggctcacaactccaacagcaaaattattggttttcttggtggttatgacatgcttggtcgtacaagggatcagatcagaacaactgagcaggtaaaggcaacaataggtacatgtcaagcattgaagttggacgctcttgttataattggaggtgtcacatccaacacggatgctgctcagcttgctgagacatttgctcagttgaaatgtccaacaaaggtagttggtgttcctgtaactctaaatggagatctcaagaaccaatttgttgaaacaacagttggttttgataccatatgcaaggtgaactcgcagttaataagcaatgcatgcatagatgccctttctgctgaaaagtattactactttattcggatgatgggacggaaagcatctcatgtagcattggaatgtgctcttcagtcacatccaaatatggttatcctaggcgaggaggtttctgtgtcaaaacttacaatatttgatattacaaagcagatatgtgatgctgtgcaggcaagagctgaaaaagacaaatatcatggagttgtacttattcctgagggccttgttgagagtattcctgaactgtatgctttgctccaggaaattcatggactgcataataaaggtgtttctgttgagaacatctcttctcatctttcaccttgggcatctgcactatttgaatttttgcctccatttattagaaagcagctgcttctccatcctggatctgacgattcagctcaactgtcccagattgaaattgagaagcttctagcacaattggttgagaccgaaatggacaaacgcctaaaggaaggcacttataatggaaagaagttcaatgctatctgccacttttttggataccaggccaggggtgccctgccttctaaatttgattgcgattatggctaccggctggtttgaacggctacatggccactgtgaccaaccttaagagtccagtaaacaaatggaaatgtggtgctgctcccattacatctatgatgactgtgaagagatggtcacgtggtgctgccaccagtcaaatcggtaagcctgctgtccacatggcgagtgttgacttaaaaggaaaagcatatgagttgttgagacaaaattcttctagcttcatgatggaagacatctaccgaaaccctgggccacttcagttcgaagggtcaggtgctgatacaaagcctatttcattgtgcgttgaagatcaggattacatgggaagaatcaagaagttgcaggagtatttggagaaggtgaaaagcattgtgaagcccgggtgctcgcaggatgtccttaaagcagcggtaagcgccatggcttctgtgacggagatgttgaccatcatgtcttccctttcatttagtggacaggcgaccatctgaaggccaagctgaagatgtcatatgctgttgcgctctcatgtcccgaacatatttgtgtttttttgggaaagaaacatacaatttttgttctcattctagtatcgtctacctatgtcaaactacaatatgataggacccttgctaaataattgtttcgtttgctggtatttctcatctttgatgctaggcatgttgaaaagttgattgagatgagttaaaataagagcataatttgaactggttacaattacaa

SEQ ID NO: 79961 - DNA, 2162 bp, Zea Mays
gacgtttttgccgcagcgcaggagagagagacgagacatcaccgcacggacagccacgtcgtgcctccgtgcacgcacacggtatacgacagcgccatcactccataaaaggatccggggcagcgccaccgccggatccgacggcctccgaggcggggccgaaccgccgaagtagccaagacaacacgagcagcgaaacgccatctattcccgactctgctgcacctgcacctccgggccgccgccgagatgggcgcggatggcgggctgaaccgggcggcggagaagcccagggatggagagggcggggaggcgagggtgttccggtgcacggactactcgctgccgcggacgacgctggcgctggcgctctggctgggcggtatccacttcaacgtccttctcgtccttgcgtcgctcttcctcctctccggccgcgccgctgccatacccgtttattgatgcagagtcgtggcgttccagctcttgttcatgttcgcgcccgtcaacgacagggacaaatggggccagagcgtcgccaggttcatatgcagacacgcaatgggctacttccctatcactctgcatgtggaggactacaagtccttggatcccagcagggcttacggtatgctcccgaaaacctgcttctccattcatggatgctgcagtcatcgtatccattatccaatccataagtgcccacgggagtcgagaaagtatcaacttcagttgctgagtgttaagggaagggaatcttttatttgcagagttggtgtggtgatagtgatggtagtgttgtgcatttgcagtgttcggttatgagccgcactcagtgctgccgataggtctgtcggctcttgctgatcttgttggctttctgcctctcactaagatcaaggtccttgcgagcagtgcggtaagtcagctaaatgccttgacgccaaatgccacaggattcagggactcccctcatgatggttaatttcgagttggggccaggtgttctacaccccgttcttgagacagatttggacatggcttggcttggtacctgcgacaaggaagaatttctactgctaccttggagctggttatagttgtatcgtagtccctggtggtgtacgggaaatgcttcatatgaacaatgattcagaggttgcttttcttaaatcaagaaaaggttttgtcaagatagctatacagtctggatgtcctttagtcccagttttctgctttgggcagagctatgcatacaagtggtggaggcctggtggtaaattgtttatcaagatcgctagagcagttaaatttactcctattatcttctggggtagatttgggtaacttcatggctcttagcattctgttcttttccttccagacttatgttctatactttttttgaaacattgttctctggtattagataatttttcatggtctactgacatttgaatgcagcacaccattccccttcccaaaacccatgcatgtggtcgtgggtaaacctattgaagtcaataagattccccatcctacaattgacgagattaatgaagtccatgaacagttcatcattgccatgcgggacctctttgagaagtacaaggcgaaagctggatatcctggccttcatctaagagtcctatgacattccacaaccagactcaaagttagaattcagcaataacatggctctattactcttccctcaactggggtgtcaaactgcacctcgcaggcactcgggcggtagttgttgcattatggtgatgataataaggctccagcaccgatgccaaaacatgcacgagttggtcacgagtcagagccttttgttgctggcttaacttttttctttaatgttgcaaagataagataatgtaattactggttatgtgatgttgcatatgatatgagaatatgaggattggtgatatataagctcctgtacatgcagctgtatcatcagtgtctgaatcaccaggaggttgctgatattgactgctgcctgtggacctgcagctgtgtcattgtctgaagaactttcagatatatcatatccccaagaagcccatttggtttattattttttgttcgtttcttctgggcttattgttatcgtttcttctgggcttattgttagttgtcacctgggc

SEQ ID NO: 79962 - DNA, 2206 bp, Zea Mays
ctcatatcctgtattttatggtcccacgatcgtcacactgtttacgaagtgaattctaaatttagagttagtttgagaaccgcatttttataaagaatttttattttctaaaaaaattagtttattttttcttaggaaagtaaaatttcttaaaaaaatgaagttttcaaattagttcttaaattttatttttcacagtaaaaaaactctgccgaatagagtaatagagcatggtagaaagctcggctatcgctattcacccgcgccggccccgagaggctagagcccacctaccgcctctttcttgctgccgccagttgcttcctccagaaccttgactgaccccaagagctttttgcttgggcggcgccgcgccgcgccgcaacacgccgcaccggcaagattttagttggagcacaggcaaggttgctggatgtatgatgcgcgcgtgcgctctgacctctagatcgcccccacactactgctgcagcaggtgaggggatccttcaagcagacagtccacaaaaggagttggctcaagcagataccttgggacgaagacgaactagcgagatcaagaagctggcggcaagcaagtggtgggagcgcggcggtgagggcgtcatggccggaatggatcccggcggcggcggtggggccgcgtcgcactacctggaactcctccgtgcgcagcaacagcagctgctacagcagcaccagcaggcgccgctatccccgtcctcccacgtcaagatggagcgctccgcgccgtcgccggagaacgtcgatccgggcggggatcagcccgcctcggagggcagcggggggtccggtgggccgacgaggaagccgcgcgggcggccgctggggtcaaagaacaagcccaagccgcctatcatcataacgcgggacagccccaacgcgctccactcccacctgctcgaggtcgccgccggagccgacatcgtcgagtgtgtctccgagtacgcgcgccgccgctgccgcggcgtatgcgtgctgagcggaggcggcgccgtctccaacctcgcgctacgccagcccggcgccgatcccccgggcagcctcctcgctaccctgcgcgggcagttcgagatcctgtcgctcacgggcacggtgctgccgccgcccgcgccccccggggccagcaacctcagcgtgtacgtcgctggcgggcaggggcaggtgatgggcgggagcgtggccggccagctcatcgccgccgggcccgtagtcctcatggccgcgtcgttcgccaacgccgtctacgagcggctgcctctggaggaagaggaggaggaggcggccacggcagccgcagccgctgccgctgtcacagaaacccaaggcgcagcagtggagccggccgaaggacagcaacaggaggcgtcgcagtcttctggagtgacgggtggcgatgtcggcggcattggtcatggcatgtcactgtatgatcttggagggaacgcggctggctacgagttgcccggagagaacttcggcacctggagcggtggtataaggccaccgttttgatatggcataccgatctctttctcttggcagctgcatttgtatcacggcaagaatctccaagagatcgcgatccatgacggagaagctccttaatcctgcattttggttgaaggctacactttgacgagggcaccaggccatgtggtgatttggtgataatgcatgttgccatggtgttcgacttcgacttggaaacaatccagatcgatgtataccattaccatctatggctatggaaaagtgagtactaccgacgatgcatgtctattttttgggtggtctattggtccaacaaaatccaaggaaggtcattaggtccagtgttaactgtttagagaccatcctgtcgacttcttgtcctcttttgctttggaacgatgtttgtcaagttgtcatgacatttgcctttcacttctattctattaactccctccgttataaaatactagtctcataatattagtcgttttaattcttggtttgatttttatgtctatattcaaataaataaaaataatatatatatatatatataaatgaatctattaattaagtaaaataaattttaatttgggacggagagagtattatttaaaatgatgcttattataggcctttttagtagtacttacattctctcttttgctggttt

SEQ ID NO: 79963 - DNA, 880 bp, Zea Mays
aaataatgcggcacgagtcgccatcagcttaccggaacaagagataaaagatacaggaaccaaaaggcgacgagctcaaatctgttctggtgtatccaaggaagagcccatatatacacctgaccttacacggccataccaaccaggacagatagatggaggatcatcacacggacaggaggatatccaaggaggccggcgaggaaacgaagctgaccaggagcttccgctacgaggactacagcaccaggcgagtcttcctgcgcagctacccgctgcagtgggactggtcgccctcgcgggacgacgacgacgacgacaagcaggacggccaggatgccgccgacggcgacgagtgctgcggcagcaggcggtggaagagcaagatggtggcggccgtcacggagtggggggaggacaagctgctgctgctacgcagggccaagaagcgcctcgcgctctacctcatcggctgccaccaccacggtcgccgcgcgctgcccttcccgtcagcctcacccgccggatcatgcaccgtcgccatgatgctcgcctccagatgatcgatagatatccaccaccgtacgtgcacgcacggcgcgcgcgcgtgcatcatatatgtgtgtggtcgaccatcggtcgcgcgcgccccacgtcgtcttcctctctctttctagtgtatgattggcccctacatacgtgctctcggaaatgaattgaaaatgcactgtatactcttgctaccaaaaaagttgattaattacacacaccacaggtaaatacgacgacctatagcagagctattactttaattatgtactacgtctacgcgtacattattcataatatgatcatgaaactgagtataagtgcattgtac

SEQ ID NO: 79964 - DNA, 2079 bp, Zea Mays
tttacattttagggtttgtccatgtaaaaacctcagtccatgtattcatctcaatacatatatgatgataaatgttgtacagttggtatccagcaacgacaacacattttacattttagggtttgtccatgtaaacacctcaatccatgtattcatctcaatccatatatgatgggatggattgatatagaattatgatgtggaattgagttaaaatccacacgaatccacccaaacacacatggattgacgattgagttagataccaaagccttagaaaacatcaacggcatagtgctgtcactgaaacaacgtgtatattatttttcgcattaaaattgcatcaagggacccctatttcctttaattaacacaaatgcagatgagcagatttaccagcataaaagcttggtatggttcaatatagtagaaattgattctggagttttaaaactcggcctaggaggtaagatagtcccgaacattgaattaagaaatataggtcgagaaaaccctcgaactgccccactcatacacatcagccctgtagctcatgtgaccatacacaacggcaccataggccatatgagaaccttgaacccgaccaaaaccaaggttgaccttagacatgtgctttgtcgtaggagagacgagaggatttgttcaaaattgaacagaaatgaattttagccccccctcaatccccatctcgcaaacaagtcctaacggtgttaattcagtccacaaaaagacgtttgtacccttgcaacatttccccactttttattaactgattataaatttgcccgtattttaatatgaaagtttggaatataatcataacataaattcgatcataaattttgaaaaaacaatattttaactttgagcttaaaaatatttcaagattgatgaaaattaatttaatattaaattttaaaaaacaaatgtcaacattttaattttaattttgaaaatattttagttttattatattttcaaaaaaattaaaatggtgtcagctttgtcaaaatttaacgttaaattcaaacttgttatcaatttcgaaaaagttaaaatattgatttcaaaaaatatggttagatttatgttttttcttgaaaagcagaggagaattgcgccccatttatatattaggaggaaggaaacaaaaggtctcgagaagacccaaaatacaagacactccttacgaaggctagaagcatacatgtagggatccataacacagcaaaaaactaaaacaacctagctgaagcccctaagcagtaggagaaggggcagccaaaaagtaaagacctttggcacccatttttgcttttcctcatctacaaactcaaggttagatttatgttatggttatattccaaacttacatatcaaatgagggtaaatttgcaaacagttaataaaaagaggggcaatggtgctagggtatgaacgtctctttgcgggctgagttaacacattaagccgcgataacggaataggggcaaaatggctttgtttcaaaaaaaggggcatatgtgcaaactttaaaaaaacaagggtaaaaacaaagttgcagccccacccgagtactggcaactatgcaattgccccctccattgtttttcaatgcaaccagcaaagaaggtacaaaccagataatccagataatcatgcacaagtgcactatggattggtctccacgaccaccgatgattcgcagattttttagggatcgccccatgcaaccacattgatgttgttaagtatatctctactatattttgttagagtacccgtttagggttttggggttagccccttgtaattacagttaccctgtttaatgggccaggcccaacaacctgagtctattaatacaactctcaaccctgagttagggttagggtttcattccaacttggtaccagagccaattttctcccacccccacagccgccagactcttctctgtctgtccacccccactgccgctggcctcctccctgtccggccgcactccctcctctggtcgtcgaacctcccaccatggacgcctccttccccagtgtc

SEQ ID NO: 79965 - DNA, 713 bp, Zea Mays
cttgcatcctccttggttgtctctgttgactctattgttggcaatttctcttgaacatagtgtaatggagcaacaatgagttgctgtataccccactcacacctgtgtgcacatcctatgtttcctgctacacacatcaaaggttcctgctacacacatcaaaggctgtggagtcatgattcgatctcattgaaagtgaacatgcacgtatcatgcacacagatgtgctggttctgagaaagaaaacatatctcgtgcacatggaagattggtgcacatggtgcacatattaaatcatcaccactcattttagatctaacgtctctatttgtttggtatattttgctaaggacaccctccaatgtggtggtgtgtagtggtggaaggtgttatttgtaaattgaatgatcaattatagacgttagatttaaaataagtggtgatgatttaatatatgcaccatgtgcaccaatcttctatgtgcaccagatatgtcctctctgagaaatgaggcatgctagtgacgaactgagtctaacatgaaaccttgcagaccagaactccaacaactaggtcatgttcctgtccagtgtccacatatccacttgatattagctgctgcagatatttcttaagctgtcatagctttacatcccactacaaaacctaactaaaaattcaattagacaccttttgtaaccatatttttcaag

SEQ ID NO: 79966 - DNA, 2341 bp, Zea Mays
atgacggcagcagcgaggaccaccagaagcagactgccatgggcggaggacatcgatgcggacgtggcgccgttaatctgcgaggaggcaacggccactggtagctcatcgtcggcggggagcgagcaggtggccgggtggcccgcgccggcctcgtcggccgccatgagcgcctggatgaccgccgtggccgcctcgcggtaccgcgtggggttccggttcagcagccatgtcaggcccatgaggtggcagtcctcgcggtgctcctgcttcgccttcgccgacgacgtggcgttgctcctcccacccagctgcagcccaggaaacccagtacagggagtcagtaaacaaattaacagcgacggtaattttttacatcgcgaaaggacagagattcctgcggaggtaaaggacacaagactccgagagaggacggggccaccggccatggcaatggcggtcctcgtgccatcgctctcggaacagttggcgcacgcggaatcggcgtgatgtcactgctatcacaagctgctttctcgggaactctgaatcctcatgtgaccacgcatggtgacatggtgcgtccatgtccaggccgcagcaacatgctccgtagtaaaacaaggcagatgaaatgggctcgacatctctgtcgtccttcacggtcgtaaagctcacggtcagattagtagcaaaagcagatgactcggtgcagtcccgagggggggtaatggaggctctgtgactgcgatgctttctaggtgaaaaaaaaagagatgagtggaaagaaaaggagcgtctcgagtccagacgctgagtggtaaaggcagcggccaaagtgaaagtgagaataaaggtcccggcatggcgttctggagcagatcatgctgcaggccctacccaatacccatccatgagccccggatttctcgctacaaatctcattggagtaatgcgagttcacgtgcaccggctcattgcagtaatgctgctactgtactctactctacactctgtgagagtactccagtaactactcctaccatgcagttaatcttccgttacagtcttacagagagtgcaagtctgccgattacatactagtataaaagtgtatgagtataaagtaacatgcatatgtaagtaagtggaacaagcttatgatttaataaactattttagatcataaaatgttttagcttttctagatacatattattttctacagatttatgtataaactatatatttttagtaaaaatacatctcataattttagaatagagggactatatgaaattttgcctgaacattttctgtctttctgagacggcctctactgcaggtcagacgccctctactgcaggtcagggactagaattttctatgtgcgcatgtgatgtgcacggctaaaggataatagaaggcaattccctgctagtacatgagaagcatcagctgctcacaatgggggaaaaacccctttcatcatgtttaatctgtactcgattcagaaacacactaaactctttctgacttacagtacagaatactaataaggcagcgatctactactttgcattctactaccggagaccttgtgaactcttcgtggctttttttctcgaattttgtttgctctcaacaaatactgggaccgcctatttgtcgattgtcatggatatacattccttattaattttatatcttccaagatactgaaagctgcaggtttgtcatgtttctcacataacgggtcgtacaaaatgaaaatgtcatacataaatacatggatctaccaagttacatggtgacacctgttttattccagattcctctaaaagtggaacagacactgttgatgcatgaaacagatattgtattatactatttgtctagataggagtatgcaatatactaatacaatggagaaccccacttctgatagttcagtttaggatagtacatacataagcatgcatttcatcaatagaagatgccgtcaaaatatctttttgaaatcatattggatgcgattatattctattttctgctctttcatatagaacgtaaatcagtagttaaaaactaaaaatgttcacaattttgacacctacagaccataaaaacataatcttcatgactcatgaacaattcaacattttgagtagatgcaattaatattgcgtttcccattagaaaggatggtagtttaggcaagtgcacattccaatgcagcagacaagatgcattcatgcatcaagggaaaaagaaaagaaagctctgttgtgttgtgtctcaccttgctgagcgcccgcaggcacctggagcagccggcgag

SEQ ID NO: 79967 - DNA, 1830 bp, Zea Mays
agtagtaccattccactgctgactgctgaaacacaataatagaggcagaagcagaggcagaggcagaggcagagccaagacggttccgttcagtgtctggcggcgcatagatagatagccatggcgaagaagccagtggaggaagcgctcctcgcagcggcagacgagcaggagagcctgagcgtgcgcgaggagctgaagaagcagctatggctggctgggcccatgatcgccggcgcgctcctgcagaacgtgatccagatgatctccgtcatgtacgtgggacaccttggagagctgcccctcgctggcgcatccatggccaactccttcgccaccgtcaccggcctcagcctgctgctaggcatggcaagcgctctagacacactgtgcggccaagcgttcggcgcgaggcagtactatctcctgggcatctacaagcagcgcgccatgttcctcctgaccctgtgccacgtccggttcctccagacgcagaacatcgtggtgcccgtgatggcgagcgccggcgccgccgcggcctgccacgtcgtcgtctgctgggcgctggtgtacgcgctcgggatgggcagcaagggcgcggcgctcagcaactccatctcctactgggtcaacgtggccgtgctggccgtgtacgtgagggtgtccagcgcctgcaaggagacgtggacgggcttctccacggaggccttccgcgacgcgctcggcttcttcaggcttgcggtcccgtccgctctcatggtctgcttggagatgtggtcgtttgaactcattgtgctcctctcgggccttcttcccaacccaaaactggagacctccgtgctgtcgatcagccttaacactgctgcgttcgtgtggatgatcccctttgggcttagctcagctatcagcactcgcgtgtcgaatgagctgggtgccgggcgtcctcgagccgcccgccttgcggtgcgtgtcgttgtgttgctgtctgtcgccgaagggctaggcgtgggcctcatcctggtgtgcgtgcgctacgtctggggccatgcctacagcaacgtcgaggaggtggtgacgtacgtggccaacatgatgctggtcattgcagtgtccaacttcttcgatggtatccagtgcgtgctttcaggtgtggctagaggctgtggatggcagaagatcggtgcctgcatcaaccttggcgcctactacatcgtcggcatcccctctgcttacctcatagcgttcgtcctgcgtgtcggtgggacgggactctggttgggcatcatatgtgggctcatcgtacagctccttctgctcgcgatcatcactctctgcaccaactgggatagcgaggcaacgaaggcaaagaacagagtgttcaattcttcctctccagcatccggaacgtgaacggattggcggtgaagtaaacggcgagcaaacacggaaactataggagttatgcctgtagttttggaaacttcagcacctctgatcctctccgattttctggctcccacattaactctaatggttagcattgacacttgcagtctggattttgaaacataaatgcgttccttgaacagagtaggaagggaccaatggaaaacttatacaatagtgttagatcgcatgcaacattgtcctccaaagtgacctcatcacacaacaaaacgtgggtaattccaagaccactttttcggtacaataaaactgtggtccgaatcctcacatcgggccaaatgggccagccgccagcacaagctgtggtctagttgctggctggcctcaaggccacccggtgcgtggcaaaggaggcgtgcggtt

SEQ ID NO: 79968 - DNA, 4558 bp, Zea Mays
agaccgcccccgcctccacccgcacgcccttccgcaaaccccgccgttcgcccgctcttcctaccacctccgcaaccgacaggacgccgctgcggcggcactcggtccggctgctggcgctcgtcgccggggagcacccgcgggacgccgtcgcgccgctcgtgcccaggctcctggccgcctccagacttcaaatccccaccaccatcgaacctccccaacccggcaaatcctaaatccaatataggctaaccctagccgcccatccgcccgccgtgaaggcgtcgatcaagttccgggacgacgaccgaccgctgctgcgcgccaaggtgccgattggcgtgctagggctgcccttcctctcgggcctcgcggcggggggagacgccaaggacctccgttttgacctctccaccgccttcccctctgtcccggcgctccgcctctcataccgccccaacgaacccctccagccttttgccctctccgtccgcacggggtcccctatccgcgccccattcgccctcgccgccgaattcaacctcacctcctccaacccgcccgccttctcgctcctcttcaagccccggatcggggacttcgccgtcgcaagctccgtccactccccgccgacaccgccgcccacatccactccgcccccgctagcgatcaagatggtcgacctcaccaccaacagcgacgaccacgactgcgaagcacacggtaacgacctctccttcgccgagaatgtattcggggcgaacgtggcggccgccaccgggacgaacggcggcggcgtaggcgcgctgctgtccgggatgcggctcacgaccaggagcgtgctgccactgtggagtaaagcgagcatgtggttccagtgggggctgcgcgtgccgccggagatcaaggccacgcttgcagacaacgggtacgggcgcaaggctgggagcctcgccatcagcaagctgccgctgctggtgatgaacaagatcattatcgagcacacgcccaaggtgccttcacagtctgaagcggacaagaagaggaagaaagacacaccaccggcagctgaggatgaagagttctcactcatgaagaggcaactggataagctgaatgcggagagcacaatgctgcgtcgtgcagtcgaggacttgagtgcagagattggagccggcaaaggcaatgatcgtaagctgccaacagcagtgccacctcaacaacatactttagtgtcgaaaccagatcgtcatttccacataaatgcgaaggaattggtagacagtgggacgaaaccggcctcaaatgaagcaagtgaggagttgaagaaggtgcttgagggccgacggaagtaagaagcacctagctagggcttgctgttattgcaagccctacaatatgacatagctgctgactattgtgtcaggttttgtggttaataataatacttcctcgctggagaagattgctaagggcagtttagcccctcgctggagcctggaggcaagtgaggttgccattcgccatagctttttcaacagcccccttcgaaggatgtggtattaatctcagtgcaatttaggcatcttgataattttgtcagatggcaagaggacctctagaatacaagatggtccgtattttcatgtataaggattaaggaatgatgaaaatatcatctgtttgaaatgtacagttgttacaccaatccttatgtggtatcatggccactaaacatcatgaagcaagccactacgggtacacacgagctgaactgagcaacaacttgagcatcttccctccctagccattgcatatcacactcacacactgtcagcatgcatcatgatttatgagattcagtggtcctttattccaacagtttcccccttgtcttctatatttatttaataccaactaagttggtttaggtgtcacaatatttgcttatttccattttttgtttcatgcagcaagggacactcaaattctgatcttgaagcagttcttagatgagaaggcgaagaataagtagagaaaatgaatcattagcagaattatgatggtctaacttgttcaaaactgccaaagtttagctcctatgtacaccaaaccagaaatccctatagttctcacatgtgttacattgaccaagttagtataaaaacaccaatatttgtggtagttcatgcctgtgtttgtggtagtttttgtcgtatgtgttgtttatgttatcagagaactctgtcgctctataatgtggtggggatgctctgttaatggcactgcttttaatatttaaatagtgtggtgaacgataaagtaacatgtattctttttattgttcttttcctttgttgggttcatttgtttaatggatgatgagccaatggcttcatggagcagcagtgacagtgagacaccaacttcagtatatgctcaaattatgtcactgtctgcttcgagtcatcatgtccgtgatggacctagatacttcataacttgttctaaccacaacaagacatcataacttacttggattgttgagtttaataagaatgaaagagcctggaccaacaactcttgctttagggattgattagacctcgttggggttgaatttaaactcccaagataatctttacaagacatttggctctccgtggtcaagtgagccagctataggagaacctgattatcagatcccagcttgtttctctgcagagccaccaccagcactgcaaccatttcattttcagaagtttcaccctttgacactattctacatcttttacagctcatgtggtcttttaagccctgcctctacatggacttcggcctcgcttccgctgtcaccacgctctggacctgcaccgatgtcacgcacctcgtgcacgtgctcctgcagttccgcctcgtctggtgcggcaagctaatccgttatgcccgcgccgtcgccgcacactacgtctgctccgtcaagggcctctgctttgacctcttcatcattaggggtagaaacagagctttcaatgcatgttggaggtgcacgatgtgatcaatattatccatgcttgataaatgatgacaatggtgatggccatgatatatggtcaacattgtattgatctttttccgagttttcggctatcatgttgtttgctggaatggagatatttcattgttcacttggttcttgtgatagagttaattaccttatttctgtgctttcttagtaccctttttctgatatttgagttataaataacactttctcaattgtgctgtcattataactcaatgacattattaaaatcatatatagaaatcaatatgttactaatggttgcaatgtaatggtgaaatagctagattaaataaccaaatttatatatgggtaggatcacaatggattccgaaacattttctcataataatataacacacatttgtacataagttatcgtattattatacgtttccgttgcaacgcacgggcactcatctagtatatatataaggattagctgaaaagctacaatattaaacatcccagactataaaatatgtgtagctcagacctattggtgcaagcagcatcaccaccacttcttgctagcaaaagcttagagcattggggattaggcccaaggatcttgaacatcgtctggtccgtgtcaaagttgttgtttgcaagtgtgagaagtttctcgctagcaaagatggagttggtctcaggaacgaaacaaagcacttgttctagcatggagaactgtattacaaagacatagatactctttccatgcatgtgatgtaagatcgtgcagcagccgcaaccatctaaactatatagaaaataattggcagtgcgaaataccttctgatcctcaagaggagtgccttcattaatatggacactttctcagtgtgtaggcaaggtggcaagtgtacccaacaatcctacccggtcctctgcttcaccaagaccaataattgcatctaaaaatcaaatggagcgccaaattatgcactataaaactaaagagggaggagatatattttccagttttttgtaatctggaagatggcagagtatagttctcagtcctaataaaagcaacaaacatcagtgacttcattgatgctttctgagatttcatttctttttactttggttaataagatttgggtacttatttattgtagtgtgaaagtaatgcacgctctgtaaaatggaaagatggaagtatgcagcttctgattggcaatgaggttcttgatatatctgtacatgaggctcatcatgaccaattccaaatatttttaggcatacgaagggaattctatagtcgcaaggaaggcctttgcccaaaaattgtgaattattaactgctccaattgattttccatccttcttgtattcaaagtcacatcacttattaactgctccaattgattctcagaataagaaaactgttaagatgcaaaaaatggtttgagactaaggatttttagaaagaaaaaaatgaaaatgaaaggagtgcttgttcggcacttc

SEQ ID NO: 79969 - DNA, 1011 bp, Zea Mays
gtgttgtttatgttatcagagaactctgtcgctctataatgtggtggggatgctctgttaatggcactgcttttaatatttaaatagtgtggtgaacgataaagtaacatgtattctttttattgttcttttcctttgttgggttcatttgtttaatggatgatgagccaatggcttcatggagcagcagtgacagtgagacaccaacttcagtatatgctcaaattatgtcactgtctgcttcgagtcatcatgtccgtgatggacctagatacttcataacttgttctaaccacaacaagacatcataacttacttggattgttgagtttaataagaatgaaagagcctggaccaacaactcttgctttagggattgattagacctcgttggggttgaatttaaactcccaagataatctttacaagacatttggctctccgtggtcaagtgagccagctataggagaacctgattatcagatcccagcttgtttctctgcagagccaccaccagcactgcaagcaagcttctaaatatttagtttttgttagcgttcttctggcattacatattcacatttttttcatcctctgcagccatttcattttcagaagtttcaccctttgacactattctacatcttttacagccctgcctctacatggacttcggcctcgcttccgctgtcaccacgctctggacctgcaccgatgtcacgcacctcgtgcacgtgctcctgcagttccgcctcgtctggtgcggcaagctaatccgttatgcccgcgccgtcgccgcacactacgtctgctccgtcaagggcctctgctttgacctcttcatcattaggggtagaaacagagctttcaatgcatgttggaggtgcacgatgtgatcaatattatccatgcttgataaatgatgacaatggtgatggccatgatatatggtcaacattgtattgatctttttccgagttttcggctatcatgttgtttgctggaatggag

SEQ ID NO: 79970 - DNA, 911 bp, Zea Mays
atgatttggaacaatgtatacgataaaggcttagtcgatgtgatgcatgatcacaaagataatccaaaattcaaaggtcaaaatagttggaatcgtgatggatggaatagtatcactaccaagttcaatgaaaagttccctctagctcatttctctaaacaacaaccgcaagagaaggagagagagcttaaaggatactacaaggcaataagggattcaagaaaagaaagcggggttggtttgaatgacatcatatgcatggtactcgctgaaccataagtttggccaaggctgattcgcgtatctaagttttgcaacaggccattccctcttttttacagtttagaagggctatatgaaggtagtgtggctatcggagagttaaatttcacatcaaccgatgttgatcttcctccaccttcagctccatcaaggagtgcgtctggacaaagtctcaatcccttgagtactaattcacttgatttggatggacaagaaaccacaagtgtgttcgatctatctactaatgctcaatttgtcccagtcaatactaatgaacccactgaagctcaatttgtcccatctaatcaagaatgaagctagagagaaggtggcagtgggagaaagcgtaagaaaagccatgttggattagctcttgaaatttatgtggagtttaaaaagatctaaaatacataaacacttgcaactcttaaagaacataagaggcaagaggatcaattttctattagcaagtgtcataaacacttaaaggaatggatggattaacagccgtggacaaatcaatgctttggagcttttcgtatctgcgacaaacagagagattttcttaacaacaatagagcatgatgttagagaaatttggctcaagcacaaaattagtgatgcatggc

SEQ ID NO: 79971 - DNA, 1511 bp, Zea Mays
gttggtgctctgtcgggctcctggtgtagttcccgtcttgttgatggggcgtgggctgccggtggcgacatcctggttcttgggctagcttgatctcctagggcgagcgctgccagagccgcgaccccgctggtgcagtggccttgcaccggacgatgggcgttagccaggtcttgggcctgtggtgctggagtaacacggtggccgtcggatctggccccaggtcattcccttggctggatgtggaggagggccatgcgtcagcggtggtggcttggctggccggctggcggtccacgttcgggcagctgcgactgctgggacttctattgacgagttgcatcatcaacatgcaggcgtgggggctagcggcatcagtgtgcggtctgcgagggggcctgtggctgcactgtgcaagtgtggtcgcggcttcgtgcaggcgaggtggtggatacgaggaccggttcagcggtgacgatggtgcgccccgtgatggtgtctggttctgtgtgctcaactggagggggtggcggtcgacgcagctttgcggctgctgcagcagtcgatgtgtcgatgcccctctggaagggcttgtgcgggatgtcagggcatcagtgacgacggaggttgcttgctttgacccggggtctttgcctaacgttgtgttgggggtcttcttgggtgaaagcctcggcgacagtgacgcgcgtgggtgccgcttaccctgttgagggcgtcgcactccctaacactgtcttccacgaacaaaagcctggtccatcttggacatgcgacggtggcgtccccgacgtcactcccttcctaaaggcgtcgctattgaagatttgtttcggtcacgacgttgccttttggttgatgcttttcccttctcgtcgtccgatatgcggggtggtggtgcgggttgcagcgtgaagtcgaagctgctacgtcaagggatgtggctcggcaacgatgacgtgaggcgaaccccccttcatcgtggactggattgctttggaggtttttcgtttgccgagggcggggcggaggatcaagtttggaagtctcgttggtgaagaatcagagttgcatcgcatcgggtgtctcgaggcttggcaacgacagcgcactggcggtcttcctccttctgtgccggtgtttgggtgtaatcgtcgtcaggttttctttggctatgtgctgcccgtcttggggagtcggagctgctcatcctttatgttgagctcgtcatcgatgactctagatgtgcttgtgtgtggggctgccatttatgggttgctggtgcaccctatgtaggttttgggcccggtttttcttaaaactgggtcaattccattcttctacttaattgagaggcagagctcctgccattacgttcaaacaaataatcattgcctggctcaggcaagttttcagtcagtagcaacctgccataaccagggccctggatctgattatgcacagattactatggaactccaaatatggtatat

SEQ ID NO: 79972 - DNA, 3833 bp, Zea Mays
caaaactcaaatcgcagttcccgtccatctgtcaccacctcgctctctacattgcggaaccctattctctcatcgcgctctcgcctcaccggcgccgccaatccgccggcgagctagggctttctgatcactggcctctccagtttcccgccaccatgggggtcgacagcgacgacgaggatctcgtcgtctatgggacgcccatcgagcgagaggaggacacctccgcccgcaagcgccgggccgtcgccgaggctggccaactccgcgccctccctgcctggaagcaggaggtgagggatgaagaaggaagaagaagatttcatggtgcatttactggtggattctctgctggcttttacaacactgttggctcaaaagaggggtggacaccacagacatttacatcatcacgaaagaatagagctgagctgacaaagcaaagcatatacaattttcttgatgaagaggatataaaggatatgggtggtaatgctttggagacatctcagcagtacgatacctttggttttacagctgcagagcacgctcgaaaacaggcatccaaggaacaaaaggagagaccatctgctatacctggtcccatacctgatgaattcgtggtccccaccacaaattcaattggtgtgacattgttaatgaaaatgggttggcgccaaggacgctctattagggactcacatgctgattccttatatgaatcacgcaggaatgctagaaaagcttttcttgctctctctggtgccaaggatggtgaagatcaagatcaaagtgctgaaaagcctagcttagataaagctgttgtggggtcagtcggggaaatacctgtatctggaaatacccctgtctatgtgcttcatccaaagcaggattttcatggattaggttacgatccattcaagcatgctcctgagtttagagaagtcaagagagaggggccgcaaacgaaatgatgtttctatgaggggaaatcttctgatttctaactcaggacattatgctcctggttttgggattggagctctcgaagaacttgatgttgaagatgaagatatttatgcatcaggttttgcttatgaacaaactgaagttgatattgagccttcaaaaactgccaatgacagtaattataaacttgatgacagaaaaagaggtttctatctgagctttaagattgcctcaaattctgaatacaaacttgaacggttccttcctcctgagatccctgatgattttgatgctcaacacaaatttccaactccagttcaatctgctgagatgttttctgactctgctcctcttgaggttcctccaccagaagacactagcttgacactattgattgacggctgtgcagctatggttgcacgttgtgggaaacatattgaagatttctacaaggagaaaagtaagacaaacccgcagttccttttcctaagtggaggagctggctgtaactattacatgagaaagttatgggagcatcagcaaaaacatattggtcagcgatggcatgattctgcaaaatcaaagacttcttctgataagttgacagcagagaatcgtgggaaaattcttggtgaaaggccccttgacagaactactaaagtacatagcccatctctttctgcaaaggaagctgttcaactgcaatctaatcttactgagacatttgtcaagccaatatcccttcaaatgttttttttctttgtttgcaaataggatggcctaccagagtatgagaagccttttagcaatgatcctgcgaaacaagttagatttgagcaatttcttagagataaatacaagggaggtcttcgtgctgcaaatgttacacctacaagtactatgtcagaaggtgatcgtgctcgggaaaggcttgattttgaggctgctgcagaggcaattgaaaagggcaagggaaaaaaagttattgatcctttgtcagtgttctctttgcctggaatgaatgagcaacgctttgtagcggcaacccaaccagagagctctgtagtgatacaagatgagaagcccatctatccacaaaggcagcagtttgaatggcggccttctccaatactgtgcaaacgttttgatattgttgaccctttcatggggaagccaatgcatgttcaaagaccaaggagcaagatggagaaccttatctttatgacagaatccaacaaaggaacaaatgatgaagtggagagctcgagtagaagtttgcagcatgcttctatggaagcgctatctgatgttgaatcacgaggagccgctactgatcctgactttgagcccagcagcttgcaaagacctgttgatctttacaaggctatcttttctgatgactcagatgatgatgcagatgaaattcttagcaatcaactagtggatccagtgaagacaagtgaaggtgccaacatggctctcaatcgtcttgtagctgaggatttcctagaatcattgggtaaagaactgggattagaagtcccgccagaaaggcctcatgtttcatctgaacctgaaaaattttcagcttctcgggctagtctctcatcccaggatgaaaggataacaactgctctcaccaaagtaaaggagaatcagtgctctattgacattgtgcaagttggcaatatcaatgaagatactccattagccagtgctgaaacccttggtatgaaatacgagaatcaggagaatagaaccgagaaaatcaggtctcgccctatgaatcgacaaagccagaaccatagtccaaggtctgattcatctagcgaacggcacaggagttggaaaaggagacatcgtcacatctggaatggaactccagaatctgagtccggtgaacgccataggagcaaaagaaaggagtctcattcaagacacagaaaacgcaggagtagaagtccaggtagtgatactcccagtgatacccaacatgagacaaaacggaaggagaaaaggcatcgccgaacttacacatctgatactgattctagtgatcatgaacacagcgaaagatataaatctagtagtaggcgatcatctgacaaagacagaagtagaaagcgtcgtatacaccacaagcacagaagaaaagatcatgtagattaaacatgaatgggaactgctggaatacgactgtacaaacgatggaaggtgcagtgcagggccattgggtttagcaaaccatggaagtttgatgagaacactgggaggtatggaaaatttgctcacaggaagtattctgctcatattggcttcattgcgttcatcacttttgcccgaagttttctttgttggattggtggaataccactgtagcattgctataccacaaagcagtttcatggaaaggaatcgcaatcatctggtcgcttgtagaagtcttaggaaaaagatcttgttgaagtagccgtgtttgcaaaaatgttgatcttgatagcaaatggtttgactacaaatctatggtgtgtgtaaaaccgcaagttgtatgatagctatttttttagtttacttagttatatgataatgtagttttgttttgttttacagaaggtaattaggtttttgagaatggtcaaagcatagcgtaatggttaaggcttctgagtagaacctttaggtcccggttcgttcctattgggggcaaatttctggtttggttaaaaaatcctcattgtgtcccgtctgctccggcgctcacgctcatgggttatgtcttgcgcgtcagcttccagttgggccgttgtagagtatgtgttgatagtgatagtttgggtcaggttcgaggaatttttttgtcgaga

SEQ ID NO: 79973 - DNA, 3860 bp, Zea Mays
caaaactcaaatcgcagttcccgtccatctgtcaccacctcgctctctacattgcggaaccctattctctcatcgcgctctcgcctcaccggcgccgccaatccgccggcgagctagggctttctgatcactggcctctccagtttcccgccaccatgggggtcgacagcgacgacgaggatctcgtcgtctatgggacgcccatcgagcgagaggaggacacctccgcccgcaagcgccgggccgtcgccgaggctggccaactccgcgccctccctgcctggaagcaggaggtgagggatgaagaaggaagaagaagatttcatggtgcatttactggtggattctctgctggcttttacaacactgttggctcaaaagaggggtggacaccacagacatttacatcatcacgaaagaatagagctgagctgacaaagcaaagcatatacaattttcttgatgaagaggatataaaggatatgggtggtaatgctttggagacatctcagcagtacgatacctttggttttacagctgcagagcacgctcgaaaacaggcatccaaggaacaaaaggagagcttcttgcagaccatctgctatacctggtcccatacctgatgaattcgtggtccccaccacaaattcaattggtgtgacattgttaatgaaaatgggttggcgccaaggacgctctattagggactcacatgctgattccttatatgaatcacgcaggaatgctagaaaagcttttcttgctctctctggtgccaaggatggtgaagatcaagatcaaagtgctgaaaagcctagcttagataaagctgttgtggggtcagtcggggaaatacctgtatctggaaatacccctgtctatgtgcttcatccaaagcaggattttcatggattaggttacgatccattcaagcatgctcctgagtttagagacaggaaaacattgcagaagtcaagagagaggggccgcaaacgaaatgatgtttctatgaggggaaatcttctgatttctaactcaggacattatgctcctggttttgggattggagctctcgaagaacttgatgttgaagatgaagatatttatgcatcaggttttgcttatgaacaaactgaagttgatattgagccttcaaaaactgccaatgacagtaattataaacttgatgacagaaaaagaggtttctatctgagctttaagattgcctcaaattctgaatacaaacttgaacggttccttcctcctgagatccctgatgattttgatgctcaacacaaatttccaactccagttcaatctgctgagatgttttctgactctgctcctcttgaggttcctccaccagaagacactagcttgacactattgattgacggctgtgcagctatggttgcacgttgtgggaaacatattgaagatttctacaaggagaaaagtaagacaaacccgcagttccttttcctaagtggaggagctggctgtaactattacatgagaaagttatgggagcatcagcaaaaacatattggtcagcgatggcatgattctgcaaaatcaaagacttcttctgataagttgacagcagagaatcgtgggaaaattcttggtgaaaggccccttgacagaactactaaagtacatagcccatctctttctgcaaaggaagctgttcaactgcaatctaatcttactgagacatttgtcaagccaatatcccttcaaatgttttttttctttgtttgcaaataggatggcctaccagagtatgagaagccttttagcaatgatcctgcgaaacaagttagatttgagcaatttcttagagataaatacaagggaggtcttcgtgctgcaaatgttacacctacaagtactatgtcagaaggtgatcgtgctcgggaaaggcttgattttgaggctgctgcagaggcaattgaaaagggcaagggaaaaaaagttattgatcctttgtcagtgttctctttgcctggaatgaatgagcaacgctttgtagcggcaacccaaccagagagctctgtagtgatacaagatgagaagcccatctatccacaaaggcagcagtttgaatggcggccttctccaatactgtgcaaacgttttgatattgttgaccctttcatggggaagccaatgcatgttcaaagaccaaggagcaagatggagaaccttatctttatgacagaatccaacaaaggaacaaatgatgaagtggagagctcgagtagaagtttgcagcatgcttctatggaagcgctatctgatgttgaatcacgaggagccgctactgatcctgactttgagcccagcagcttgcaaagacctgttgatctttacaaggctatcttttctgatgactcagatgatgatgcagatgaaattcttagcaatcaactagtggatccagtgaagacaagtgaaggtgccaacatggctctcaatcgtcttgtagctgaggatttcctagaatcattgggtaaagaactgggattagaagtcccgccagaaaggcctcatgtttcatctgaacctgaaaaattttcagcttctcgggctagtctctcatcccaggatgaaaggataacaactgctctcaccaaagtaaaggagaatcagtgctctattgacattgtgcaagttggcaatatcaatgaagatactccattagccagtgctgaaacccttggtatgaaatacgagaatcaggagaatagaaccgagaaaatcaggtctcgccctatgaatcgacaaagccagaaccatagtccaaggtctgattcatctagcgaacggcacaggagttggaaaaggagacatcgtcacatctggaatggaactccagaatctgagtccggtgaacgccataggagcaaaagaaaggagtctcattcaagacacagaaaacgcaggagtagaagtccaggtagtgatactcccagtgatacccaacatgagacaaaacggaaggagaaaaggcatcgccgaacttacacatctgatactgattctagtgatcatgaacacagcgaaagatataaatctagtagtaggcgatcatctgacaaagacagaagtagaaagcgtcgtatacaccacaagcacagaagaaaagatcatgtagattaaacatgaatgggaactgctggaatacgactgtacaaacgatggaaggtgcagtgcagggccattgggtttagcaaaccatggaagtttgatgagaacactgggaggtatggaaaatttgctcacaggaagtattctgctcatattggcttcattgcgttcatcacttttgcccgaagttttctttgttggattggtggaataccactgtagcattgctataccacaaagcagtttcatggaaaggaatcgcaatcatctggtcgcttgtagaagtcttaggaaaaagatcttgttgaagtagccgtgtttgcaaaaatgttgatcttgatagcaaatggtttgactacaaatctatggtgtgtgtaaaaccgcaagttgtatgatagctatttttttagtttacttagttatatgataatgtagttttgttttgttttacagaaggtaattaggtttttgagaatggtcaaagcatagcgtaatggttaaggcttctgagtagaacctttaggtcccggttcgttcctattgggggcaaatttctggtttggttaaaaaatcctcattgtgtcccgtctgctccggcgctcacgctcatgggttatgtcttgcgcgtcagcttccagttgggccgttgtagagtatgtgttgatagtgatagtttgggtcaggttcgaggaatttttttgtcgaga

SEQ ID NO: 79974 - DNA, 3810 bp, Zea Mays
caaaactcaaatcgcagttcccgtccatctgtcaccacctcgctctctacattgcggaaccctattctctcatcgcgctctcgcctcaccggcgccgccaatccgccggcgagctagggctttctgatcactggcctctccagtttcccgccaccatgggggtcgacagcgacgacgaggatctcgtcgtctatgggacgcccatcgagcgagaggaggacacctccgcccgcaagcgccgggccgtcgccgaggctggccaactccgcgccctccctgcctggaagcaggaggtgagggatgaagaaggaagaagaagatttcatggtgcatttactggtggattctctgctggcttttacaacactgttggctcaaaagaggggtggacaccacagacatttacatcatcacgaaagaatagagctgagctgacaaagcaaagcatatacaattttcttgatgaagaggatataaaggatatgggtggtaatgctttggagacatctcagcagtacgatacctttggttttacagctgcagagcacgctcgaaaacaggcatccaaggaacaaaaggagagaccatctgctatacctggtcccatacctgatgaattcgtggtccccaccacaaattcaattggtgtgacattgttaatgaaaatgggttggcgccaaggacgctctattagggactcacatgctgattccttatatggaatgctagaaaagcttttcttgctctctctggtgccaaggatggtgaagatcaagatcaaagtgctgaaaagcctagcttagataaagctgttgtggggtcagtcggggaaatacctgtatctggaaatacccctgtctatgtgcttcatccaaagcaggattttcatggattaggttacgatccattcaagcatgctcctgagtttagagacaggaaaacattgcagaagtcaagagagaggggccgcaaacgaaatgatgtttctatgaggggaaatcttctgatttctaactcaggacattatgctcctggttttgggattggagctctcgaagaacttgatgttgaagatgaagatatttatgcatcaggttttgcttatgaacaaactgaagttgatattgagccttcaaaaactgccaatgacagtaattataaacttgatgacagaaaaagaggtttctatctgagctttaagattgcctcaaattctgaatacaaacttgaacggttccttcctcctgagatccctgatgattttgatgctcaacacaaatttccaactccagttcaatctgctgagatgttttctgactctgctcctcttgaggttcctccaccagaagacactagcttgacactattgattgacggctgtgcagctatggttgcacgttgtgggaaacatattgaagatttctacaaggagaaaagtaagacaaacccgcagttccttttcctaagtggaggagctggctgtaactattacatgagaaagttatgggagcatcagcaaaaacatattggtcagcgatggcatgattctgcaaaatcaaagacttcttctgataagttgacagcagagaatcgtgggaaaattcttggtgaaaggccccttgacagaactactaaagtacatagcccatctctttctgcaaaggaagctgttcaactgcaatctaatcttactgagacatttgtcaagccaatatcccttgatggcctaccagagtatgagaagccttttagcaatgatcctgcgaaacaagttagatttgagcaatttcttagagataaatacaagggaggtcttcgtgctgcaaatgttacacctacaagtactatgtcagaaggtgatcgtgctcgggaaaggcttgattttgaggctgctgcagaggcaattgaaaagggcaagggaaaaaaagttattgatcctttgtcagtgttctctttgcctggaatgaatgagcaacgctttgtagcggcaacccaaccagagagctctgtagtgatacaagatgagaagcccatctatccacaaaggcagcagtttgaatggcggccttctccaatactgtgcaaacgttttgatattgttgaccctttcatggggaagccaatgcatgttcaaagaccaaggagcaagatggagaaccttatctttatgacagaatccaacaaaggaacaaatgatgaagtggagagctcgagtagaagtttgcagcatgcttctatggaagcgctatctgatgttgaatcacgaggagccgctactgatcctgactttgagcccagcagcttgcaaagacctgttgatctttacaaggctatcttttctgatgactcagatgatgatgcagatgaaattcttagcaatcaactagtggatccagtgaagacaagtgaaggtgccaacatggctctcaatcgtcttgtagctgaggatttcctagaatcattgggtaaagaactgggattagaagtcccgccagaaaggcctcatgtttcatctgaacctgaaaaattttcagcttctcgggctagtctctcatcccaggatgaaaggataacaactgctctcaccaaagtaaaggagaatcagtgctctattgacattgtgcaagttggcaatatcaatgaagatactccattagccagtgctgaaacccttggtatgaaatacgagaatcaggagaatagaaccgagaaaatcaggtctcgccctatgaatcgacaaagccagaaccatagtccaaggtctgattcatctagcgaacggcacaggagttggaaaaggagacatcgtcacatctggaatggaactccagaatctgagtccggtgaacgccataggagcaaaagaaaggagtctcattcaagacacagaaaacgcaggagtagaagtccaggtagtgatactcccagtgatacccaacatgagacaaaacggaaggagaaaaggcatcgccgaacttacacatctgatactgattctagtgatcatgaacacagcgaaagatataaatctagtagtaggcgatcatctgacaaagacagaagtagaaagcgtcgtatacaccacaagcacagaagaaaagatcatgtagattaaacatgaatgggaactgctggaatacgactgtacaaacgatggaaggtgcagtgcagggccattgggtttagcaaaccatggaagtttgatgagaacactgggaggtatggaaaatttgctcacaggaagtattctgctcatattggcttcattgcgttcatcacttttgcccgaagttttctttgttggattggtggaataccactgtagcattgctataccacaaagcagtttcatggaaaggaatcgcaatcatctggtcgcttgtagaagtcttaggaaaaagatcttgttgaagtagccgtgtttgcaaaaatgttgatcttgatagcaaatggtttgactacaaatctatggtgtgtgtaaaaccgcaagttgtatgatagctatttttttagtttacttagttatatgataatgtagttttgttttgttttacagaaggtaattaggtttttgagaatggtcaaagcatagcgtaatggttaaggcttctgagtagaacctttaggtcccggttcgttcctattgggggcaaatttctggtttggttaaaaaatcctcattgtgtcccgtctgctccggcgctcacgctcatgggttatgtcttgcgcgtcagcttccagttgggccgttgtagagtatgtgttgatagtgatagtttgggtcaggttcgaggaatttttttgtcgaga

SEQ ID NO: 79975 - DNA, 3762 bp, Zea Mays
caaaactcaaatcgcagttcccgtccatctgtcaccacctcgctctctacattgcggaaccctattctctcatcgcgctctcgcctcaccggcgccgccaatccgccggcgagctagggctttctgatcactggcctctccagtttcccgccaccatgggggtcgacagcgacgacgaggatctcgtcgtctatgggacgcccatcgagcgagaggaggacacctccgcccgcaagcgccgggccgtcgccgaggctggccaactccgcgccctccctgcctggaagcaggaggtgagggatgaagaaggaagaagaagatttcatggtgcatttactggtggattctctgctggcttttacaacactgttggctcaaaagaggggtggacaccacagacatttacatcatcacgaaagaatagagctgagctgacaaagcaaagcatatacaattttcttgatgaagaggatataaagctgcagagcacgctcgaaaacaggcatccaaggaacaaaaggagagaccatctgctatacctggtcccatacctgatgaattcgtggtccccaccacaaattcaattggtgtgacattgttaatgaaaatgggttggcgccaaggacgctctattagggactcacatgctgattccttatatgaatcacgcaggaatgctagaaaagcttttcttgctctctctggtgccaaggatggtgaagatcaagatcaaagtgctgaaaagcctagcttagataaagctgttgtggggtcagtcggggaaatacctgtatctggaaatacccctgtctatgtgcttcatccaaagcaggattttcatggattaggttacgatccattcaagcatgctcctgagtttagagacaggaaaacattgcagaagtcaagagagaggggccgcaaacgaaatgatgtttctatgaggggaaatcttctgatttctaactcaggacattatgctcctggttttgggattggagctctcgaagaacttgatgttgaagatgaagatatttatgcatcaggttttgcttatgaacaaactgaagttgatattgagccttcaaaaactgccaatgacagtaattataaacttgatgacagaaaaagaggtttctatctgagctttaagattgcctcaaattctgaatacaaacttgaacggttccttcctcctgagatccctgatgattttgatgctcaacacaaatttccaactccagttcaatctgctgagatgttttctgactctgctcctcttgaggttcctccaccagaagacactagcttgacactattgattgacggctgtgcagctatggttgcacgttgtgggaaacatattgaagatttctacaaggagaaaagtaagacaaacccgcagttccttttcctaagtggaggagctggctgtaactattacatgagaaagttatgggagcatcagcaaaaacatattggtcagcgatggcatgattctgcaaaatcaaagacttcttctgataagttgacagcagagaatcgtgggaaaattcttggtgaaaggccccttgacagaactactaaagtacatagcccatctctttctgcaaaggaagctgttcaactgcaatctaatcttactgagacatttgtcaagccaatatcccttgatggcctaccagagtatgagaagccttttagcaatgatcctgcgaaacaagttagatttgagcaatttcttagagataaatacaagggaggtcttcgtgctgcaaatgttacacctacaagtactatgtcagaaggtgatcgtgctcgggaaaggcttgattttgaggctgctgcagaggcaattgaaaagggcaagggaaaaaaagttattgatcctttgtcagtgttctctttgcctggaatgaatgagcaacgctttgtagcggcaacccaaccagagagctctgtagtgatacaagatgagaagcccatctatccacaaaggcagcagtttgaatggcggccttctccaatactgtgcaaacgttttgatattgttgaccctttcatggggaagccaatgcatgttcaaagaccaaggagcaagatggagaaccttatctttatgacagaatccaacaaaggaacaaatgatgaagtggagagctcgagtagaagtttgcagcatgcttctatggaagcgctatctgatgttgaatcacgaggagccgctactgatcctgactttgagcccagcagcttgcaaagacctgttgatctttacaaggctatcttttctgatgactcagatgatgatgcagatgaaattcttagcaatcaactagtggatccagtgaagacaagtgaaggtgccaacatggctctcaatcgtcttgtagctgaggatttcctagaatcattgggtaaagaactgggattagaagtcccgccagaaaggcctcatgtttcatctgaacctgaaaaattttcagcttctcgggctagtctctcatcccaggatgaaaggataacaactgctctcaccaaagtaaaggagaatcagtgctctattgacattgtgcaagttggcaatatcaatgaagatactccattagccagtgctgaaacccttggtatgaaatacgagaatcaggagaatagaaccgagaaaatcaggtctcgccctatgaatcgacaaagccagaaccatagtccaaggtctgattcatctagcgaacggcacaggagttggaaaaggagacatcgtcacatctggaatggaactccagaatctgagtccggtgaacgccataggagcaaaagaaaggagtctcattcaagacacagaaaacgcaggagtagaagtccaggtagtgatactcccagtgatacccaacatgagacaaaacggaaggagaaaaggcatcgccgaacttacacatctgatactgattctagtgatcatgaacacagcgaaagatataaatctagtagtaggcgatcatctgacaaagacagaagtagaaagcgtcgtatacaccacaagcacagaagaaaagatcatgtagattaaacatgaatgggaactgctggaatacgactgtacaaacgatggaaggtgcagtgcagggccattgggtttagcaaaccatggaagtttgatgagaacactgggaggtatggaaaatttgctcacaggaagtattctgctcatattggcttcattgcgttcatcacttttgcccgaagttttctttgttggattggtggaataccactgtagcattgctataccacaaagcagtttcatggaaaggaatcgcaatcatctggtcgcttgtagaagtcttaggaaaaagatcttgttgaagtagccgtgtttgcaaaaatgttgatcttgatagcaaatggtttgactacaaatctatggtgtgtgtaaaaccgcaagttgtatgatagctatttttttagtttacttagttatatgataatgtagttttgttttgttttacagaaggtaattaggtttttgagaatggtcaaagcatagcgtaatggttaaggcttctgagtagaacctttaggtcccggttcgttcctattgggggcaaatttctggtttggttaaaaaatcctcattgtgtcccgtctgctccggcgctcacgctcatgggttatgtcttgcgcgtcagcttccagttgggccgttgtagagtatgtgttgatagtgatagtttgggtcaggttcgaggaatttttttgtcgaga

SEQ ID NO: 79976 - DNA, 3755 bp, Zea Mays
aactcaaatcgcagttcccgtccatctgtcaccacctcgctctctacattgcggaaccctattctctcatcgcgctctcgcctcaccggcgccgccaatccgccggcgagctagggctttctgatcactggcctctccagtttcccgccaccatgggggtcgacagcgacgacgaggatctcgtcgtctatgggacgcccatcgagcgagaggaggacacctccgcccgcaagcgccgggccgtcgccgaggctggccaactccgcgccctccctgcctggaagcaggaggtgagggatgaagaaggaagaagaagatttcatggtgcatttactggtggattctctgctggcttttacaacactgttggctcaaaagaggggtggacaccacagacatttacatcatcacgaaagaatagagctgagctgacaaagcaaagcatatacaattttcttgatgaagaggatataaaggatatgggtggtaatgctttggagacatctcagcagtacgatacctttggttttacagctgcagagcacgctcgaaaacaggcatccaaggaacaaaaggagaggtgtgacattgttaatgaaaatgggttggcgccaaggacgctctattagggactcacatgctgattccttatatgaatcacgcaggaatgctagaaaagcttttcttgctctctctggtgccaaggatggtgaagatcaagatcaaagtgctgaaaagcctagcttagataaagctgttgtggggtcagtcggggaaatacctgtatctggaaatacccctgtctatgtgcttcatccaaagcaggattttcatggattaggttacgatccattcaagcatgctcctgagtttagagacaggaaaacattgcagaagtcaagagagaggggccgcaaacgaaatgatgtttctatgaggggaaatcttctgatttctaactcaggacattatgctcctggttttgggattggagctctcgaagaacttgatgttgaagatgaagatatttatgcatcaggttttgcttatgaacaaactgaagttgatattgagccttcaaaaactgccaatgacagtaattataaacttgatgacagaaaaagaggtttctatctgagctttaagattgcctcaaattctgaatacaaacttgaacggttccttcctcctgagatccctgatgattttgatgctcaacacaaatttccaactccagttcaatctgctgagatgttttctgactctgctcctcttgaggttcctccaccagaagacactagcttgacactattgattgacggctgtgcagctatggttgcacgttgtgggaaacatattgaagatttctacaaggagaaaagtaagacaaacccgcagttccttttcctaagtggaggagctggctgtaactattacatgagaaagttatgggagcatcagcaaaaacatattggtcagcgatggcatgattctgcaaaatcaaagacttcttctgataagttgacagcagagaatcgtgggaaaattcttggtgaaaggccccttgacagaactactaaagtacatagcccatctctttctgcaaaggaagctgttcaactgcaatctaatcttactgagacatttgtcaagccaatatcccttgatggcctaccagagtatgagaagccttttagcaatgatcctgcgaaacaagttagatttgagcaatttcttagagataaatacaagggaggtcttcgtgctgcaaatgttacacctacaagtactatgtcagaaggtgatcgtgctcgggaaaggcttgattttgaggctgctgcagaggcaattgaaaagggcaagggaaaaaaagttattgatcctttgtcagtgttctctttgcctggaatgaatgagcaacgctttgtagcggcaacccaaccagagagctctgtagtgatacaagatgagaagcccatctatccacaaaggcagcagtttgaatggcggccttctccaatactgtgcaaacgttttgatattgttgaccctttcatggggaagccaatgcatgttcaaagaccaaggagcaagatggagaaccttatctttatgacagaatccaacaaaggaacaaatgatgaagtggagagctcgagtagaagtttgcagcatgcttctatggaagcgctatctgatgttgaatcacgaggagccgctactgatcctgactttgagcccagcagcttgcaaagacctgttgatctttacaaggctatcttttctgatgactcagatgatgatgcagatgaaattcttagcaatcaactagtggatccagtgaagacaagtgaaggtgccaacatggctctcaatcgtcttgtagctgaggatttcctagaatcattgggtaaagaactgggattagaagtcccgccagaaaggcctcatgtttcatctgaacctgaaaaattttcagcttctcgggctagtctctcatcccaggatgaaaggataacaactgctctcaccaaagtaaaggagaatcagtgctctattgacattgtgcaagttggcaatatcaatgaagatactccattagccagtgctgaaacccttggtatgaaatacgagaatcaggagaatagaaccgagaaaatcaggtctcgccctatgaatcgacaaagccagaaccatagtccaaggtctgattcatctagcgaacggcacaggagttggaaaaggagacatcgtcacatctggaatggaactccagaatctgagtccggtgaacgccataggagcaaaagaaaggagtctcattcaagacacagaaaacgcaggagtagaagtccaggtagtgatactcccagtgatacccaacatgagacaaaacggaaggagaaaaggcatcgccgaacttacacatctgatactgattctagtgatcatgaacacagcgaaagatataaatctagtagtaggcgatcatctgacaaagacagaagtagaaagcgtcgtatacaccacaagcacagaagaaaagatcatgtagattaaacatgaatgggaactgctggaatacgactgtacaaacgatggaaggtgcagtgcagggccattgggtttagcaaaccatggaagtttgatgagaacactgggaggtatggaaaatttgctcacaggaagtattctgctcatattggcttcattgcgttcatcacttttgcccgaagttttctttgttggattggtggaataccactgtagcattgctataccacaaagcagtttcatggaaaggaatcgcaatcatctggtcgcttgtagaagtcttaggaaaaagatcttgttgaagtagccgtgtttgcaaaaatgttgatcttgatagcaaatggtttgactacaaatctatggtgtgtgtaaaaccgcaagttgtatgatagctatttttttagtttacttagttatatgataatgtagttttgttttgttttacagaaggtaattaggtttttgagaatggtcaaagcatagcgtaatggttaaggcttctgagtagaacctttaggtcccggttcgttcctattgggggcaaatttctggtttggttaaaaaatcctcattgtgtcccgtctgctccggcgctcacgctcatgggttatgtcttgcgcgtcagcttccagttgggccgttgtagagtatgtgttgatagtgatagtttgggtcaggttcgaggaatttttttgtcgaga

SEQ ID NO: 79977 - DNA, 3845 bp, Zea Mays
ctcaaatcgcagttcccgtccatctgtcaccacctcgctctctacattgcggaaccctattctctcatcgcgctctcgcctcaccggcgccgccaatccgccggcgagctagggctttctgatcactggcctctccagtttcccgccaccatgggggtcgacagcgacgacgaggatctcgtcgtctatgggacgcccatcgagcgagaggaggacacctccgcccgcaagcgccgggccgtcgccgaggctggccaactccgcgccctccctgcctggaagcaggaggtgagggatgaagaaggaagaagaagatttcatggtgcatttactggtggattctctgctggcttttacaacactgttggctcaaaagaggggtggacaccacagacatttacatcatcacgaaagaatagagctgagctgacaaagcaaagcatatacaattttcttgatgaagaggatataaaggatatgggtggtaatgctttggagacatctcagcagtacgatacctttggttttacagctgcagagcacgctcgaaaacaggcatccaaggaacaaaaggagagaccatctgctatacctggtcccatacctgatgaattcgtggtccccaccacaaattcaattggtgtgacattgttaatgaaaatgggttggcgccaaggacgctctattagggactcacatgctgattccttatatgaatcacgcaggaatgctagaaaagcttttcttgctctctctggtgccaaggatggtgaagatcaagatcaaagtgctgaaaagcctagcttagataaagctgttgtggggtcagtcggggaaatacctgtatctggaaatacccctgtctatgtgcttcatccaaagcaggattttcatggattaggttacgatccattcaagcatgctcctgagtttagagacaggaaaacattgcagaagtcaagagagaggggccgcaaacgaaatgatgtttctatgaggggaaatcttctgatttctaactcaggacattatgctcctggttttgggattggagctctcgaagaacttgatgttgaagatgaagatatttatgcatcaggttttgcttatgaacaaactgaagttgatattgagccttcaaaaactgccaatgacagtaattataaacttgatgacagaaaaagaggtttctatctgagctttaagattgcctcaaattctgaatacaaacttgaacggttccttcctcctgagatccctgatgattttgatgctcaacacaaatttccaactccagttcaatctgctgagatgttttctgactctgctcctcttgaggttcctccaccagaagacactagcttgacactattgattgacggctgtgcagctatggttgcacgttgtgggaaacatattgaagatttctacaaggagaaaagtaagacaaacccgcagttccttttcctaagtggaggagctggctgtaactattacatgagaaagttatgggagcatcagcaaaaacatattggtcagcgatggcatgattctgcaaaatcaaagacttcttctgataagttgacagcagagaatcgtgggaaaattcttggtgaaaggccccttgacagaactactaaagtacatagcccatctctttctgcaaaggaagctgttcaactgcaatctaatcttactgagacatttgtcaagccaatatcccttcaaatgttttttttctttgtttgcaaataggatggcctaccagagtatgagaagccttttagcaatgatcctgcgaaacaagttagatttgagcaatttcttagagataaatacaagggaggtcttcgtgctgcaaatgttacacctacaagtactatgtcagaaggtgatcgtgctcgggaaaggcttgattttgaggctgctgcagaggcaattgaaaagggcaagggaaaaaaagttattgatcctttgtcagtgttctctttgcctggaatgaatgagcaacgctttgtagcggcaacccaaccagagagctctgtagtgatacaagatgagaagcccatctatccacaaaggcagcagtttgaatggcggccttctccaatactgtgcaaacgttttgatattgttgaccctttcatggggaagccaatgcatgttcaaagaccaaggagcaagatggagaaccttatctttatgacagaatccaacaaaggaacaaatgatgaagtggagagctcgagtagaagtttgcagcatgcttctatggaagcgctatctgatgttgaatcacgaggagccgctactgatcctgactttgagcccagcagcttgcaaagacctgttgatctttacaaggctatcttttctgatgactcagatgatgatgcagatgaaattcttagcaatcaactagtggatccagtgaagacaagtgaaggtgccaacatggctctcaatcgtcttgtagctgaggatttcctagaatcattgggtaaagaactgggattagaagtcccgccagaaaggcctcatgtttcatctgaacctgaaaaattttcagcttctcgggctagtctctcatcccaggatgaaaggataacaactgctctcaccaaagtaaaggagaatcagtgctctattgacattgtgcaagttggcaatatcaatgaagatactccattagccagtgctgaaacccttggtatgaaatacgagaatcaggagaatagaaccgagaaaatcaggtctcgccctatgaatcgacaaagccagaaccatagtccaaggtctgattcatctagcgaacggcacaggagttggaaaaggagacatcgtcacatctggaatggaactccagaatctgagtccggtgaacgccataggagcaaaagaaaggagtctcattcaagacacagaaaacgcaggagtagaagtccaggtagtgatactcccagtgatacccaacatgagacaaaacggaaggagaaaaggcatcgccgaacttacacatctgatactgattctagtgatcatgaacacagcgaaagatataaatctagtagtaggcgatcatctgacaaagacagaagtagaaagcgtcgtatacaccacaagcacagaagaaaagatcatgtagattaaacatgaatgggaactgctggaatacgactgtacaaacgatggaaggtgcagtgcagggccattgggtttagcaaaccatggaagtttgatgagaacactgggaggtatggaaaatttgctcacaggaagtattctgctcatattggcttcattgcgttcatcacttttgcccgaagttttctttgttggattggtggaataccactgtagcattgctataccacaaagcagtttcatggaaaggaatcgcaatcatctggtcgcttgtagaagtcttaggaaaaagatcttgttgaagtagccgtgtttgcaaaaatgttgatcttgatagcaaatggtttgactacaaatctatggtgtgtgtaaaaccgcaagttgtatgatagctatttttttagtttacttagttatatgataatgtagttttgttttgttttacagaaggtaattaggtttttgagaatggtcaaagcatagcgtaatggttaaggcttctgagtagaacctttaggtcccggttcgttcctattgggggcaaatttctggtttggttaaaaaatcctcattgtgtcccgtctgctccggcgctcacgctcatgggttatgtcttgcgcgtcagcttccagttgggccgttgtagagtatgtgttgatagtgatagtttgggtcaggttcgaggaatttttttgtcgaga

SEQ ID NO: 79978 - DNA, 2631 bp, Zea Mays
agaagaaaaaacgggtaagataagccttacaaacacacgacacacaacaaaaaagttccttcctcctgagatccctgatgattttgatgctcaacacaaatttccaactccagttcaatctgctgagatgttttctgactctgctcctcttgaggttcctccaccagaagacactagcttgacactattgattgacggctgtgcagctatggttgcacgttgtgggaaacatattgaagatttctacaaggagaaaagtaagacaaacccgcagttccttttcctaagtggaggagctggctgtaactattacatgagaaagttatgggagcatcagcaaaaacatattggtcagcgatggcatgattctgcaaaatcaaagacttcttctgataagttgacagcagagaatcgtgggaaaattcttggtgaaaggccccttgacagaactactaaagtacatagcccatctctttctgcaaaggaagctgttcaactgcaatctaatcttactgagacatttgtcaagccaatatcccttgatggcctaccagagtatgagaagccttttagcaatgatcctgcgaaacaagttagatttgagcaatttcttagagataaatacaagggaggtcttcgtgctgcaaatgttacacctacaagtactatgtcagaaggtgatcgtgctcgggaaaggcttgattttgaggctgctgcagaggcaattgaaaagggcaagggaaaaaaagttattgatcctttgtcagtgttctctttgcctggaatgaatgagcaacgctttgtagcggcaacccaaccagagagctctgtagtgatacaagatgagaagcccatctatccacaaaggcagcagtttgaatggcggccttctccaatactgtgcaaacgttttgatattgttgaccctttcatggggaagccaatgcatgttcaaagaccaaggagcaagatggagaaccttatctttatgacagaatccaacaaaggaacaaatgatgaagtggagagctcgagtagaagtttgcagcatgcttctatggaagcgctatctgatgttgaatcacgaggagccgctactgatcctgactttgagcccagcagcttgcaaagacctgttgatctttacaaggctatcttttctgatgactcagatgatgatgcagatgaaattcttagcaatcaactagtggatccagtgaagacaagtgaaggtgccaacatggctctcaatcgtcttgtagctgaggatttcctagaatcattgggtaaagaactgggattagaagtcccgccagaaaggcctcatgtttcatctgaacctgaaaaattttcagcttctcgggctagtctctcatcccaggatgaaaggataacaactgctctcaccaaagtaaaggagaatcagtgctctattgacattgtgcaagttggcaatatcaatgaagatactccattagccagtgctgaaacccttggtatgaaatacgagaatcaggagaatagaaccgagaaaatcaggtctcgccctatgaatcgacaaagccagaaccatagtccaaggtctgattcatctagcgaacggcacaggagttggaaaaggagacatcgtcacatctggaatggaactccagaatctgagtccggtgaacgccataggagcaaaagaaaggagtctcattcaagacacagaaaacgcaggagtagaagtccaggtagtgatactcccagtgatacccaacatgagacaaaacggaaggagaaaaggcatcgccgaacttacacatctgatactgattctagtgatcatgaacacagcgaaagatataaatctagtagtaggcgatcatctgacaaagacagaagtagaaagcgtcgtatacaccacaagcacagaagaaaagatcatgtagattaaacatgaatgggaactgctggaatacgactgtacaaacgatggaaggtgcagtgcagggccattgggtttagcaaaccatggaagtttgatgagaacactgggaggtatggaaaatttgctcacaggaagtattctgctcatattggcttcattgcgttcatcacttttgcccgaagttttctttgttggattggtggaataccactgtagcattgctataccacaaagcagtttcatggaaaggaatcgcaatcatctggtcgcttgtagaagtcttaggaaaaagatcttgttgaagtagccgtgtttgcaaaaatgttgatcttgatagcaaatggtttgactacaaatctatggtgtgtgtaaaaccgcaagttgtatgatagctatttttttagtttacttagttatatgataatgtagttttgttttgttttacagaaggtaattaggtttttgagaatggtcaaagcatagcgtaatggttaaggcttctgagtagaacctttaggtcccggttcgttcctattgggggcaaatttctggtttggttaaaaaatcctcattgtgtcccgtctgctccggcgctcacgctcatgggttatgtcttgcgcgtcagcttccagttgggccgttgtagagtatgtgttgatagtgatagtttgggtcaggttcgaggaatttttttgtcgaga

SEQ ID NO: 79979 - DNA, 5772 bp, Zea Mays
cgcactaatatattaggcgaacactaaagacaagggaggaaagacatatctgagggagatatgacacggcggcagcagcagatccagctatcaccatgacggactcggggaggaggccaccaactaccaaacccatcgcacacgtcctgctcccctccccttctcgtcgcgtcggcattgcattgcacgcctcgcccggcgcctgctcccttgcattttccattgacctcccccccgccccctctcgtccgtctcctcctccccaaagcttcgaattttcccgagccggagccacaccttctttctccccgcgtcccacgattcgccgtcggaaagaggcaaggcaacggaaaccgagccgtcctgcgtgagctggggcggggtcccccgtctgggtgccttccgtgccactctcctgcaacgcggggcgcattgtcttgctgcccccttgagaagggaagattcccgccatctattaatcctcctctcgtatgccgttttctgcctggggaggacacaaacgcagcgccgcgggaaagccgggcgccgcatggatcgaggcatccggtgttcctgtctcaagacccagttttggcgtcttggcgtagcgggacggaggaggacgacggggtttcggagcgcagggtcgcggcggcacgccgggatctccgaggcgccgcgctgttgagtgttgacgccttctcgttcctgggaggaggtgatttctctgctgagggcctggggagtctcttggttcagtccctctccctctgcagtttatttgctttttttaggtaggtggagtgtggagttgttgggtgggagagggcctggaatttatttcgagctgcttctttggagaccattgtttctcgaatctgagttcctcttcttcggagggagttgtcaattgcgttctgattgatttggacaagatcggaaggaactggcactctcggtgggcgtacaaaaactctgagcttgtggccttatcgacttcttgggggcatctgggagtagcttcagcgattcacttgagtctggaggaatggcgccgaccaagaggatggagaagctcaagctcagcacattgttgactttcatgcgttgccacaggggctctagtgatgaccactcacggattgggacagtggggttctcccgagtcgtttacgtcaacgagcctgatatgcttgaagaggagggattcaactaccccttgaatgaagtgtcgacgacaaagtacactctggccaccttccttcccaagtccctcttcgagcagttcaggagggtggccaatttctacttccttgtctctggtatccttgccttgactccacttgcaccttacacggcagtgagcgcgcttgcaccgctctgtgtcgtgattgtagccaccatggcaaaagaaggggttgaggactggcggaggaaacaacaggatcatgagctcaataatcggatagtcaaagtgcataggggaagtggccattttgaagagacaaaatggaagaatatcaaagttggagatgtaataaaactggagaaggataatttctttcccgctgatatgattctgctttcatctagctatccggatggaatatgttatgtagagaccatgaaccttgatggtgaaacaaatttgaaaattaaacaagctctcgaggtgacattggatttacaggaggacacaaagttcagagaagtcagacaaacaataaaatgtgaagacccaaatgcgaacctctactcctttgtcggttcaatggaatggagaggccagcagtatcccctgtcacccctacagcttcttctccgggactcaaaactacggaacacagactacatatatggggctgtcatcttcacaggtcatgatacaaaagtgatgcaaaatgcaacagatccaccatctaaaagaagtaagattgagaagaaaatggatcaaattatttacgttctgatgtcttctctactcatgattgcattacttggttccatcttctttgggatctggaccaaagaggacgtaagagatggtgggctcaaacggtggtatcttcggccagatgctactactatattctatgatccaaagagagcagctctggcatctttctttcatttgttgacggccttgatgctgtacagctacttcatacccatttctttgtatatatccattgagatagtcaagatcttgcaagctctatttatcaaccaggatattgaaatgtatcatgaagaatcagataagccaactcatgctcgtacttcgaatctaaatgaagaactaggtatggttgatacaattctatccgataagactggaacattaacatgcaacatgatggagttcatcaagtgttcaattgctggcacagcctatggtaagggcgtcactgaagttgagagagctatggctatgaggaaaggtgacagtttagatgatgacattgaaaatggagactacaaagacaaaaaaaatcacaacagtcccaatgttaaagggttcaatttcaaggatccacgaataatggatgggaattggattcatgagcctaacaaagatatgataagagattttttccggctcctagccatctgccacacatgcattgctgaaatagacgaaaatgagaaggtttcatacgaagctgagtcccctgatgaagctgcatttgttattgcggcaagagaactagggtttgagttttacaagaggtcactggcaactataattattcgtgagcaggatccaagttggaatgttgttgagaaaaggtacagaaagtatgaactcttaaatatattggagttcagtagctcaaggagacggatgtccgtgatagtcaaagaaccagagggaaggatattacttctcagcaagggtgctgatagtgtgatgttcaaaaggcttgcaccaaatggaagaaaatatgaagaagaaacaagaagacacataaatgagtattctgactctggtctaagaaccttggttctagcataccgtgtcttagatgagaaagagtacaaggaattcaatgaaaaactgaacactgccaaagcatctgtgcctgaatgcatagacaagcttgcgcaagccggaattaagatatgggtcctgactggcgacaagatggagacagctatcaatattgggtttgcatgtagcctgcttaggcaagacatgacacagataattgtcacactggaacaacctgacatcatcgcgttggagaaagatggtgacaaatataaaatttttaaggcatcaaagaaaaaggttatgagtcagatagaggatggaatcaaacaaattccaccttcaactaaaattagcactgcatcatttgcactaatcattgatggtaaatcaataccttatgctttggaagatgatgtcaagtttaagttcttggatcttgctatcaactgtgcatcagtgatatgttgccgatcttcaccaaaacagaaggcactggtcacaagatttgttaagcaagtaacacataaagtgactttagcaataggtgatggggcaaatgatgttggcatgcttcaagaagctgacataggggttggcatcagtggtgctgaaggaatgcaggctgtcatggctagtgatgttgctgttgcccaattccgctttttggaacggctacttctggtgcatggacattggtgttaccggcgtatttcagtgatgatatgctatttcttctacaagaatgttacttttggtgtcactctctttctctacgaagcatttgcatctttctctgggaagccagcttataatgattggttcttgtcactctataatgtcttcttcacctcccttcctgtcattgctttgggagtctttgaccaggatgtgtctgccaggctatgcatacagtatccacagctataccaagaaggagtgcagaatatattattcagttggtgtcggatacttggctggatgcttaacggtgttatgaatgctgtcttaatatttttcttctgcatcacaacctttgaggaccaggtgttccgccgggatggtcaagttgcaggcttggatgctctaggcgtcgccatgtacacttgtattgtatgggttgtcaactgtcaaatggcgctctctgtgaactacttcaccataatccagcacatattcatatggggcagcattgcagtatggtacctcttcctcatagtttatggttccatgaacccgaggttctcaactacagcctacatggtcttcatcgaacagctggccccagccctctcattttggttggtgacactttttgttgtgctggcaacacttgtcccctacttcacgtatgccgcgatccagatccggtttttcccaatgttccacaacaagattcagtggaagcggtacttggggaaggctgaagacccagaagtggcaaggcagttgtcatcacgacaccggacgtcgtcgcagcagaggatggtcggtatctctgctcgtcgggacggcaaggctatgcaaataacaagggagacagagatagaagttcaggagtagcattgtcagtagattttgcgttttgtacagcttataggatattgtctccggcaggatgacagctgaactgattggaaaccggaatgtttctggattgctgcttctatgatggctgtcatggaagctgatggtagagcaagactacaaattgcttagataggtcacaactcacaaggaggccaagagatcctgttgtaaagttcaattttagcagttcaaggctgtgtttcccccccccccccccctgcttctcttacatcatagatgcttgtaaccagattggtagaatttcgttgtttttattcctctttaccccccttgcctgccccctctcaactgtattttaaacaataatgtaaggcatcttgtttgagtggctttcatgctttattttggaaagaatcataattgagtgatatagaatgtaagattggcctctaatatttgtttccatgacttttcaaatatggggaggccacaaaggtgcctttgtgccatcaccaaaaaatttcgtacacttgttcttattcaattttcctaggaaaaaattattcttctgtactactgattaataagtggaagaaaatgggtattttggagaaaacaacactttctatgtgaaaacaacatatcctgatttgattcaactgttaatggtgagccagcatggcaaaaaaataaaaaaattgtatagaactaagataaaatcaaggcttactgtatgaaagatgaataaatgaaccaagaggtaaataaacttcaaatagtgacacagagagaactcaaggatcaacattacatggatttacaatatttgtcttactcctttccgttctattattagtataccatactaacctgctgcagttacaaccgtctccagtagcttatccaaactcatattcaaaatactatctacaaacagtacaatatacagtgtaaaatagatatatttagtgaccatgtgggtgcaatgtacagtggtttacccatatgatcatcaaaaccacagttttgtactatagattataccgtttgtagagcttgtagagtatagcttgaatacatgtatgagtctgctggagatgatttaagggaagcaaagaaagcaactaacttgagccgctgagcgcccggttaggttgacaggtttacgtttcacggctccggcagcggcagcggcagtggctgcgatgcagccggctgctttgtctccg

SEQ ID NO: 79980 - DNA, 5759 bp, Zea Mays
cgcactaatatattaggcgaacactaaagacaagggaggaaagacatatctgagggagatatgacacggcggcagcagcagatccagctatcaccatgacggactcggggaggaggccaccaactaccaaacccatcgcacacgtcctgctcccctccccttctcgtcgcgtcggcattgcattgcacgcctcgcccggcgcctgctcccttgcattttccattgacctcccccccgccccctctcgtccgtctcctcctccccaaagcttcgaattttcccgagccggagccacaccttctttctccccgcgtcccacgattcgccgtcggaaagaggcaaggcaacggaaaccgagccgtcctgcgtgagctggggcggggtcccccgtctgggtgccttccgtgccactctcctgcaacgcggggcgcattgtcttgctgcccccttgagaagggaagattcccgccatctattaatcctcctctcgtatgccgttttctgcctggggaggacacaaacgcagcgccgcgggaaagccgggcgccgcatggatcgaggcatccggtgttcctgtctcaagacccagttttggcgtcttggcgtagcgggacggaggaggacgacggggtttcggagcgcagggtcgcggcggcacgccgggatctccgaggcgccgcgctgttgagtgttgacgccttctcgttcctgggaggaggtgatttctctgctgagggcctggggagtctcttggttcagtccctctccctctgcagtttatttgctttttttaggtaggtggagtgtggagttgttgggtgggagagggcctggaatttatttcgagctgcttctttggagaccattgtttctcgaatctgagttcctcttcttcggagggagttgtcaattgcgttctgattgatttggacaagatcggaaggaactggcactctcggtgggcgtacaaaaactctgagcttgtggccttatcgacttcttgggggcatctgggagtagcttcagcgattcacttgagtctggaggaatggcgccgaccaagaggatggagaagctcaagctcagcacattgttgactttcatgcgttgccacaggggctctagtgatgaccactcacggattgggacagtggggttctcccgagtcgtttacgtcaacgagcctgatatgcttgaagaggagggattcaactaccccttgaatgaagtgtcgacgacaaagtacactctggccaccttccttcccaagtccctcttcgagcagttcaggagggtggccaatttctacttccttgtctctggtatccttgccttgactccacttgcaccttacacggcagtgagcgcgcttgcaccgctctgtgtcgtgattgtagccaccatggcaaaagaaggggttgaggactggcggaggaaacaacaggatcatgagctcaataatcggatagtcaaagtgcataggggaagtggccattttgaagagacaaaatggaagaatatcaaagttggagatgtaataaaactggagaaggataatttctttcccgctgatatgattctgctttcatctagctatccggatggaatatgttatgtagagaccatgaaccttgatggtgaaacaaatttgaaaattaaacaagctctcgaggtgacattggatttacaggaggacacaaagttcagagaagtcagacaaacaataaaatgtgaagacccaaatgcgaacctctactcctttgtcggttcaatggaatggagaggccagcagtatcccctgtcacccctacagcttcttctccgggactcaaaactacggaacacagactacatatatggggctgtcatcttcacaggtcatgatacaaaagtgatgcaaaatgcaacagatccaccatctaaaagaagtaagattgagaagaaaatggatcaaattatttacgttctgatgtcttctctactcatgattgcattacttggttccatcttctttgggatctggaccaaagaggacgtaagagatggtgggctcaaacggtggtatcttcggccagatgctactactatattctatgatccaaagagagcagctctggcatctttctttcatttgttgacggccttgatgctgtacagctacttcatacccatttctttgtatatatccattgagatagtcaagatcttgcaagctctatttatcaaccaggatattgaaatgtatcatgaagaatcagataagccaactcatgctcgtacttcgaatctaaatgaagaactaggtatggttgatacaattctatccgataagactggaacattaacatgcaacatgatggagttcatcaagtgttcaattgctggcacagcctatggtaagggcgtcactgaagttgagagagctatggctatgaggaaaggtgacagtttagatgatgacattgaaaatggagactacaaagacaaaaaaaatcacaacagtcccaatgttaaagggttcaatttcaaggatccacgaataatggatgggaattggattcatgagcctaacaaagatatgataagagattttttccggctcctagccatctgccacacatgcattgctgaaatagacgaaaatgagaaggtttcatacgaagctgagtcccctgatgaagctgcatttgttattgcggcaagagaactagggtttgagttttacaagaggtcactggcaactataattattcgtgagcaggatccaagttggaatgttgttgagaaaaggtacagaaagtatgaactcttaaatatattggagttcagtagctcaaggagacggatgtccgtgatagtcaaagaaccagagggaaggatattacttctcagcaagggtgctgataggttagtgctctatttacactagatttcaatgtttagctgcagatcatcttcataagcatagtttctgtgaacagtgtgatgttcaaaaggcttgcaccaaatggaagaaaatatgaagaagaaacaagaagacacataaatgagtattctgactctggtctaagaaccttggttctagcataccgtgtcttagatgagaaagagtacaaggaattcaatgaaaaactgaacactgccaaagcatctgtaagtgctgatagagatgtaaaaattgagcaggctgctgatagcattgaacaggacttgattcttcttggtgctactgcagttgaagataagctccagcaaggggtgcctgaatgcatagacaagcttgcgcaagccggaattaagatatgggtcctgactggcgacaagatggagacagctatcaatattgggtttgcatgtagcctgcttaggcaagacatgacacagataattgtcacactggaacaacctgacatcatcgcgttggagaaagatggtgacaaatataaaatttttaaggcatcaaagaaaaaggttatgagtcagatagaggatggaatcaaacaaattccaccttcaactaaaattagcactgcatcatttgcactaatcattgatggtaaatcaataccttatgctttggaagatgatgtcaagtttaagttcttggatcttgctatcaactgtgcatcagtgatatgttgccgatcttcaccaaaacagaaggcactggtcacaagatttgttaagcaagtaacacataaagtgactttagcaataggtgatggggcaaatgatgttggcatgcttcaagaagctgacataggggttggcatcagtggtgctgaaggaatgcaggctgtcatggctagtgatgttgctgttgcccaattccgctttttggaacggctacttctggtgcatggacattggtgttaccggcgtatttcagtgatgtatccacagctataccaagaaggagtgcagaatatattattcagttggtgtcggatacttggctggatgcttaacggtgttatgaatgctgtcttaatatttttcttctgcatcacaacctttgaggaccaggtgttccgccgggatggtcaagttgcaggcttggatgctctaggcgtcgccatgtacacttgtattgtatgggttgtcaactgtcaaatggcgctctctgtgaactacttcaccataatccagcacatattcatatggggcagcattgcagtatggtacctcttcctcatagtttatggttccatgaacccgaggttctcaactacagcctacatggtcttcatcgaacagctggccccagccctctcattttggttggtgacactttttgttgtgctggcaacacttgtcccctacttcacgtatgccgcgatccagatccggtttttcccaatgttccacaacaagattcagtggaagcggtacttggggaaggctgaagacccagaagtggcaaggcagttgtcatcacgacaccggacgtcgtcgcagcagaggatggtcggtatctctgctcgtcgggacggcaaggctatgcaaataacaagggagacagagatagaagttcaggagtagcattgtcagtagattttgcgttttgtacagcttataggatattgtctccggcaggatgacagctgaactgattggaaaccggaatgtttctggattgctgcttctatgatggctgtcatggaagctgatggtagagcaagactacaaattgcttagataggtcacaactcacaaggaggccaagagatcctgttgtaaagttcaattttagcagttcaaggctgtgtttcccccccccccccccctgcttctcttacatcatagatgcttgtaaccagattggtagaatttcgttgtttttattcctctttaccccccttgcctgccccctctcaactgtattttaaacaataatgtaaggcatcttgtttgagtggctttcatgctttattttggaaagaatcataattgagtgatatagaatgtaagattggcctctaatatttgtttccatgacttttcaaatatggggaggccacaaaggtgcctttgtgccatcaccaaaaaatttcgtacacttgttcttattcaattttcctaggaaaaaattattcttctgtactactgattaataagtggaagaaaatgggtattttggagaaaacaacactttctatgtgaaaacaacatatcctgatttgattcaactgttaatggtgagccagcatggcaaaaaaataaaaaaattgtatagaactaagataaaatcaaggcttactgtatgaaagatgaataaatgaaccaagaggtaaataaacttcaaatagtgacacagagagaactcaaggatcaacattacatggatttacaatatttgtcttactcctttccgttctattattagtataccatactaacctgctgcagttacaaccgtctccagtagcttatccaaactcatattcaaaatactatctacaaacagtacaatatacagtgtaaaatagatatatttagtgaccatgtgggtgcaatgtacagtggtttacccatatgatcatcaaaaccacagttttgtactatagattataccgtttgtagagcttgtagagtatagcttgaatacatgtatgagtctgctggagatgatttaagggaagcaaagaaagcaactaacttgagccgctgagcgcccggttaggttgacaggtttacgtttcacggctccggcagcggcagcggcagtggctgcgatgcagccggctgctttgtctccg

SEQ ID NO: 79981 - DNA, 5856 bp, Zea Mays
cgcactaatatattaggcgaacactaaagacaagggaggaaagacatatctgagggagatatgacacggcggcagcagcagatccagctatcaccatgacggactcggggaggaggccaccaactaccaaacccatcgcacacgtcctgctcccctccccttctcgtcgcgtcggcattgcattgcacgcctcgcccggcgcctgctcccttgcattttccattgacctcccccccgccccctctcgtccgtctcctcctccccaaagcttcgaattttcccgagccggagccacaccttctttctccccgcgtcccacgattcgccgtcggaaagaggcaaggcaacggaaaccgagccgtcctgcgtgagctggggcggggtcccccgtctgggtgccttccgtgccactctcctgcaacgcggggcgcattgtcttgctgcccccttgagaagggaagattcccgccatctattaatcctcctctcgtatgccgttttctgcctggggaggacacaaacgcagcgccgcgggaaagccgggcgccgcatggatcgaggcatccggtgttcctgtctcaagacccagttttggcgtcttggcgtagcgggacggaggaggacgacggggtttcggagcgcagggtcgcggcggcacgccgggatctccgaggcgccgcgctgttgagtgttgacgccttctcgttcctgggaggaggtgatttctctgctgagggcctggggagtctcttggttcagtccctctccctctgcagtttatttgctttttttaggtaggtggagtgtggagttgttgggtgggagagggcctggaatttatttcgagctgcttctttggagaccattgtttctcgaatctgagttcctcttcttcggagggagttgtcaattgcgttctgattgatttggacaagatcggaaggaactggcactctcggtgggcgtacaaaaactctgagcttgtggccttatcgacttcttgggggcatctgggagtagcttcagcgattcacttgagtctggaggaatggcgccgaccaagaggatggagaagctcaagctcagcacattgttgactttcatgcgttgccacaggggctctagtgatgaccactcacggattgggacagtggggttctcccgagtcgtttacgtcaacgagcctgatatgcttgaagaggagggattcaactaccccttgaatgaagtgtcgacgacaaagtacactctggccaccttccttcccaagtccctcttcgagcagttcaggagggtggccaatttctacttccttgtctctggtatccttgccttgactccacttgcaccttacacggcagtgagcgcgcttgcaccgctctgtgtcgtgattgtagccaccatggcaaaagaaggggttgaggactggcggaggaaacaacaggatcatgagctcaataatcggatagtcaaagtgcataggggaagtggccattttgaagagacaaaatggaagaatatcaaagttggagatgtaataaaactggagaaggataatttctttcccgctgatatgattctgctttcatctagctatccggatggaatatgttatgtagagaccatgaaccttgatggtgaaacaaatttgaaaattaaacaagctctcgaggtgacattggatttacaggaggacacaaagttcagagaagtcagacaaacaataaaatgtgaagacccaaatgcgaacctctactcctttgtcggttcaatggaatggagaggccagcagtatcccctgtcacccctacagcttcttctccgggactcaaaactacggaacacagactacatatatggggctgtcatcttcacaggtcatgatacaaaagtgatgcaaaatgcaacagatccaccatctaaaagaagtaagattgagaagaaaatggatcaaattatttacgttctgatgtcttctctactcatgattgcattacttggttccatcttctttgggatctggaccaaagaggacgtaagagatggtgggctcaaacggtggtatcttcggccagatgctactactatattctatgatccaaagagagcagctctggcatctttctttcatttgttgacggccttgatgctgtacagctacttcatacccatttctttgtatatatccattgagatagtcaagatcttgcaagctctatttatcaaccaggatattgaaatgtatcatgaagaatcagataagccaactcatgctcgtacttcgaatctaaatgaagaactaggtatggttgatacaattctatccgataagactggaacattaacatgcaacatgatggagttcatcaagtgttcaattgctggcacagcctatggtaagggcgtcactgaagttgagagagctatggctatgaggaaaggtgacagtttagatgatgacattgaaaatggagactacaaagacaaaaaaaatcacaacagtcccaatgttaaagggttcaatttcaaggatccacgaataatggatgggaattggattcatgagcctaacaaagatatgataagagattttttccggctcctagccatctgccacacatgcattgctgaaatagacgaaaatgagaaggtttcatacgaagctgagtcccctgatgaagctgcatttgttattgcggcaagagaactagggtttgagttttacaagaggtcactggcaactataattattcgtgagcaggatccaagttggaatgttgttgagaaaagaaagtatgaactcttaaatatattggagttcagtagctcaaggagacggatgtccgtgatagtcaaagaaccagagggaaggatattacttctcagcaagggtgctgataggcttgcaccaaatggaagaaaatatgaagaagaaacaagaagacacataaatgagtattctgactctggtctaagaaccttggttctagcataccgtgtcttagatgagaaagagtacaaggaattcaatgaaaaactgaacactgccaaagcatctgtaagtgctgatagagatgtaaaaattgagcaggctgctgatagcattgaacaggacttgattcttcttggtgctactgcagttgaagataagctccagcaaggggtgcctgaatgcatagacaagcttgcgcaagccggaattaagatatgggtcctgactggcgacaagatggagacagctatcaatattgggtttgcatgtagcctgcttaggcaagacatgacacagataattgtcacactggaacaacctgacatcatcgcgttggagaaagatggtgacaaatataaaatttttaaggcatcaaagaaaaaggttatgagtcagatagaggatggaatcaaacaaattccaccttcaactaaaattagcactgcatcatttgcactaatcattgatggtaaatcaataccttatgctttggaagatgatgtcaagtttaagttcttggatcttgctatcaactgtgcatcagtgatatgttgccgatcttcaccaaaacagaaggcactggtcacaagatttgttaagcaagtaacacataaagtgactttagcaataggtgatggggcaaatgatgttggcatgcttcaagaagctgacataggggttggcatcagtggtgctgaaggaatgcaggctgtcatggctagtgatgttgctgttgcccaattccgctttttggaacggctacttctggtgcatggacattggtgttaccggcgtatttcagtgatgatatgctatttcttctacaagaatgttacttttggtgtcactctctttctctacgaagcatttgcatctttctctgggaagccagcttataatgattggttcttgtcactctataatgtcttcttcacctcccttcctgtcattgctttgggagtctttgaccaggatgtgtctgccaggctatgcatacagtatccacagctataccaagaaggagtgcagaatatattattcagttggtgtcggatacttggctggatgcttaacggtgttatgaatgctgtcttaatatttttcttctgcatcacaacctttgaggaccaggtgttccgccgggatggtcaagttgcaggcttggatgctctaggcgtcgccatgtacacttgtattgtatgggttgtcaactgtcaaatggcgctctctgtgaactacttcaccataatccagcacatattcatatggggcagcattgcagtatggtacctcttcctcatagtttatggttccatgaacccgaggttctcaactacagcctacatggtcttcatcgaacagctggccccagccctctcattttggttggtgacactttttgttgtgctggcaacacttgtcccctacttcacgtatgccgcgatccagatccggtttttcccaatgttccacaacaagattcagtggaagcggtacttggggaaggctgaagacccagaagtggcaaggcagttgtcatcacgacaccggacgtcgtcgcagcagaggatggtcggtatctctgctcgtcgggacggcaaggctatgcaaataacaagggagacagagatagaagttcaggagtagcattgtcagtagattttgcgttttgtacagcttataggatattgtctccggcaggatgacagctgaactgattggaaaccggaatgtttctggattgctgcttctatgatggctgtcatggaagctgatggtagagcaagactacaaattgcttagataggtcacaactcacaaggaggccaagagatcctgttgtaaagttcaattttagcagttcaaggctgtgtttcccccccccccccccctgcttctcttacatcatagatgcttgtaaccagattggtagaatttcgttgtttttattcctctttaccccccttgcctgccccctctcaactgtattttaaacaataatgtaaggcatcttgtttgagtggctttcatgctttattttggaaagaatcataattgagtgatatagaatgtaagattggcctctaatatttgtttccatgacttttcaaatatggggaggccacaaaggtgcctttgtgccatcaccaaaaaatttcgtacacttgttcttattcaattttcctaggaaaaaattattcttctgtactactgattaataagtggaagaaaatgggtattttggagaaaacaacactttctatgtgaaaacaacatatcctgatttgattcaactgttaatggtgagccagcatggcaaaaaaataaaaaaattgtatagaactaagataaaatcaaggcttactgtatgaaagatgaataaatgaaccaagaggtaaataaacttcaaatagtgacacagagagaactcaaggatcaacattacatggatttacaatatttgtcttactcctttccgttctattattagtataccatactaacctgctgcagttacaaccgtctccagtagcttatccaaactcatattcaaaatactatctacaaacagtacaatatacagtgtaaaatagatatatttagtgaccatgtgggtgcaatgtacagtggtttacccatatgatcatcaaaaccacagttttgtactatagattataccgtttgtagagcttgtagagtatagcttgaatacatgtatgagtctgctggagatgatttaagggaagcaaagaaagcaactaacttgagccgctgagcgcccggttaggttgacaggtttacgtttcacggctccggcagcggcagcggcagtggctgcgatgcagccggctgctttgtctccg

SEQ ID NO: 79982 - DNA, 5862 bp, Zea Mays
cgcactaatatattaggcgaacactaaagacaagggaggaaagacatatctgagggagatatgacacggcggcagcagcagatccagctatcaccatgacggactcggggaggaggccaccaactaccaaacccatcgcacacgtcctgctcccctccccttctcgtcgcgtcggcattgcattgcacgcctcgcccggcgcctgctcccttgcattttccattgacctcccccccgccccctctcgtccgtctcctcctccccaaagcttcgaattttcccgagccggagccacaccttctttctccccgcgtcccacgattcgccgtcggaaagaggcaaggcaacggaaaccgagccgtcctgcgtgagctggggcggggtcccccgtctgggtgccttccgtgccactctcctgcaacgcggggcgcattgtcttgctgcccccttgagaagggaagattcccgccatctattaatcctcctctcgtatgccgttttctgcctggggaggacacaaacgcagcgccgcgggaaagccgggcgccgcatggatcgaggcatccggtgttcctgtctcaagacccagttttggcgtcttggcgtagcgggacggaggaggacgacggggtttcggagcgcagggtcgcggcggcacgccgggatctccgaggcgccgcgctgttgagtgttgacgccttctcgttcctgggaggaggtgatttctctgctgagggcctggggagtctcttggttcagtccctctccctctgcagtttatttgctttttttaggtaggtggagtgtggagttgttgggtgggagagggcctggaatttatttcgagctgcttctttggagaccattgtttctcgaatctgagttcctcttcttcggagggagttgtcaattgcgttctgattgatttggacaagatcggaaggaactggcactctcggtgggcgtacaaaaactctgagcttgtggccttatcgacttcttgggggcatctgggagtagcttcagcgattcacttgagtctggaggaatggcgccgaccaagaggatggagaagctcaagctcagcacattgttgactttcatgcgttgccacaggggctctagtgatgaccactcacggattgggacagtggggttctcccgagtcgtttacgtcaacgagcctgatatgcttgaagaggagggattcaactaccccttgaatgaagtgtcgacgacaaagtacactctggccaccttccttcccaagtccctcttcgagcagttcaggagggtggccaatttctacttccttgtctctggtatccttgccttgactccacttgcaccttacacggcagtgagcgcgcttgcaccgctctgtgtcgtgattgtagccaccatggcaaaagaaggggttgaggactggcggaggaaacaacaggatcatgagctcaataatcggatagtcaaagtgcataggggaagtggccattttgaagagacaaaatggaagaatatcaaagttggagatgtaataaaactggagaaggataatttctttcccgctgatatgattctgctttcatctagctatccggatggaatatgttatgtagagaccatgaaccttgatggtgaaacaaatttgaaaattaaacaagctctcgaggtgacattggatttacaggaggacacaaagttcagagaagtcagacaaacaataaaatgtgaagacccaaatgcgaacctctactcctttgtcggttcaatggaatggagaggccagcagtatcccctgtcacccctacagcttcttctccgggactcaaaactacggaacacagactacatatatggggctgtcatcttcacaggtcatgatacaaaagtgatgcaaaatgcaacagatccaccatctaaaagaagtaagattgagaagaaaatggatcaaattatttacgttctgatgtcttctctactcatgattgcattacttggttccatcttctttgggatctggaccaaagaggacgtaagagatggtgggctcaaacggtggtatcttcggccagatgctactactatattctatgatccaaagagagcagctctggcatctttctttcatttgttgacggccttgatgctgtacagctacttcatacccatttctttgtatatatccattgagatagtcaagatcttgcaagctctatttatcaaccaggatattgaaatgtatcatgaagaatcagataagccaactcatgctcgtacttcgaatctaaatgaagaactaggtatggttgatacaattctatccgataagactggaacattaacatgcaacatgatggagttcatcaagtgttcaattgctggcacagcctatggtaagggcgtcactgaagttgagagagctatggctatgaggaaaggtgacagtttagatgatgacattgaaaatggagactacaaagacaaaaaaaatcacaacagtcccaatgttaaagggttcaatttcaaggatccacgaataatggatgggaattggattcatgagcctaacaaagatatgataagagattttttccggctcctagccatctgccacacatgcattgctgaaatagacgaaaatgagaaggtttcatacgaagctgagtcccctgatgaagctgcatttgttattgcggcaagagaactagggtttgagttttacaagaggtcactggcaactataattattcgtgagcaggatccaagttggaatgttgttgagaaaaggtacagaaagtatgaactcttaaatatattggagttcagtagctcaaggagacggatgtccgtgatagtcaaagaaccagagggaaggatattacttctcagcaagggtgctgataggcttgcaccaaatggaagaaaatatgaagaagaaacaagaagacacataaatgagtattctgactctggtctaagaaccttggttctagcataccgtgtcttagatgagaaagagtacaaggaattcaatgaaaaactgaacactgccaaagcatctgtaagtgctgatagagatgtaaaaattgagcaggctgctgatagcattgaacaggacttgattcttcttggtgctactgcagttgaagataagctccagcaaggggtgcctgaatgcatagacaagcttgcgcaagccggaattaagatatgggtcctgactggcgacaagatggagacagctatcaatattgggtttgcatgtagcctgcttaggcaagacatgacacagataattgtcacactggaacaacctgacatcatcgcgttggagaaagatggtgacaaatataaaatttttaaggcatcaaagaaaaaggttatgagtcagatagaggatggaatcaaacaaattccaccttcaactaaaattagcactgcatcatttgcactaatcattgatggtaaatcaataccttatgctttggaagatgatgtcaagtttaagttcttggatcttgctatcaactgtgcatcagtgatatgttgccgatcttcaccaaaacagaaggcactggtcacaagatttgttaagcaagtaacacataaagtgactttagcaataggtgatggggcaaatgatgttggcatgcttcaagaagctgacataggggttggcatcagtggtgctgaaggaatgcaggctgtcatggctagtgatgttgctgttgcccaattccgctttttggaacggctacttctggtgcatggacattggtgttaccggcgtatttcagtgatgatatgctatttcttctacaagaatgttacttttggtgtcactctctttctctacgaagcatttgcatctttctctgggaagccagcttataatgattggttcttgtcactctataatgtcttcttcacctcccttcctgtcattgctttgggagtctttgaccaggatgtgtctgccaggctatgcatacagtatccacagctataccaagaaggagtgcagaatatattattcagttggtgtcggatacttggctggatgcttaacggtgttatgaatgctgtcttaatatttttcttctgcatcacaacctttgaggaccaggtgttccgccgggatggtcaagttgcaggcttggatgctctaggcgtcgccatgtacacttgtattgtatgggttgtcaactgtcaaatggcgctctctgtgaactacttcaccataatccagcacatattcatatggggcagcattgcagtatggtacctcttcctcatagtttatggttccatgaacccgaggttctcaactacagcctacatggtcttcatcgaacagctggccccagccctctcattttggttggtgacactttttgttgtgctggcaacacttgtcccctacttcacgtatgccgcgatccagatccggtttttcccaatgttccacaacaagattcagtggaagcggtacttggggaaggctgaagacccagaagtggcaaggcagttgtcatcacgacaccggacgtcgtcgcagcagaggatggtcggtatctctgctcgtcgggacggcaaggctatgcaaataacaagggagacagagatagaagttcaggagtagcattgtcagtagattttgcgttttgtacagcttataggatattgtctccggcaggatgacagctgaactgattggaaaccggaatgtttctggattgctgcttctatgatggctgtcatggaagctgatggtagagcaagactacaaattgcttagataggtcacaactcacaaggaggccaagagatcctgttgtaaagttcaattttagcagttcaaggctgtgtttcccccccccccccccctgcttctcttacatcatagatgcttgtaaccagattggtagaatttcgttgtttttattcctctttaccccccttgcctgccccctctcaactgtattttaaacaataatgtaaggcatcttgtttgagtggctttcatgctttattttggaaagaatcataattgagtgatatagaatgtaagattggcctctaatatttgtttccatgacttttcaaatatggggaggccacaaaggtgcctttgtgccatcaccaaaaaatttcgtacacttgttcttattcaattttcctaggaaaaaattattcttctgtactactgattaataagtggaagaaaatgggtattttggagaaaacaacactttctatgtgaaaacaacatatcctgatttgattcaactgttaatggtgagccagcatggcaaaaaaataaaaaaattgtatagaactaagataaaatcaaggcttactgtatgaaagatgaataaatgaaccaagaggtaaataaacttcaaatagtgacacagagagaactcaaggatcaacattacatggatttacaatatttgtcttactcctttccgttctattattagtataccatactaacctgctgcagttacaaccgtctccagtagcttatccaaactcatattcaaaatactatctacaaacagtacaatatacagtgtaaaatagatatatttagtgaccatgtgggtgcaatgtacagtggtttacccatatgatcatcaaaaccacagttttgtactatagattataccgtttgtagagcttgtagagtatagcttgaatacatgtatgagtctgctggagatgatttaagggaagcaaagaaagcaactaacttgagccgctgagcgcccggttaggttgacaggtttacgtttcacggctccggcagcggcagcggcagtggctgcgatgcagccggctgctttgtctccg

SEQ ID NO: 79983 - DNA, 5877 bp, Zea Mays
cgcactaatatattaggcgaacactaaagacaagggaggaaagacatatctgagggagatatgacacggcggcagcagcagatccagctatcaccatgacggactcggggaggaggccaccaactaccaaacccatcgcacacgtcctgctcccctccccttctcgtcgcgtcggcattgcattgcacgcctcgcccggcgcctgctcccttgcattttccattgacctcccccccgccccctctcgtccgtctcctcctccccaaagcttcgaattttcccgagccggagccacaccttctttctccccgcgtcccacgattcgccgtcggaaagaggcaaggcaacggaaaccgagccgtcctgcgtgagctggggcggggtcccccgtctgggtgccttccgtgccactctcctgcaacgcggggcgcattgtcttgctgcccccttgagaagggaagattcccgccatctattaatcctcctctcgtatgccgttttctgcctggggaggacacaaacgcagcgccgcgggaaagccgggcgccgcatggatcgaggcatccggtgttcctgtctcaagacccagttttggcgtcttggcgtagcgggacggaggaggacgacggggtttcggagcgcagggtcgcggcggcacgccgggatctccgaggcgccgcgctgttgagtgttgacgccttctcgttcctgggaggaggtgatttctctgctgagggcctggggagtctcttggttcagtccctctccctctgcagtttatttgctttttttaggtaggtggagtgtggagttgttgggtgggagagggcctggaatttatttcgagctgcttctttggagaccattgtttctcgaatctgagttcctcttcttcggagggagttgtcaattgcgttctgattgatttggacaagatcggaaggaactggcactctcggtgggcgtacaaaaactctgagcttgtggccttatcgacttcttgggggcatctgggagtagcttcagcgattcacttgagtctggaggaatggcgccgaccaagaggatggagaagctcaagctcagcacattgttgactttcatgcgttgccacaggggctctagtgatgaccactcacggattgggacagtggggttctcccgagtcgtttacgtcaacgagcctgatatgcttgaagaggagggattcaactaccccttgaatgaagtgtcgacgacaaagtacactctggccaccttccttcccaagtccctcttcgagcagttcaggagggtggccaatttctacttccttgtctctggtatccttgccttgactccacttgcaccttacacggcagtgagcgcgcttgcaccgctctgtgtcgtgattgtagccaccatggcaaaagaaggggttgaggactggcggaggaaacaacaggatcatgagctcaataatcggatagtcaaagtgcataggggaagtggccattttgaagagacaaaatggaagaatatcaaagttggagatgtaataaaactggagaaggataatttctttcccgctgatatgattctgctttcatctagctatccggatggaatatgttatgtagagaccatgaaccttgatggtgaaacaaatttgaaaattaaacaagctctcgaggtgacattggatttacaggaggacacaaagttcagagaagtcagacaaacaataaaatgtgaagacccaaatgcgaacctctactcctttgtcggttcaatggaatggagaggccagcagtatcccctgtcacccctacagcttcttctccgggactcaaaactacggaacacagactacatatatggggctgtcatcttcacaggtcatgatacaaaagtgatgcaaaatgcaacagatccaccatctaaaagaagtaagattgagaagaaaatggatcaaattatttacgttctgatgtcttctctactcatgattgcattacttggttccatcttctttgggatctggaccaaagaggacgtaagagatggtgggctcaaacggtggtatcttcggccagatgctactactatattctatgatccaaagagagcagctctggcatctttctttcatttgttgacggccttgatgctgtacagctacttcatacccatttctttgtatatatccattgagatagtcaagatcttgcaagctctatttatcaaccaggatattgaaatgtatcatgaagaatcagataagccaactcatgctcgtacttcgaatctaaatgaagaactaggtatggttgatacaattctatccgataagactggaacattaacatgcaacatgatggagttcatcaagtgttcaattgctggcacagcctatggtaagggcgtcactgaagttgagagagctatggctatgaggaaaggtgacagtttagatgatgacattgaaaatggagactacaaagacaaaaaaaatcacaacagtcccaatgttaaagggttcaatttcaaggatccacgaataatggatgggaattggattcatgagcctaacaaagatatgataagagattttttccggctcctagccatctgccacacatgcattgctgaaatagacgaaaatgagaaggtttcatacgaagctgagtcccctgatgaagctgcatttgttattgcggcaagagaactagggtttgagttttacaagaggtcactggcaactataattattcgtgagcaggatccaagttggaatgttgttgagaaaaggtacagaaagtatgaactcttaaatatattggagttcagtagctcaaggagacggatgtccgtgatagtcaaagaaccagagggaaggatattacttctcagcaagggtgctgatagtgtgatgttcaaaaggcttgcaccaaatggaagaaaatatgaagaagaaacaagaagacacataaatgagtattctgactctggtctaagaaccttggttctagcataccgtgtcttagatgagaaagagtacaaggaattcaatgaaaaactgaacactgccaaagcatctgtaagtgctgatagagatgtaaaaattgagcaggctgctgatagcattgaacaggacttgattcttcttggtgctactgcagttgaagataagctccagcaaggggtgcctgaatgcatagacaagcttgcgcaagccggaattaagatatgggtcctgactggcgacaagatggagacagctatcaatattgggtttgcatgtagcctgcttaggcaagacatgacacagataattgtcacactggaacaacctgacatcatcgcgttggagaaagatggtgacaaatataaaatttttaaggcatcaaagaaaaaggttatgagtcagatagaggatggaatcaaacaaattccaccttcaactaaaattagcactgcatcatttgcactaatcattgatggtaaatcaataccttatgctttggaagatgatgtcaagtttaagttcttggatcttgctatcaactgtgcatcagtgatatgttgccgatcttcaccaaaacagaaggcactggtcacaagatttgttaagcaagtaacacataaagtgactttagcaataggtgatggggcaaatgatgttggcatgcttcaagaagctgacataggggttggcatcagtggtgctgaaggaatgcaggctgtcatggctagtgatgttgctgttgcccaattccgctttttggaacggctacttctggtgcatggacattggtgttaccggcgtatttcagtgatgatatgctatttcttctacaagaatgttacttttggtgtcactctctttctctacgaagcatttgcatctttctctgggaagccagcttataatgattggttcttgtcactctataatgtcttcttcacctcccttcctgtcattgctttgggagtctttgaccaggatgtgtctgccaggctatgcatacagtatccacagctataccaagaaggagtgcagaatatattattcagttggtgtcggatacttggctggatgcttaacggtgttatgaatgctgtcttaatatttttcttctgcatcacaacctttgaggaccaggtgttccgccgggatggtcaagttgcaggcttggatgctctaggcgtcgccatgtacacttgtattgtatgggttgtcaactgtcaaatggcgctctctgtgaactacttcaccataatccagcacatattcatatggggcagcattgcagtatggtacctcttcctcatagtttatggttccatgaacccgaggttctcaactacagcctacatggtcttcatcgaacagctggccccagccctctcattttggttggtgacactttttgttgtgctggcaacacttgtcccctacttcacgtatgccgcgatccagatccggtttttcccaatgttccacaacaagattcagtggaagcggtacttggggaaggctgaagacccagaagtggcaaggcagttgtcatcacgacaccggacgtcgtcgcagcagaggatggtcggtatctctgctcgtcgggacggcaaggctatgcaaataacaagggagacagagatagaagttcaggagtagcattgtcagtagattttgcgttttgtacagcttataggatattgtctccggcaggatgacagctgaactgattggaaaccggaatgtttctggattgctgcttctatgatggctgtcatggaagctgatggtagagcaagactacaaattgcttagataggtcacaactcacaaggaggccaagagatcctgttgtaaagttcaattttagcagttcaaggctgtgtttcccccccccccccccctgcttctcttacatcatagatgcttgtaaccagattggtagaatttcgttgtttttattcctctttaccccccttgcctgccccctctcaactgtattttaaacaataatgtaaggcatcttgtttgagtggctttcatgctttattttggaaagaatcataattgagtgatatagaatgtaagattggcctctaatatttgtttccatgacttttcaaatatggggaggccacaaaggtgcctttgtgccatcaccaaaaaatttcgtacacttgttcttattcaattttcctaggaaaaaattattcttctgtactactgattaataagtggaagaaaatgggtattttggagaaaacaacactttctatgtgaaaacaacatatcctgatttgattcaactgttaatggtgagccagcatggcaaaaaaataaaaaaattgtatagaactaagataaaatcaaggcttactgtatgaaagatgaataaatgaaccaagaggtaaataaacttcaaatagtgacacagagagaactcaaggatcaacattacatggatttacaatatttgtcttactcctttccgttctattattagtataccatactaacctgctgcagttacaaccgtctccagtagcttatccaaactcatattcaaaatactatctacaaacagtacaatatacagtgtaaaatagatatatttagtgaccatgtgggtgcaatgtacagtggtttacccatatgatcatcaaaaccacagttttgtactatagattataccgtttgtagagcttgtagagtatagcttgaatacatgtatgagtctgctggagatgatttaagggaagcaaagaaagcaactaacttgagccgctgagcgcccggttaggttgacaggtttacgtttcacggctccggcagcggcagcggcagtggctgcgatgcagccggctgctttgtctccg

SEQ ID NO: 79984 - DNA, 6695 bp, Zea Mays
cgcactaatatattaggcgaacactaaagacaagggaggaaagacatatctgagggagatatgacacggcggcagcagcagatccagctatcaccatgacggactcggggaggaggccaccaactaccaaacccatcgcacacgtcctgctcccctccccttctcgtcgcgtcggcattgcattgcacgcctcgcccggcgcctgctcccttgcattttccattgacctcccccccgccccctctcgtccgtctcctcctccccaaagcttcgaattttcccgagccggagccacaccttctttctccccgcgtcccacgattcgccgtcggaaagaggcaaggcaacggaaaccgagccgtcctgcgtgagctggggcggggtcccccgtctgggtgccttccgtgccactctcctgcaacgcggggcgcattgtcttgctgcccccttgagaagggaagattcccgccatctattaatcctcctctcgtatgccgttttctgcctggggaggacacaaacgcagcgccgcgggaaagccgggcgccgcatggatcgaggcatccggtgttcctgtctcaagacccagttttggcgtcttggcgtagcgggacggaggaggacgacggggtttcggagcgcagggtcgcggcggcacgccgggatctccgaggcgccgcgctgttgagtgttgacgccttctcgttcctgggaggaggtgatttctctgctgagggcctggggagtctcttggttcagtccctctccctctgcagtttatttgctttttttaggtaggtggagtgtggagttgttgggtgggagagggcctggaatttatttcgagctgcttctttggagaccattgtttctcgaatctgagttcctcttcttcggagggagttgtcaattgcgttctgattgatttggacaagatcggaaggaactggcactctcggtgggcgtacaaaaactctgagcttgtggccttatcgacttcttgggggcatctgggagtagcttcagcgattcacttgagtctggaggaatggcgccgaccaagaggatggagaagctcaagctcagcacattgttgactttcatgcgttgccacaggggctctagtgatgaccactcacggattgggacagtggggttctcccgagtcgtttacgtcaacgagcctgatatgcttgaagaggagggattcaactaccccttgaatgaagtgtcgacgacaaagtacactctggccaccttccttcccaagtccctcttcgagcagttcaggagggtggccaatttctacttccttgtctctggtatccttgccttgactccacttgcaccttacacggcagtgagcgcgcttgcaccgctctgtgtcgtgattgtagccaccatggcaaaagaaggggttgaggactggcggaggaaacaacaggatcatgagctcaataatcggatagtcaaagtgcataggggaagtggccattttgaagagacaaaatggaagaatatcaaagttggagatgtaataaaactggagaaggataatttctttcccgctgatatgattctgctttcatctagctatccggatggaatatgttatgtagagaccatgaaccttgatggtgaaacaaatttgaaaattaaacaagctctcgaggtgacattggatttacaggaggacacaaagttcagagaagtcagacaaacaataaaatgtgaagacccaaatgcgaacctctactcctttgtcggttcaatggaatggagaggccagcagtatcccctgtcacccctacagcttcttctccgggactcaaaactacggaacacagactacatatatggggctgtcatcttcacaggtcatgatacaaaagtgatgcaaaatgcaacagatccaccatctaaaagaagtaagattgagaagaaaatggatcaaattatttacgttctgatgtcttctctactcatgattgcattacttggttccatcttctttgggatctggaccaaagaggacgtaagagatggtgggctcaaacggtggtatcttcggccagatgctactactatattctatgatccaaagagagcagctctggcatctttctttcatttgttgacggccttgatgctgtacagctacttcatacccatttctttgtatatatccattgagatagtcaagatcttgcaagctctatttatcaaccaggatattgaaatgtatcatgaagaatcagataagccaactcatgctcgtacttcgaatctaaatgaagaactaggtatggttgatacaattctatccgataagactggaacattaacatgcaacatgatggagttcatcaagtgttcaattgctggcacagcctatggtaagggcgtcactgaagttgagagagctatggctatgaggaaaggtgacagtttagatgatgacattgaaaatggagactacaaagacaaaaaaaatcacaacagtcccaatgttaaagggttcaatttcaaggatccacgaataatggatgggaattggattcatgagcctaacaaagatatgataagagattttttccggctcctagccatctgccacacatgcattgctgaaatagacgaaaatgagaaggtttcatacgaagctgagtcccctgatgaagctgcatttgttattgcggcaagagaactagggtttgagttttacaagaggtcactggcaactataattattcgtgagcaggatccaagttggaatgttgttgagaaaagaaagtatgaactcttaaatatattggagttcagtagctcaaggagacggatgtccgtgatagtcaaagaaccagagggaaggatattacttctcagcaagggtgctgatagtgtgatgttcaaaaggcttgcaccaaatggaagaaaatatgaagaagaaacaagaagacacataaatgagtattctgactctggtctaagaaccttggttctagcataccgtgtcttagatgagaaagagtacaaggaattcaatgaaaaactgaacactgccaaagcatctgtaagtgctgatagagatgtaaaaattgagcaggctgctgatagcattgaacaggacttgattcttcttggtgctactgcagttgaagataagctccagcaaggggtgcctgaatgcatagacaagcttgcgcaagccggaattaagatatgggtcctgactggcgacaagatggagacagctatcaatattgggtttgcatgtagcctgcttaggcaagacatgacacagataattgtcacactggaacaacctgacatcatcgcgttggagaaagatggtgacaaatataaaatttttaagcatcgggcatgttgcagtcattttacatataacaatgtcaacattggaatgccctatcaagccttttctataagggatgcaacatctgaagaagctgaggatgctgaaccagcagcagctgatgcaacttgtgtgctcatcttcgtgctcccttggacctgcagatggggaagagaatcagcgagcttctttgtgtcctgcgtacccacgaccttctctttgatccctgctgccctacagcaggcatcaaagaaaaaggttatgagtcagatagaggatggaatcaaacaaattccaccttcaactaaaattagcactgcatcatttgcactaatcattgatggtaaatcaataccttatgctttggaagatgatgtcaagtttaagttcttggatcttgctatcaactgtgcatcagtgatatgttgccgatcttcaccaaaacagaaggcactggtcacaagatttgttaagcaagtaacacataaagtgactttagcaataggtgatggggcaaatgatgttggcatgcttcaagaagctgacataggggttggcatcagtggtgctgaaggaatgcaggctgtcatggctagtgatgttgctgttgcccaattccgctttttggaacggctacttctggtgcatggacattggtgttaccggcgtatttcagtgatggtatagttgccatttacatgaatgttaatctttttccacacaggacaaatcagaaatttcattaaaaaaagcaacaaaatttaaaagcaccacaaacataatgtttgcatcaccaaactttccaaaaatcagagtgatcctgagagcataaaggctctggaatggaacacaccccaaaatggcacaagcaaagcaagtttcaaagtacatagcagacacaaaatggccatggtcaggctgttaagtccacatgctcccacttccaaccagaattgaaactaaggcttcccacagatgatgagcataaaaataaactaagtcgacccacgtgtggtttcggacataaggcctgtttggttcgtggctaactgtgtcacactttgcctaaggttagtcgtccgaatttaagaactaaccttaggcagaaaagttaggtaaagtgtgacaagttagacagcgaaccaaacatgtctttagactgtatgcttctcatttcttggccgcaaacatttattttgatctactattcaggatttgtatttcaagtcttttaataatatattttgggggttgatgcacagatatgctatttcttctacaagaatgttacttttggtgtcactctctttctctacgaagcatttgcatctttctctgggaagccagcttataatgattggttcttgtcactctataatgtcttcttcacctcccttcctgtcattgctttgggagtctttgaccaggatgtgtctgccaggctatgcatacagtatccacagctataccaagaaggagtgcagaatatattattcagttggtgtcggatacttggctggatgcttaacggtgttatgaatgctgtcttaatatttttcttctgcatcacaacctttgaggaccaggtgttccgccgggatggtcaagttgcaggcttggatgctctaggcgtcgccatgtacacttgtattgtatgggttgtcaactgtcaaatggcgctctctgtgaactacttcaccataatccagcacatattcatatggggcagcattgcagtatggtacctcttcctcatagtttatggttccatgaacccgaggttctcaactacagcctacatggtcttcatcgaacagctggccccagccctctcattttggttggtgacactttttgttgtgctggcaacacttgtcccctacttcacgtatgccgcgatccagatccggtttttcccaatgttccacaacaagattcagtggaagcggtacttggggaaggctgaagacccagaagtggcaaggcagttgtcatcacgacaccggacgtcgtcgcagcagaggatggtcggtatctctgctcgtcgggacggcaaggctatgcaaataacaagggagacagagatagaagttcaggagtagcattgtcagtagattttgcgttttgtacagcttataggatattgtctccggcaggatgacagctgaactgattggaaaccggaatgtttctggattgctgcttctatgatggctgtcatggaagctgatggtagagcaagactacaaattgcttagataggtcacaactcacaaggaggccaagagatcctgttgtaaagttcaattttagcagttcaaggctgtgtttcccccccccccccccctgcttctcttacatcatagatgcttgtaaccagattggtagaatttcgttgtttttattcctctttaccccccttgcctgccccctctcaactgtattttaaacaataatgtaaggcatcttgtttgagtggctttcatgctttattttggaaagaatcataattgagtgatatagaatgtaagattggcctctaatatttgtttccatgacttttcaaatatggggaggccacaaaggtgcctttgtgccatcaccaaaaaatttcgtacacttgttcttattcaattttcctaggaaaaaattattcttctgtactactgattaataagtggaagaaaatgggtattttggagaaaacaacactttctatgtgaaaacaacatatcctgatttgattcaactgttaatggtgagccagcatggcaaaaaaataaaaaaattgtatagaactaagataaaatcaaggcttactgtatgaaagatgaataaatgaaccaagaggtaaataaacttcaaatagtgacacagagagaactcaaggatcaacattacatggatttacaatatttgtcttactcctttccgttctattattagtataccatactaacctgctgcagttacaaccgtctccagtagcttatccaaactcatattcaaaatactatctacaaacagtacaatatacagtgtaaaatagatatatttagtgaccatgtgggtgcaatgtacagtggtttacccatatgatcatcaaaaccacagttttgtactatagattataccgtttgtagagcttgtagagtatagcttgaatacatgtatgagtctgctggagatgatttaagggaagcaaagaaagcaactaacttgagccgctgagcgcccggttaggttgacaggtttacgtttcacggctccggcagcggcagcggcagtggctgcgatgcagccggctgctttgtctccg

SEQ ID NO: 79985 - DNA, 5600 bp, Zea Mays
cgcactaatatattaggcgaacactaaagacaagggaggaaagacatatctgagggagatatgacacggcggcagcagcagatccagctatcaccatgacggactcggggaggaggccaccaactaccaaacccatcgcacacgtcctgctcccctccccttctcgtcgcgtcggcattgcattgcacgcctcgcccggcgcctgctcccttgcattttccattgacctcccccccgccccctctcgtccgtctcctcctccccaaagcttcgaattttcccgagccggagccacaccttctttctccccgcgtcccacgattcgccgtcggaaagaggcaaggcaacggaaaccgagccgtcctgcgtgagctggggcggggtcccccgtctgggtgccttccgtgccactctcctgcaacgcggggcgcattgtcttgctgcccccttgagaagggaagattcccgccatctattaatcctcctctcgtatgccgttttctgcctggggaggacacaaacgcagcgccgcgggaaagccgggcgccgcatggatcgaggcatccggtgttcctgtctcaagacccagttttggcgtcttggcgtagcgggacggaggaggacgacggggtttcggagcgcagggtcgcggcggcacgccgggatctccgaggcgccgcgctgttgagtgttgacgccttctcgttcctgggaggaggtgatttctctgctgagggcctggggagtctcttggttcagtccctctccctctgcagtttatttgctttttttaggtaggtggagtgtggagttgttgggtgggagagggcctggaatttatttcgagctgcttctttggagaccattgtttctcgaatctgagttcctcttcttcggagggagttgtcaattgcgttctgattgatttggacaagatcggaaggaactggcactctcggtgggcgtacaaaaactctgagcttgtggccttatcgacttcttgggggcatctgggagtagcttcagcgattcacttgagtctggaggaatggcgccgaccaagaggatggagaagctcaagctcagcacattgttgactttcatgcgttgccacaggggctctagtgatgaccactcacggattgggacagtggggttctcccgagtcgtttacgtcaacgagcctgatatgcttgaagaggagggattcaactaccccttgaatgaagtgtcgacgacaaagtacactctggccaccttccttcccaagtccctcttcgagcagttcaggagggtggccaatttctacttccttgtctctggtatccttgccttgactccacttgcaccttacacggcagtgagcgcgcttgcaccgctctgtgtcgtgattgtagccaccatggcaaaagaaggggttgaggactggcggaggaaacaacaggatcatgagctcaataatcggatagtcaaagtgcataggggaagtggccattttgaagagacaaaatggaagaatatcaaagttggagatgtaataaaactggagaaggataatttctttcccgctgatatgattctgctttcatctagctatccggatggaatatgttatgtagagaccatgaaccttgatggtgaaacaaatttgaaaattaaacaagctctcgaggtgacattggatttacaggaggacacaaagttcagagaagtcagacaaacaataaaatgtgaagacccaaatgcgaacctctactcctttgtcggttcaatggaatggagaggccagcagtatcccctgtcacccctacagcttcttctccgggactcaaaactacggaacacagactacatatatggggctgtcatcttcacaggtcatgatacaaaagtgatgcaaaatgcaacagatccaccatctaaaagaagtaagattgagaagaaaatggatcaaattatttacgttctgatgtcttctctactcatgattgcattacttggttccatcttctttgggatctggaccaaagaggacgtaagagatggtgggctcaaacggtggtatcttcggccagatgctactactatattctatgatccaaagagagcagctctggcatctttctttcatttgttgacggccttgatgctgtacagctacttcatacccatttctttgtatatatccattgagatagtcaagatcttgcaagctctatttatcaaccaggatattgaaatgtatcatgaagaatcagataagccaactcatgctcgtacttcgaatctaaatgaagaactaggtatggttgatacaattctatccgataagactggaacattaacatgcaacatgatggagttcatcaagtgttcaattgctggcacagcctatggtaagggcgtcactgaagttgagagagctatggctatgaggaaaggtgacagtttagatgatgacattgaaaatggagactacaaagacaaaaaaaatcacaacagtcccaatgttaaagggttcaatttcaaggatccacgaataatggatgggaattggattcatgagcctaacaaagatatgataagagattttttccggctcctagccatctgccacacatgcattgctgaaatagacgaaaatgagaaggtttcatacgaagctgagtcccctgatgaagctgcatttgttattgcggcaagagaactagggtttgagttttacaagaggtcactggcaactataattattcgtgagcaggatccaagttggaatgttgttgagaaaaggtacagaaagtatgaactcttaaatatattggagttcagtagctcaaggagacggatgtccgtgatagtcaaagaaccagagggaaggatattacttctcagcaagggtgctgataggtgcctgaatgcatagacaagcttgcgcaagccggaattaagatatgggtcctgactggcgacaagatggagacagctatcaatattgggtttgcatgtagcctgcttaggcaagacatgacacagataattgtcacactggaacaacctgacatcatcgcgttggagaaagatggtgacaaatataaaatttttaaggcatcaaagaaaaaggttatgagtcagatagaggatggaatcaaacaaattccaccttcaactaaaattagcactgcatcatttgcactaatcattgatggtaaatcaataccttatgctttggaagatgatgtcaagtttaagttcttggatcttgctatcaactgtgcatcagtgatatgttgccgatcttcaccaaaacagaaggcactggtcacaagatttgttaagcaagtaacacataaagtgactttagcaataggtgatggggcaaatgatgttggcatgcttcaagaagctgacataggggttggcatcagtggtgctgaaggaatgcaggctgtcatggctagtgatgttgctgttgcccaattccgctttttggaacggctacttctggtgcatggacattggtgttaccggcgtatttcagtgatgatatgctatttcttctacaagaatgttacttttggtgtcactctctttctctacgaagcatttgcatctttctctgggaagccagcttataatgattggttcttgtcactctataatgtcttcttcacctcccttcctgtcattgctttgggagtctttgaccaggatgtgtctgccaggctatgcatacagtatccacagctataccaagaaggagtgcagaatatattattcagttggtgtcggatacttggctggatgcttaacggtgttatgaatgctgtcttaatatttttcttctgcatcacaacctttgaggaccaggtgttccgccgggatggtcaagttgcaggcttggatgctctaggcgtcgccatgtacacttgtattgtatgggttgtcaactgtcaaatggcgctctctgtgaactacttcaccataatccagcacatattcatatggggcagcattgcagtatggtacctcttcctcatagtttatggttccatgaacccgaggttctcaactacagcctacatggtcttcatcgaacagctggccccagccctctcattttggttggtgacactttttgttgtgctggcaacacttgtcccctacttcacgtatgccgcgatccagatccggtttttcccaatgttccacaacaagattcagtggaagcggtacttggggaaggctgaagacccagaagtggcaaggcagttgtcatcacgacaccggacgtcgtcgcagcagaggatggtcggtatctctgctcgtcgggacggcaaggctatgcaaataacaagggagacagagatagaagttcaggagtagcattgtcagtagattttgcgttttgtacagcttataggatattgtctccggcaggatgacagctgaactgattggaaaccggaatgtttctggattgctgcttctatgatggctgtcatggaagctgatggtagagcaagactacaaattgcttagataggtcacaactcacaaggaggccaagagatcctgttgtaaagttcaattttagcagttcaaggctgtgtttcccccccccccccccctgcttctcttacatcatagatgcttgtaaccagattggtagaatttcgttgtttttattcctctttaccccccttgcctgccccctctcaactgtattttaaacaataatgtaaggcatcttgtttgagtggctttcatgctttattttggaaagaatcataattgagtgatatagaatgtaagattggcctctaatatttgtttccatgacttttcaaatatggggaggccacaaaggtgcctttgtgccatcaccaaaaaatttcgtacacttgttcttattcaattttcctaggaaaaaattattcttctgtactactgattaataagtggaagaaaatgggtattttggagaaaacaacactttctatgtgaaaacaacatatcctgatttgattcaactgttaatggtgagccagcatggcaaaaaaataaaaaaattgtatagaactaagataaaatcaaggcttactgtatgaaagatgaataaatgaaccaagaggtaaataaacttcaaatagtgacacagagagaactcaaggatcaacattacatggatttacaatatttgtcttactcctttccgttctattattagtataccatactaacctgctgcagttacaaccgtctccagtagcttatccaaactcatattcaaaatactatctacaaacagtacaatatacagtgtaaaatagatatatttagtgaccatgtgggtgcaatgtacagtggtttacccatatgatcatcaaaaccacagttttgtactatagattataccgtttgtagagcttgtagagtatagcttgaatacatgtatgagtctgctggagatgatttaagggaagcaaagaaagcaactaacttgagccgctgagcgcccggttaggttgacaggtttacgtttcacggctccggcagcggcagcggcagtggctgcgatgcagccggctgctttgtctccg

SEQ ID NO: 79986 - DNA, 3041 bp, Zea Mays
gtatatacttttatttggttgcccataattcagcacaaaccaagttccacgagacccacacgtttctttaccctaaccttttcaatgctccagcgaaggaacagtcgccgccatttcttcccatctccatcttcctcgcagcttcgacgctccatcttccgctccctcccttacccgcggtcggcacgcaggcgacgccggcggcgctcaggctcgggctctcatctactgcgtcagcagcttcccctcccgcatctcgccagtcgcctcgcgctctcacctccggtcttccgcacactggccggtgaccctgccttataatattctgccacatcactctgggtgaagcaagattgggtagctttccggtgcctacttcattcttgagtttgtcaatataagccactgaagccaaggatgcatgaaaattaacccaatgaaataaatgctcctacatgagtccaagcatttacctatcaaacttgataatgctggatgctattctcaggcagacctatatggtgatcttgccatttattgtcgtgtttctatgttatggaaattttaagagcgctgatgttacctgtagtgctctttaaatttggaacttggaacatggagcatgtgctgattagtagaaggtttccaactgatcctgctctctaaatttggaacatggagcatgtgctgagtagtagaaggtttccaactgatcccaatgagtataagttatatgaggaaattggagatggtgttagtgccacagtataccgagctctttgtgtcccacttgacatcttggttgccatcaaagtgcttgaccttgagaaatgtaacaatgacctggatgggataagacgggaagtgcaaactatgagtttgattgatcacccaaatcttcttcgtgcatattgctcatttacaaatgggcaccagctttgggttgtcatgccttacatggctgctggatctgctctccacattatgaaaacttcttttccagaagggtttgatgagccagtcattgctactcttttgcgtgaagttttgaaagctcttgtctacctacattctcaaggacatattcacagagatgtcaaggctggaaacatcttaatagatacaaatggggctgttaagctaggagactttggtgtgtcagcctgtatgttcgatactggaaataggcaaagagcaagaaatacatttgtagggacgccttgctggatggctcctgaagtcatgcaacaactgcatggttatgattacaaagctgacatttggtcctttggaataacggcattagaactagcacatggtcatgctccattttcgaagtaccctccaatgaaggtgttgcttatgaccttgcaaaatgcaccaccaggtttagattatgagagggacaagcggttttcaaagtctttcaaggatttggttgctacatgcttagtcaaggatccacgcaagcgtccttcgtctgaaaagctgctgaagcattctttctttaagcatgctcgctcagctgaatatctggcacggagtattcttgatggcctccctccattgggtgaacgctttagggaactgaagagcaaagaggctgagttgcttctcaataacaaacttggtcaggagagcaaggagcagctatcacagaaagagtacataaggggcatcagtggctggaacttcaatctagaggacttgaaaaatgcagctgcccttatagacagttcaaatggcacttgttatttagatgtcagggagaacagagttaaggatgactcacaagaagcttacaatggtccagaacatatttaccaggaaaggctcaaccatgttgcttctagaaggcctgaagaggatgagatacaagaagttgaagccttgaatgatgctgtctcctcttcgttttcaagccgctcccttgaggcactaaaatcttgctttgatgtttgtggtgttgatgatccgagcccaactgctactgattcaagagcgcaaccaagtgtcggaactttacctttccagcagttgcaaaaatttgagcattgtaaaagtggcgactgcaatggtgaaagcttggaaagaagcgtttctgtacctacgaatctggtcactagtggataccacaagcattcaagtggttctcttatacctgagcaagttctttctccctacttgagcagtgatttggaaagggatggatttcgtcagaaaaacttaagcagcaggaactgtagtggccctttattgttccgccaaatgaaggattcacgcacacatcaatctgttgcgccagacgagtcgtcggaaggaaaaattatccgtcgaagggggcgcttccaggttacatcagatagtatttctgaaaaggtagctacatcatcctgcaacagcagcaggataaatctaccaattgatgcagcacgttcaagtcccaagttgtctgcaattcttccaactttgcaattcttgatgaagcagaatactatgcaaaaggaagtactcagtaggctgatttcttcaattgaggaaacatctgatgattctgaagcaaccggaagcagttcatatcagtcttctggagggcctgcccgagaaaaggaattgcatttgtatgttctccaattgcagcgaagtgtcaccgaacttgctgaggaagtgcaaagattaaagctccaaaacaataagcttgagcatcagatcaatatattgtcaagaaaagatgaaaggtcgtcaacgcaagataactgacaatgatgatatgccccttctaccacattaaagtgaagctgtgatccttcgaggctgaggtatacaacaattgagaatgttgtggtagttggaggattttgtatagccattgtactgcgctgtcaaatagaatcttttgtctagtaactagcattcatgtttgtcgtctcttatctagacgccactaaaaagatatgttctgtatctgcggctaaaattgtggtagcccctaccaaaccgttgccgaagtttttttttgttaatcacctctgtatcaatac

SEQ ID NO: 79987 - DNA, 3029 bp, Zea Mays
cccacacgtttctttaccctaaccttttcaatgctccagcgaaggaacagtcgccgccatttcttcccatctccatcttcctcgcagcttcgacgctccatcttccgctccctcccttacccgcggtcggcacgcaggcgacgccggcggcgctcaggctcgggctctcatctactgcgtcagcagcttcccctcccgcatctcgccagtcgcctcgcgctctcacctccggtcttccgcacactggccggtgaccctgccttataatattctgccacatcactctgggtgaagcaagattgggtagctttccggtgcctacttcattcttgagtttgtcaatataagccactgaagccaaggatgcatgaaaattaacccaatgaaataaatgctcctacatgagtccaagcatttacctatcaaacttgataatgctggatgctattctcaggcagacctatatggtgatcttgccatttattgtcgtgtttctatgttatggaaattttaagagcgctgatgttacctgtagtgctctttaaatttggaacttggaacatggagcatgtgctgagtagtagaaggtttccaactgatcccaatgagtataagttatatgaggaaattggagatggtgttagtgccacagtataccgagctctttgtgtcccacttgacatcttggttgccatcaaagtgcttgaccttgagaaatgtaacaatgacctggatgggataagacgggaagtgcaaactatgagtttgattgatcacccaaatcttcttcgtgcatattgctcatttacaaatgggcaccagctttgggttgtcatgccttacatggctgctggatctgctctccacattatgaaaacttcttttccagaagggtttgatgagccagtcattgctactcttttgcgtgaagttttgaaagctcttgtctacctacattctcaaggacatattcacagagatgtcaaggctggaaacatcttaatagatacaaatggggctgttaagctaggagactttggtgtgtcagcctgtatgttcgatactggaaataggcaaagagcaagaaatacatttgtagggacgccttgctggatggctcctgaagtcatgcaacaactgcatggttatgattacaaagctgacatttggtcctttggaataacggcattagaactagcacatggtcatgctccattttcgaagtaccctccaatgaaggtgttgcttatgaccttgcaaaatgcaccaccaggtttagattatgagagggacaagcggttttcaaagtctttcaaggatttggttgctacatgcttagtcaaggatccacgcaagcgtccttcgtctgaaaagctgctgaagcattctttctttaagcatgctcgctcagctgaatatctggcacggagtattcttgatggcctccctccattgggtgaacgctttagggaactgaagagcaaagaggctgagttgcttctcaataacaaacttggtcaggagagcaaggagcagctatcacagaaagagtacataaggggcatcagtggctggaacttcaatctagaggacttgaaaaatgcagctgcccttatagacagttcaaatggcacttgttatttagatgtcagggagaacagagttaaggatgactcacaagaagcttacaatggtccagaacatatttaccaggaaaggctcaaccatgttgcttctagaaggcctgaagaggatgagatacaagaagttgaagccttgaatgatgctgtctcctcttcgttttcaagccgctcccttgaggcactaaaatcttgctttgatgtttgtggtgttgatgatccgagcccaactgctactgattcaagagcgcaaccaagtgtcggaactttacctttccagcagttgcaaaaatttgagcattgtaaaagtggcgactgcaatggtgaaagcttggaaagaagcgtttctgtacctacgaatctggtcactagtggataccacaagcattcaagtggttctcttatacctgagcaagttctttctccctacttgagcagtgatttggaaagggatggatttcgtcagaaaaacttaagcagcaggaactgtagtggccctttattgttccgccaaatgaaggattcacgcacacatcaatctgttgcgccagacgagtcgtcggaaggaaaaattatccgtcgaagggggcgcttccaggttacatcagatagtatttctgaaaaggtagctacatcatcctgcaacagcagcaggataaatctaccaattgatgcagcacgttcaagtcccaagttgtctgcaattcttccaactttgcaattcttgatgaagcagaatactatgcaaaaggaagtactcagtaggctgatttcttcaattgaggaaacatctgatgattctgaagcaaccggaagcagttcatatcagtcttctggagggcctgcccgagaaaaggaattgcatttgtatgttctccaattgcagcgaagtgtcaccgaacttgctgaggaagtgcaaagattaaagctccaaaacaataagcttgagcatcagatcaatatattgtcaagaaaagatgaaaggtcgtcaacgcaagataactgacaatgatgatatgccccttctaccacattgaaatggaaaagttcaggcctctgctcttacacgcaacgagtcttacaagtttgttgctcaattgctaatcaagaatagacgggaaatgaacataataaacgaaagtgaagctgtgatccttcgaggctgaggtatacaacaattgagaatgttgtggtagttggaggattttgtatagccattgtactgcgctgtcaaatagaatcttttgtctagtaactagcattcatgtttgtcgtctcttatctagacgccactaaaaagatatgttctgtatctgcggctaaaattgtggtagcccctaccaaaccgttgccgaagtttttttttgttaatcacctctgtatcaatac

SEQ ID NO: 79988 - DNA, 3413 bp, Zea Mays
cacgtttctttaccctaaccttttcaatgctccagcgaaggaacagtcgccgccatttcttcccatctccatcttcctcgcagcttcgacgctccatcttccgctccctcccttacccgcggtcggcacgcaggcgacgccggcggcgctcaggctcgggctctcatctactgcgtcagcagcttcccctcccgcatctcgccagtcgcctcgcgctctcacctccggtcttccgcacactggccggtgaccctgccttataatattctgccacatcactctgggtgaagcaagattgggtagctttccggtgcctacttcattcttgagtttgtcaatataagccactgaagccaaggatgcatgaaaattaacccaatgaaataaatgctcctacatgagtccaagcatttacctatcaaacttgataatgctggatgctattctcaggcagacctatatggtgatcttgccatttattgtcgtgtttctatgttatggaaattttaagagcgctgatgttacctgtagtgctctttaaatttggaacttggaacatggagcatgtgctgattagtagaaggtttccaactgatcctgctctctaaatttggaacatggagcatgtgctgagtagtagaaggtttccaactgatcccaatgagtataagttatatgaggaaattggagatggtgttagtgccacagtataccgagctctttgtgtcccacttgacatcttggttgccatcaaagtgcttgaccttgagaaatgtaacaatgacctggatgggataagacgggaagtgcaaactatgagtttgattgatcacccaaatcttcttcgtgcatattgctcatttacaaatgggcaccagctttgggttgtcatgccttacatggctgctggatctgctctccacattatgaaaacttcttttccagaagggtttgatgagccagtcattgctactcttttgcgtgaagttttgaaagctcttgtctacctacattctcaaggacatattcacagagatgtcaaggctggaaacatcttaatagatacaaatggggctgttaagctaggagactttggtgtgtcagcctgtatgttcgatactggaaataggcaaagagcaagaaatacatttgtagggacgccttgctggatggctcctgaagtcatgcaacaactgcatggttatgattacaaagctgacatttggtcctttggaataacggcattagaactagcacatggtcatgctccattttcgaagtaccctccaatgaaggtgttgcttatgaccttgcaaaatgcaccaccaggtttagattatgagagggacaagcggttttcaaagtctttcaaggatttggttgctacatgcttagtcaaggatccacgcaagcgtccttcgtctgaaaagctgctgaagcattctttctttaagcatgctcgctcagctgaatatctggcacggagtattcttgatggcctccctccattgggtgaacgctttagggaactgaagagcaaagaggctgagttgcttctcaataacaaacttggtcaggagagcaaggagcagctatcacagaaagagtacataaggggcatcagtggctggaacttcaatctagaggacttgaaaaatgcagctgcccttatagacagttcaaatggcacttgttatttagatgtcagggagaacagagttaaggatgactcacaagaagcttacaatggtccagaacatatttaccaggaaaggctcaaccatgttgcttctagaaggcctgaagaggatgagatacaagaagttgaagccttgaatgatgctgtctcctcttcgttttcaagccgctcccttgaggcactaaaatcttgctttgatgtttgtggtgttgatgatccgagcccaactgctactgattcaagagcgcaaccaagtgtcggaactttacctttccagcagttgcaaaaatttgagcattgtaaaagtggcgactgcaatggtgaaagcttggaaagaagcgtttctgtacctacgaatctggtcactagtggataccacaagcattcaagtggttctcttatacctgagcaagttctttctccctacttgagcagtgatttggaaagggatggatttcgtcagaaaaacttaagcagcaggaactgtagtggccctttattgttccgccaaatgaaggattcacgcacacatcaatctgttgcgccagacgagtcgtcggaaggaaaaattatccgtcgaagggggcgcttccaggttacatcagatagtatttctgaaaaggtagctacatcatcctgcaacagcagcaggataaatctaccaattgatgcagcacgttcaagtcccaagttgtctgcaattcttccaactttgcaattcttgatgaagcagaatactatgcaaaaggaagtactcagtaggctgatttcttcaattgaggaaacatctgatgattctgaagcaaccggaagcagttcatatcagtcttctggagggcctgcccgagaaaaggaattgcatttgtatgttctccaattgcagcgaagtgtcaccgaacttgctgaggaagtgcaaagattaaagctccaaaacaataagcttgagcatcagatcaatatattgtcaagaaaagatgaaaggtcgtcaacgcaagataactgacaatgatgatatgccccttctaccacattgtaattcgattacccaattttgctttgttagaaagttatttttattccctgcagtcagagttgtatcattgtaagttgtaagtatttagcgaagtgtgaaatcatagtaattttgatctgtacagctttgtttggttaaccatgaagatatagttcttgtgttataagtaatgtgctgataatattgttttgcgtggaagtttgtgaaagtttatctgagcatggaacattgtgttgcgtgaagttggttggagtagtatttgcgctggcagtggtgttggatccgacatagggaacagctaaggatatggaattatgttttttttaggaaatggaaaagttcaggcctctgctcttacacgcaacgagtcttacaagtttgttgctcaattgctaatcaagaatagacgggaaatgaacataataaacgaaagtgaagctgtgatccttcgaggctgaggtatacaacaattgagaatgttgtggtagttggaggattttgtatagccattgtactgcgctgtcaaatagaatcttttgtctagtaactagcattcatgtttgtcgtctcttatctagacgccactaaaaagatatgttctgtatctgcggctaaaattgtggtagcccctaccaaaccgttgccgaagtttttttttgttaatcacctctgtatcaatac

SEQ ID NO: 79989 - DNA, 2689 bp, Zea Mays
aaccttttcaatgctccagcgaaggaacagtcgccgccatttcttcccatctccatcttcctcgcagcttcgacgctccatcttccgctccctcccttacccgcggtcggcacgcaggcgacgccggcggcgctcaggctcgggctctcatctactgcgtcagcagcttcccctcccgcatctcgccagtcgcctcgcgctctcacctccggtcttccgcacactggccggtgaccctgccttataatattctgccacatcactctgggtgaagcaagattggtgctctttaaatttggaacttggaacatggagcatgtgctgattagtagaaggtttccaactgatcctgctctctaaatttggaacatggagcatgtgctgagtagtagaaggtttccaactgatcccaatgagtataagttatatgaggaaattggagatggtgttagtgccacagtataccgagctctttgtgtcccacttgacatcttggttgccatcaaagtgcttgaccttgagaaatgtaacaatgacctggatgggataagacgggaagtgcaaactatgagtttgattgatcacccaaatcttcttcgtgcatattgctcatttacaaatgggcaccagctttgggttgtcatgccttacatggctgctggatctgctctccacattatgaaaacttcttttccagaagggtttgatgagccagtcattgctactcttttgcgtgaagttttgaaagctcttgtctacctacattctcaaggacatattcacagagatgtcaaggctggaaacatcttaatagatacaaatggggctgttaagctaggagactttggtgtgtcagcctgtatgttcgatactggaaataggcaaagagcaagaaatacatttgtagggacgccttgctggatggctcctgaagtcatgcaacaactgcatggttatgattacaaagctgacatttggtcctttggaataacggcattagaactagcacatggtcatgctccattttcgaagtaccctccaatgaaggtgttgcttatgaccttgcaaaatgcaccaccaggtttagattatgagagggacaagcggttttcaaagtctttcaaggatttggttgctacatgcttagtcaaggatccacgcaagcgtccttcgtctgaaaagctgctgaagcattctttctttaagcatgctcgctcagctgaatatctggcacggagtattcttgatggcctccctccattgggtgaacgctttagggaactgaagagcaaagaggctgagttgcttctcaataacaaacttggtcaggagagcaaggagcagctatcacagaaagagtacataaggggcatcagtggctggaacttcaatctagaggacttgaaaaatgcagctgcccttatagacagttcaaatggcacttgttatttagatgtcagggagaacagagttaaggatgactcacaagaagcttacaatggtccagaacatatttaccaggaaaggctcaaccatgttgcttctagaaggcctgaagaggatgagatacaagaagttgaagccttgaatgatgctgtctcctcttcgttttcaagccgctcccttgaggcactaaaatcttgctttgatgtttgtggtgttgatgatccgagcccaactgctactgattcaagagcgcaaccaagtgtcggaactttacctttccagcagttgcaaaaatttgagcattgtaaaagtggcgactgcaatggtgaaagcttggaaagaagcgtttctgtacctacgaatctggtcactagtggataccacaagcattcaagtggttctcttatacctgagcaagttctttctccctacttgagcagtgatttggaaagggatggatttcgtcagaaaaacttaagcagcaggaactgtagtggccctttattgttccgccaaatgaaggattcacgcacacatcaatctgttgcgccagacgagtcgtcggaaggaaaaattatccgtcgaagggggcgcttccaggttacatcagatagtatttctgaaaaggtagctacatcatcctgcaacagcagcaggataaatctaccaattgatgcagcacgttcaagtcccaagttgtctgcaattcttccaactttgcaattcttgatgaagcagaatactatgcaaaaggaagtactcagtaggctgatttcttcaattgaggaaacatctgatgattctgaagcaaccggaagcagttcatatcagtcttctggagggcctgcccgagaaaaggaattgcatttgtatgttctccaattgcagcgaagtgtcaccgaacttgctgaggaagtgcaaagattaaagctccaaaacaataagcttgagcatcagatcaatatattgtcaagaaaagatgaaaggtcgtcaacgcaagataactgacaatgatgatatgccccttctaccacattgtaattcgattacccaattttgctttgttagaaagttatttttattccctgcagtcagagttgtatcattgtaagttgtaagtatttagcgaagtgtgaaatcatagtaattttgatctgtacagctttgtttggttaaccatgaagatatagttcttgtgttataagtaatgtgctgataatattgttttgcgtggaagtttgtg

SEQ ID NO: 79990 - DNA, 2716 bp, Zea Mays
cgaaggaacagtcgccgccatttcttcccatctccatcttcctcgcagcttcgacgctccatcttccgctccctcccttacccgcggtcggcacgcaggcgacgccggcggcgctcaggctcgggctctcatctactgcgtcagcagcttcccctcccgcatctcgccagtcgcctcgcgctctcacctccggtcttccgcacactggccggtgaccctgccttataatattctgccacatcactctgggtgaagcaagattggtgctctttaaatttggaacttggaacatggagcatgtgctgattagtagaaggtttccaactgatcctgctctctaaatttggaacatggagcatgtgctgagtagtagaaggtttccaactgatcccaatgagtataagttatatgaggaaattggagatggtgttagtgccacagtataccgagctctttgtgtcccacttgacatcttggttgccatcaaagtgcttgaccttgagaaatgtaacaatgacctggatgggataagacgggaagtgcaaactatgagtttgattgatcacccaaatcttcttcgtgcatattgctcatttacaaatgggcaccagctttgggttgtcatgccttacatggctgctggatctgctctccacattatgaaaacttcttttccagaagggtttgatgagccagtcattgctactcttttgcgtgaagttttgaaagctcttgtctacctacattctcaaggacatattcacagagatgtcaaggctggaaacatcttaatagatacaaatggggctgttaagctaggagactttggtgtgtcagcctgtatgttcgatactggaaataggcaaagagcaagaaatacatttgtagggacgccttgctggatggctcctgaagtcatgcaacaactgcatggttatgattacaaagctgacatttggtcctttggaataacggcattagaactagcacatggtcatgctccattttcgaagtaccctccaatgaaggtgttgcttatgaccttgcaaaatgcaccaccaggtttagattatgagagggacaagcggttttcaaagtctttcaaggatttggttgctacatgcttagtcaaggatccacgcaagcgtccttcgtctgaaaagctgctgaagcattctttctttaagcatgctcgctcagctgaatatctggcacggagtattcttgatggcctccctccattgggtgaacgctttagggaactgaagagcaaagaggctgagttgcttctcaataacaaacttggtcaggagagcaaggagcagctatcacagaaagagtacataaggggcatcagtggctggaacttcaatctagaggacttgaaaaatgcagctgcccttatagacagttcaaatggcacttgttatttagatgtcagggagaacagagttaaggatgactcacaagaagcttacaatggtccagaacatatttaccaggaaaggctcaaccatgttgcttctagaaggcctgaagaggatgagatacaagaagttgaagccttgaatgatgctgtctcctcttcgttttcaagccgctcccttgaggcactaaaatcttgctttgatgtttgtggtgttgatgatccgagcccaactgctactgattcaagagcgcaaccaagtgtcggaactttacctttccagcagttgcaaaaatttgagcattgtaaaagtggcgactgcaatggtgaaagcttggaaagaagcgtttctgtacctacgaatctggtcactagtggataccacaagcattcaagtggttctcttatacctgagcaagttctttctccctacttgagcagtgatttggaaagggatggatttcgtcagaaaaacttaagcagcaggaactgtagtggccctttattgttccgccaaatgaaggattcacgcacacatcaatctgttgcgccagacgagtcgtcggaaggaaaaattatccgtcgaagggggcgcttccaggttacatcagatagtatttctgaaaaggtagctacatcatcctgcaacagcagcaggataaatctaccaattgatgcagcacgttcaagtcccaagttgtctgcaattcttccaactttgcaattcttgatgaagcagaatactatgcaaaaggaagtactcagtaggctgatttcttcaattgaggaaacatctgatgattctgaagcaaccggaagcagttcatatcagtcttctggagggcctgcccgagaaaaggaattgcatttgtatgttctccaattgcagcgaagtgtcaccgaacttgctgaggaagtgcaaagattaaagctccaaaacaataagcttgagcatcagatcaatatattgtcaagaaaagatgaaaggtcgtcaacgcaagataactgacaatgatgatatgccccttctaccacattaaagtgaagctgtgatccttcgaggctgaggtatacaacaattgagaatgttgtggtagttggaggattttgtatagccattgtactgcgctgtcaaatagaatcttttgtctagtaactagcattcatgtttgtcgtctcttatctagacgccactaaaaagatatgttctgtatctgcggctaaaattgtggtagcccctaccaaaccgttgccgaagtttttttttgttaatcacctctgtatcaatac

SEQ ID NO: 79991 - DNA, 2619 bp, Zea Mays
cagtcgccgccatttcttcccatctccatcttcctcgcagcttcgacgctccatcttccgctccctcccttacccgcggtcggcacgcaggcgacgccggcggcgctcaggctcgggctctcatctactgcgtcagcagcttcccctcccgcatctcgccagtcgcctcgcgctctcacctccggtcttccgcacactggccggtgaccctgctgctctttaaatttggaacttggaacatggagcatgtgctgattagtagaaggtttccaactgatcctgctctctaaatttggaacatggagcatgtgctgagtagtagaaggtttccaactgatcccaatgagtataagttatatgaggaaattggagatggtgttagtgccacagtataccgagctctttgtgtcccacttgacatcttggttgccatcaaagtgcttgaccttgagaaatgtaacaatgacctggatgggataagacgggaagtgcaaactatgagtttgattgatcacccaaatcttcttcgtgcatattgctcatttacaaatgggcaccagctttgggttgtcatgccttacatggctgctggatctgctctccacattatgaaaacttcttttccagaagggtttgatgagccagtcattgctactcttttgcgtgaagttttgaaagctcttgtctacctacattctcaaggacatattcacagagatgtcaaggctggaaacatcttaatagatacaaatggggctgttaagctaggagactttggtgtgtcagcctgtatgttcgatactggaaataggcaaagagcaagaaatacatttgtagggacgccttgctggatggctcctgaagtcatgcaacaactgcatggttatgattacaaagctgacatttggtcctttggaataacggcattagaactagcacatggtcatgctccattttcgaagtaccctccaatgaaggtgttgcttatgaccttgcaaaatgcaccaccaggtttagattatgagagggacaagcggttttcaaagtctttcaaggatttggttgctacatgcttagtcaaggatccacgcaagcgtccttcgtctgaaaagctgctgaagcattctttctttaagcatgctcgctcagctgaatatctggcacggagtattcttgatggcctccctccattgggtgaacgctttagggaactgaagagcaaagaggctgagttgcttctcaataacaaacttggtcaggagagcaaggagcagctatcacagaaagagtacataaggggcatcagtggctggaacttcaatctagaggacttgaaaaatgcagctgcccttatagacagttcaaatggcacttgttatttagatgtcagggagaacagagttaaggatgactcacaagaagcttacaatggtccagaacatatttaccaggaaaggctcaaccatgttgcttctagaaggcctgaagaggatgagatacaagaagttgaagccttgaatgatgctgtctcctcttcgttttcaagccgctcccttgaggcactaaaatcttgctttgatgtttgtggtgttgatgatccgagcccaactgctactgattcaagagcgcaaccaagtgtcggaactttacctttccagcagttgcaaaaatttgagcattgtaaaagtggcgactgcaatggtgaaagcttggaaagaagcgtttctgtacctacgaatctggtcactagtggataccacaagcattcaagtggttctcttatacctgagcaagttctttctccctacttgagcagtgatttggaaagggatggatttcgtcagaaaaacttaagcagcaggaactgtagtggccctttattgttccgccaaatgaaggattcacgcacacatcaatctgttgcgccagacgagtcgtcggaaggaaaaattatccgtcgaagggggcgcttccaggttacatcagatagtatttctgaaaaggtagctacatcatcctgcaacagcagcaggataaatctaccaattgatgcagcacgttcaagtcccaagttgtctgcaattcttccaactttgcaattcttgatgaagcagaatactatgcaaaaggaagtactcagtaggctgatttcttcaattgaggaaacatctgatgattctgaagcaaccggaagcagttcatatcagtcttctggagggcctgcccgagaaaaggaattgcatttgtatgttctccaattgcagcgaagtgtcaccgaacttgctgaggaagtgcaaagattaaagctccaaaacaataagcttgagcatcagatcaatatattgtcaagaaaagatgaaaggtcgtcaacgcaagataactgacaatgatgatatgccccttctaccacattgtaattcgattacccaattttgctttgttagaaagttatttttattccctgcagtcagagttgtatcattgtaagttgtaagtatttagcgaagtgtgaaatcatagtaattttgatctgtacagctttgtttggttaaccatgaagatatagttcttgtgttataagtaatgtgctgataatattgttttgcgtggaagtttgtg

SEQ ID NO: 79992 - DNA, 2647 bp, Zea Mays
atttcttcccatctccatcttcctcgcagcttcgacgctccatcttccgctccctcccttacccgcggtcggcacgcaggcgacgccggcggcgctcaggctcgggctctcatctactgcgtcagcagcttcccctcccgcatctcgccagtcgcctcgcgctctcacctccggtcttccgcacactggccggtgaccctgccttataatattctgccacatcactctgggtgaagcaagattggtgctctttaaatttggaacttggaacatggagcatgtgctgattagtagaaggtttccaactgatcctgctctctaaatttggaacatggagcatgtgctgagtagtagaaggtttccaactgatcccaatgagtataagttatatgaggaaattggagatggtgttagtgccacagtataccgagctctttgtgtcccacttgacatcttggttgccatcaaagtgcttgaccttgagaaatgtaacaatgacctggatgggataagacgggaagtgcaaactatgagtttgattgatcacccaaatcttcttcgtgcatattgctcatttacaaatgggcaccagctttgggttgtcatgccttacatggctgctggatctgctctccacattatgaaaacttcttttccagaagggtttgatgagccagtcattgctactcttttgcgtgaagttttgaaagctcttgtctacctacattctcaaggacatattcacagagatgtcaaggctggaaacatcttaatagatacaaatggggctgttaagctaggagactttggtgtgtcagcctgtatgttcgatactggaaataggcaaagagcaagaaatacatttgtagggacgccttgctggatggctcctgaagtcatgcaacaactgcatggttatgattacaaagctgacatttggtcctttggaataacggcattagaactagcacatggtcatgctccattttcgaagtaccctccaatgaaggtgttgcttatgaccttgcaaaatgcaccaccaggtttagattatgagagggacaagcggttttcaaagtctttcaaggatttggttgctacatgcttagtcaaggatccacgcaagcgtccttcgtctgaaaagctgctgaagcattctttctttaagcatgctcgctcagctgaatatctggcacggagtattcttgatggcctccctccattgggtgaacgctttagggaactgaagagcaaagaggctgagttgcttctcaataacaaacttggtcaggagagcaaggagcagctatcacagaaagagtacataaggggcatcagtggctggaacttcaatctagaggacttgaaaaatgcagctgcccttacagttcaaatggcacttgttatttagatgtcagggagaacagagttaaggatgactcacaagaagcttacaatggtccagaacatatttaccaggaaaggctcaaccatgttgcttctagaaggcctgaagaggatgagatacaagaagttgaagccttgaatgatgctgtctcctcttcgttttcaagccgctcccttgaggcactaaaatcttgctttgatgtttgtggtgttgatgatccgagcccaactgctactgattcaagagcgcaaccaagtgtcggaactttacctttccagcagttgcaaaaatttgagcattgtaaaagtggcgactgcaatggtgaaagcttggaaagaagcgtttctgtacctacgaatctggtcactagtggataccacaagcattcaagtggttctcttatacctgagcaagttctttctccctacttgagcagtgatttggaaagggatggatttcgtcagaaaaacttaagcagcaggaactgtagtggccctttattgttccgccaaatgaaggattcacgcacacatcaatctgttgcgccagacgagtcgtcggaaggaaaaattatccgtcgaagggggcgcttccaggttacatcagatagtatttctgaaaaggtagctacatcatcctgcaacagcagcaggataaatctaccaattgatgcagcacgttcaagtcccaagttgtctgcaattcttccaactttgcaattcttgatgaagcagaatactatgcaaaaggaagtactcagtaggctgatttcttcaattgaggaaacatctgatgattctgaagcaaccggaagcagttcatatcagtcttctggagggcctgcccgagaaaaggaattgcatttgtatgttctccaattgcagcgaagtgtcaccgaacttgctgaggaagtgcaaagattaaagctccaaaacaataagcttgagcatcagatcaatatattgtcaagaaaagatgaaaggtcgtcaacgcaagataactgacaatgatgatatgccccttctaccacattgtaattcgattacccaattttgctttgttagaaagttatttttattccctgcagtcagagttgtatcattgtaagttgtaagtatttagcgaagtgtgaaatcatagtaattttgatctgtacagctttgtttggttaaccatgaagatatagttcttgtgttataagtaatgtgctgataatattgttttgcgtggaagtttgtg

SEQ ID NO: 79993 - DNA, 2211 bp, Zea Mays
cccatctccatcttcctcgcagcttcgacgctccatcttccgctccctcccttacccgcggtcggcacgcaggcgacgccggcggcgctcaggctcgggctctcatctactgcgtcagcagcttcccctcccgcatctcgccagtcgcctcgcgctctcacctccggtcttccgcacactggccggtgaccctgccttataatattctgccacatcactctgggtgaagcaagattggtgctctttaaatttggaacttggaacatggagcatgtgctgattagtagaaggtttccaactgatcctgctctctaaatttggaacatggagcatgtgctgagtagtagaaggtttccaactgatcccaatgagtataagttatatgaggaaattggagatggtgttagtgccacagtataccgagctctttgtgtcccacttgacatcttggttgccatcaaagtgcttgaccttgagaaatgtaacaatgacctggatgggataagacgggaagtgcaaactatgagtttgattgatcacccaaatcttcttcgtgcatattgctcatttacaaatgggcaccagctttgggttgtcatgccttacatggctgctggatctgctctccacattatgaaaacttcttttccagaagggtttgatgagccagtcattgctactcttttgcgtgaagttttgaaagctcttgtctacctacattctcaaggacatattcacagagatgtcaaggctggaaacatcttaatagatacaaatggggctgttaagctaggagactttggtgtgtcagcctgtatgttcgatactggaaataggcaaagagcaagaaatacatttgtagggacgccttgctggatggctcctgaagtcatgcaacaactgcatggttatgattacaaagctgacatttggtcctttggaataacggcattagaactagcacatggtcatgctccattttcgaagtaccctccaatgaaggtgttgcttatgaccttgcaaaatgcaccaccaggtttagattatgagagggacaagcggttttcaaagagcaaagaggctgagttgcttctcaataacaaacttggtcaggagagcaaggagcagctatcacagaaagagtacataaggggcatcagtggctggaacttcaatctagaggacttgaaaaatgcagctgcccttatagacagttcaaatggcacttgttatttagatgtcagggagaacagagttaaggatgactcacaagaagcttacaatggtccagaacatatttaccaggaaaggctcaaccatgttgcttctagaaggcctgaagaggatgagatacaagaagttgaagccttgaatgatgctgtctcctcttcgttttcaagccgctcccttgaggcactaaaatcttgctttgatgtttgtggtgttgatgatccgagcccaactgctactgattcaagagcgcaaccaagtgtcggaactttacctttccagcagttgcaaaaatttgagcattgtaaaagtggcgactgcaatggtgaaagcttggaaagaagcgtttctgtacctacgaatctggtcactagtggataccacaagcattcaagtggttctcttatacctgagcaagttctttctccctacttgagcagtgatttggaaagggatggatttcgtcagaaaaacttaagcagcaggaactgtagtggccctttattgttccgccaaatgaaggattcacgcacacatcaatctgttgcgccagacgagtcgtcggaaggaaaaattatccgtcgaagggggcgcttccaggttacatcagatagtatttctgaaaaggtagctacatcatcctgcaacagcagcaggataaatctaccaattgatgcagcacgttcaagtcccaagttgtctgcaattcttccaactttgcaattcttgatgaagcagaatactatgcaaaaggaagtactcagtaggctgatttcttcaattgaggaaacatctgatgattctgaagcaaccggaagcagttcatatcaggtgtgtaacattttaatgtggactgtagtctacttttgtttttttttctcgaaacacgcaggtgaactgtgccccatatataatatattaagaagatttaggaaaaggtctaaagaagaccagaaacaaaacagcttctttacggaggcc

SEQ ID NO: 79994 - DNA, 2872 bp, Zea Mays
cccatctccatcttcctcgcagcttcgacgctccatcttccgctccctcccttacccgcggtcggcacgcaggcgacgccggcggcgctcaggctcgggctctcatctactgcgtcagcagcttcccctcccgcatctcgccagtcgcctcgcgctctcacctccggtcttccgcacactggccggtgaccctgccttataatattctgccacatcactctgggtgaagcaagattgggtagctttccggtgcctacttcattcttgagtttgtcaatataagccactgaagccaaggatgcatgaaaattaacccaatgaaataaatgctcctacatgagtccaagcatttacctatcaaacttgataatgctggatgctattctcaggcagacctatatggtgatcttgccatttattgtcgtgtttctatgttatggaaattttaagagcgctgatgttacctgtagtgctctttaaatttggaacttggaacatggagcatgtgctgattagtagaaggtttccaactgatcctgctctctaaatttggaacatggagcatgtgctgagtagtagaaggtttccaactgatcccaatgagtataagttatatgaggaaattggagatggtgttagtgccacagtataccgagctctttgtgtcccacttgacatcttggttgccatcaaagtgcttgaccttgagaaatgtaacaatgacctggatgggataagacgggaagtgcaaactatgagtttgattgatcacccaaatcttcttcgtgcatattgctcatttacaaatgggcaccagctttgggttgtcatgccttacatggctgctggatctgctctccacattatgaaaacttcttttccagaagggtttgatgagccagtcattgctactcttttgcgtgaagttttgaaagctcttgtctacctacattctcaaggacatattcacagagatgtcaaggctggaaacatcttaatagatacaaatggggctgttaagctaggagactttggtgtgtcagcctgtatgttcgatactggaaataggcaaagagcaagaaatacatttgtagggacgccttgctggatggctcctgaagtcatgcaacaactgcatggttatgattacaaagctgacatttggtcctttggaataacggcattagaactagcacatggtcatgctccattttcgaagtaccctccaatgaaggtgttgcttatgaccttgcaaaatgcaccaccaggtttagattatgagagggacaagcggttttcaaagtctttcaaggatttggttgctacatgcttagtcaaggatccacgcaagcgtccttcgtctgaaaagctgctgaagcattctttctttaagcatgctcgctcagctgaatatctggcacggagtattcttgatggcctccctccattgggtgaacgctttagggaactgaagagcaaagaggctgagttgcttctcaataacaaacttggtcaggagagcaaggagcagctatcacagaaagagtacataaggggcatcagtggctggaacttcaatctagaggacttgaaaaatgcagctgcccttatagacagttcaaatggcacttgttatttagatgtcagggagaacagagttaaggatgactcacaagaagcttacaatggtccagaacatatttaccaggaaaggctcaaccatgttgcttctagaaggcctgaagaggatgagatacaagaagttgaagccttgaatgatgctgtctcctcttcgttttcaagccgctcccttgaggcactaaaatcttgctttgatgtttgtggtgttgatgatccgagcccaactgctactgattcaagagcgcaaccaagtgtcggaactttacctttccagcagttgcaaaaatttgagcattgtaaaagtggcgactgcaatggtgaaagcttggaaagaagcgtttctgtacctacgaatctggtcactagtggataccacaagcattcaagtggttctcttatacctgagcaagttctttctccctacttgagcagtgatttggaaagggatggatttcgtcagaaaaacttaagcagcaggaactgtagtggccctttattgttccgccaaatgaaggattcacgcacacatcaatctgttgcgccagacgagtcgtcggaaggaaaaattatccgtcgaagggggcgcttccaggttacatcagatagtatttctgaaaaggtagctacatcatcctgcaacagcagcaggataaatctaccaattgatgcagcacgttcaagtcccaagttgtctgcaattcttccaactttgcaattcttgatgaagcagaatactatgcaaaagtactcagtaggctgatttcttcaattgaggaaacatctgatgattctgaagcaaccggaagcagttcatatcagtcttctggagggcctgcccgagaaaaggaattgcatttgtatgttctccaattgcagcgaagtgtcaccgaacttgctgaggaagtgcaaagattaaagctccaaaacaataagcttgagcatcagatcaatatattgtcaagaaaagatgaaaggtcgtcaacgcaagataactgacaatgatgatatgccccttctaccacattgtaattcgattacccaattttgctttgttagaaagttatttttattccctgcagtcagagttgtatcattgtaagttgtaagtatttagcgaagtgtgaaatcatagtaattttgatctgtacagctttgtttggttaaccatgaagatatagttcttgtgttataagtaatgtgctgataatattgttttgcgtggaagtttgtg

SEQ ID NO: 79995 - DNA, 1218 bp, Zea Mays
ctaacacgtcagatatgagagagaaaccactggcttatatagaggacggacggccggcaactggcaacagtgcacgcagcacgtagaacacgcagcgggctcgcactgcaggacggagcagcagccgtcatagcaggtcatttggagaaggatggatcggcggcaatcaagcagcagcgggatgatggagggaccgttccgattcttgccggccgaagtgaaagagatggaggagcgcctgttcccggtcaccaatcgcaggctggatcacatcctcatggatgagctcgctctgaaatttagctgcttccggcgccgtgctggcatggttcccgtcaagccaaagcaggtgctcaactggttttataacaaccgtaacaagacttctgccaaggtagcagccagggaagcacatgctccatgggagttttgggccaaccatcagcaagctagagctagaggaggctcatccatcagcaagctgaagccaaagaaggcgactacgcacgcaggatcttcctcagggaataattatatcgatgtatatcacaccaagtttgaagctaagtcagctagagatggctcttggtaccttgtcgaagaattcttgactgaaaagttttgtgaatcaggcgatttgcaagtattggttcgctttcctggatttggagttgaggaagctgaatggatcgatgttcgtacatgtactttgcggcaacgctcagtgccatacaaggccacagaatgtgcagatgttcatatttgggaccctgttctttgttacaaggtaagtgaacagagtggtctctattttgatgctgaagtgcatgctattgaaaggaaaacacataattcaggagaagaatgtgattgcaaaatccttgttctttatgtgcatgataattctgaggacatcgtttccttgaagaagttgcgccgtcgatacgtagaatatgactacaaacctcaaacttcgtatgagctgccaaaaggaacgaaaatagcttaagtacaccatcaatttattgaagtgttcaatataatacctttctagaagattttgtatgttctgtgttacagtatatatatgttggtggctcatgagtcatgagcattgctacataatgcaaactaatattaattgtgataatacacaatttggagatgataagttggtctttgaatttaaggtggttattgtcggtgtttagagtccga

SEQ ID NO: 79996 - DNA, 1071 bp, Zea Mays
agcacgtagaacacgcagcgggctcgcactgcaggacggagcagcagccgtcatagcaggtcatttggagaaggatggatcggcggcaatcaagcagcagcgggatgatggagggaccgttccgattcttgccggccgaagtgaaagagatggaggagcgcctgttcccggtcaccaatcgcaggctggatcacatcctcatggatgagctcgctctgaaatttagctgcttccggcgccgtgctggcatggttcccgtcaagccaaagcaggtgctcaactggttttataacaaccgtaacaagacttctgccaaggtagcagccagggaagcacatgctccatgggagttttgggccaaccatcagcaagctagagctagaggaggctcatccatcagcaagctgaagccaaagaaggcgactacgcacgcaggatcttcctcagggaataattatatcgatgtatatcacaccaagtttgaagctaagtcagctagagatggctcttggtaccttgtcgaagaattcttgactgaaaagttttgtgaatcaggcgatttgcaagtattggttcgctttcctggatttggagttgaggaagctgaatggatcgatgttcgtacatgtactttgcggcaacgctcagtgccatacaaggccacagaatgtgcagatgttcatatttgggaccctgttctttgttacaaggagaagaatgtgattgcaaaatccttgttctttatgtgcatgataattctgaggacatcgtttccttgaagaagttgcgccgtcgatacgtagaatatgactacaaacctcaaacttcgtatgagctgccaaaaggaacgaaaatagcttaagtacaccatcaatttattgaagtgttcaatataatacctttctagaagattttgtatgttctgtgttacagtatatatatgttggtggctcatgagtcatgagcattgctacataatgcaaactaatattaattgtgataatacacaatttggagatgataagttggtctttgaatttaaggtggttattgtcggtgtttagagtccga

SEQ ID NO: 79997 - DNA, 1064 bp, Zea Mays
cacgcagcgggctcgcactgcaggaaggacggagcagcagccgtcatagcaggtcatttggagaaggatggatcggcggcaatcaagcagcagcgggatgatggagggaccgttccgattcttgccggccgaagtgaaagagatggaggagcgcctgttcccggtcaccaatcgcaggctggatcacatcctcatggatgagctcgctctgaaatttagctgcttccggcgccgtgctggcatggttcccgtcaagccaaagcaggtgctcaactggttttataacaaccgtaacaagacttctgccaaggtagcagccagggaagcacatgctccatgggagttttgggccaaccatcagcaagctagagctagaggaggctcatccatcagcaagctgaagccaaagaaggcgactacgcacgcaggatcttcctcagggaataattatatcgatgtatatcacaccaagtttgaagctaagtcagctagagatggctcttggtaccttgtcgaagaattcttgactgaaaagttttgtgaatcaggcgatttgcaagtattggttcgctttcctggatttggagttgaggaagctgaatggatcgatgttcgtacatgtactttgcggcaacgctcagtgccatacaaggccacagaatgtgcagatgttcatatttgggaccctgttctttgttacaaggagaagaatgtgattgcaaaatccttgttctttatgtgcatgataattctgaggacatcgtttccttgaagaagttgcgccgtcgatacgtagaatatgactacaaacctcaaacttcgtatgagctgccaaaaggaacgaaaatagcttaagtacaccatcaatttattgaagtgttcaatataatacctttctagaagattttgtatgttctgtgttacagtatatatatgttggtggctcatgagtcatgagcattgctacataatgcaaactaatattaattgtgataatacacaatttggagatgataagttggtctttgaatttaaggtggttattgtcggtgtttagagtccga

SEQ ID NO: 79998 - DNA, 1353 bp, Zea Mays
gccagatctacagtcacgaaaagatagactttgagggactaatgccatttctaacttgattgtgaatccaacgctggaattgcttctcttagctcatatgaacccaatactggagctgctgcaatggcgactgcaacgcaacctttgaagcccatcgtaggatcgcaatttgtcacttaggccctggtacatccgctgccacacatcgagttctatcctcaatttatctgccttagaggccagctgctttcctgctgcctcaagttcagagcaccttcaaaagtaagcactggttactatggtacatggctaaacaattttattttgaaataaaaaaaaacaggcctacaatgaaatattgcattttttatcacaaatgctgggatagtatgatatccttgctaactatgacattttaaaactacaagaaagctcatctacatccttcccctaggacaaccaaaccaaacagtaagcacctgaaattcttatttgctttattgcttgctttgagtcttgtaagactatcgctgaaacaaatgagaataaactactacctctgcacgacaaataaatctacaaaacggggattataggttgtatacaatcttttcaagcatttatgtgtataagattataggtgattatccgacaagtttggacattaactcggtgaattaaccagatgcattatggaacaacatatctgcagatcaagttaatccataattttgtatggtttccctttcagattaatcttaaataaattgtgcttatttttgtgcttgttatttttgcttaacaataataaaaaactgccaagagtttatttattttgtaatgaaactgtcatgtgtcatctgaactcatctttctcatctgcggtgtcttatctcccatcccaaacaaccaattccactaatacatccttttggtggtgtttactcagaggtgactcaggatcattaacatccacttagaccactatcaatgtagagtttcgtagcgttgtttttaacaacgtagaacgtagaatgcaatgaaacatggataaaaccatcactcaatgcatactttcattattttgattcacagacatttaattctatgactcattttgagttggtaaccgagccaagggcatgaaactcctttctcttagaaatattgccacgtcattaaaaatgcttatgtggcagcctattaaatgcaaatgaaactcctactaagactaaccttatggtacaaagcattttccttacatcatcgtttcagaattttatggcagctttagacacaacgaatatgcagaatgaaattagtaattaaagtggttatcaagtaagataaaag

SEQ ID NO: 79999 - DNA, 484 bp, Zea Mays
aatttatttaacgatcgaaccattctaaacaatttttcagcttaccgttttcacagctgacacgagtctgagagatcggtagtgattttctgatccaggcaatttgtcgagcgcgcttgatagatatatactatccgaacttcacgcacactaccattaaatctttggacatctttcttggggattcttttgtcaacgcgaacgtaagtcggagacaacacgtagggattggcatcgaagcgaggcgacggaacaacgacaagtaacaagaagggatctacaatattgttgtcgacccgacacggagatgaacaatgatgaactagcgagctgaatcatggcgaggaatgttttgacgcggacgagcaatggtgactggcggactcagaatagcggagtgaagtgtacgaccagctagcaaagatgactgcgtgcggcacggaagcgaaagcagaatttgatagctagtacggacgggaggagc

SEQ ID NO: 80000 - DNA, 285 bp, Zea Mays
atggcgagtaaggagctggcgacaacaaggagcaggacgcgctgcgagctggagctggaacggaggagtagatacgagttccatggtcggaccagcgagcacaagggagagatggaacggagggagcaggggcaatggcctgcagcacggagcccttccttgccagcaactgtgggtgctgcgcggacagcagcttgtccacggcggtcgggtcctgctgccctagcgccaacgccagcaccttcttcccaatggcctgctgtggatgacgctgggaacggctag

SEQ ID NO: 80001 - DNA, 319 bp, Zea Mays
taccgctgtgtaccggcaaccggatttacttaaagaagccaaatttgtatcgctgccaattccacaaacagaatttgcagacttttaatcaccagactgggaacaaacaatggaccgactgactcaagatgaaaacaaaacaaggtatagaagtaggtcgtgattgtcgacgatgttgtgtccgaggaaggtcccgataatattattcacagcagtcatgcgctctttttctggatttaagaagaaaaaaattacactattagttagcaatcaaatcaaatgtgcatctaccatgtttccactgatacatacatgcatg

SEQ ID NO: 80002 - DNA, 1481 bp, Zea Mays
atcgagatggcgatggtggaatttactcgggtgtttcctcaacgagagttcacagggattttggacaagcaacaatgctcaccgccgccgtttggaatgctcatgcggaagcagcggaaccatggacatcataccatttggaagtgattatgtgtgtgaagattcatcagcatctgaatatattgtttctaatggacttcatcacaggtaaggatagaacttgtaaaggtttgtaagttgcaagatgtgtttattttctgagataaatgttcctaggctggatgatgcttcaaaccttgaggagcaatgttttgaccacacaatagatgaaccaccaatgaactaccacgaggaaacagaccagcatgttcttgaacctctcagtgctagcaacactagtaacaactctgctttccctcctagtttcaaccaaatgctgaaaagttgttcaattgattatgaccaaggtgaactaatttctgaagaagatttacgttgaagtacaatatcagtatttggattttgttggtctataaccttaataatacaatgtaaatctaatacagaggaaccctgtccattggctgcatcaaaccatgtccttcaagaggtgtatgtgctggatacttctcatgatgttgccaatgaagaaaggactgctggtaaaggaatggatgctgctgaaggagttgatgccagtatattaacatatgacctaatggcacggataaagacatatatggctgatgaatcctttaatgatatgttgctcaagcttgataaagccattgatgaacttggtggtgacatgtcgctgtagatagcaaaacctcttctgcggtgaaggaatgcaggcgtgcttcgtggcaccctacagcacatttctcaaaagttcagattgtgaagcaacagtatagttacatatggttatacatagtagatagatagtgtctatatagattacgtgcaaagataaaaattcagtactatccactgctttttgccaataatttacaatacatgcaaagttcaaaatacagacattttgcaaccatgctcatgtttatctagatgattaaacagtagcaggttctttcattgctaaatgcttggcaacaggtgatcacacatgcgaaagaactgcctcagagtactcccaactatatccaagctgctgtaagtacctttgttgatgcacatgcacctttatggaaaggaaaagtatggtccttacagctacggtggatggaaaatcggaaagtgggtaaattcctttgctatcgtgttaataatagattcaggagtgatttaaagcgcagagtccaaatttctgaaagtttgatttgatttgatttgcatgtttagggtttagggccagtatgtgtacgtttgaagtggcaaacaacttaatcatgtaggatgtgtttggttgcctagttctgagcctggctcagtgagagaactaggctcaagagagcccg

SEQ ID NO: 80003 - DNA, 1275 bp, Zea Mays
cggaatttgggctgaccatgacccattggattggcaacaactgcaattaccacatggaatgctcatgcggaagcagcggaaccatggacatcataccatttggaagtgattatgtgtgtgaagattcatcagcatctgaatatattgtttctaatggacttcatcacaggctggatgatgcttcaaaccttgaggagcaatgttttgaccacacaatagatgaaccaccaatgaactaccacgaggaaacagaccagcatgttcttgaacctctcagtgctagcaacactagtaacaactctgctttccctcctagtttcaaccaaatgctgaaaagttgttcaattgattatgaccaagaggaaccctgtccattggctgcatcaaaccatgtccttcaagaggtgtatgtgctggatacttctcatgatgttgccaatgaagaaaggactgctggtaaaggaatggatgctgctgaaggagttgatgccagtatattaacatatgacctaatggcacggataaagacatatatggctgatgaatcctttaatgatatgttgctcaagcttgataaagccattgatgaacttggtggtgacatgtcgctgtagatagcaaaacctcttctgcggtgaaggaatgcaggcgtgcttcgtggcaccctacagcacatttctcaaaagttcagattgtgaagcaacagtatagttacatatggttatacatagtagatagatagtgtctatatagattacgtgcaaagataaaaattcagtactatccactgctttttgccaataatttacaatacatgcaaagttcaaaatacagacattttgcaaccatgctcatgtttatctagatgattaaacagtagcaggttctttcattgctaaatgcttggcaacaggtgatcacacatgcgaaagaactgcctcagagtactcccaactatatccaagctgctgtaagtacctttgttgatgcacatgcacctttatggaaaggaaaagtatggtccttacagctacggtggatggaaaatcggaaagtgggtaaattcctttgctatcgtgttaataatagattcaggagtgatttaaagcgcagagtccaaatttctgaaagtttgatttgatttgatttgcatgtttagggtttagggccagtatgtgtacgtttgaagtggcaaacaacttaatcatgtaggatgtgtttggttgcctagttctgagcctggctcagtgagagaactaggctcaagagagcccg

SEQ ID NO: 80004 - DNA, 1301 bp, Zea Mays
cctcgtcagcatctacctcacaccaaaacaaactcatccctgaatcccgcaaacaccatagcagatctccgtgttgctcgcgtccattggatgcgctcgggttgctggggttcgacctccctataaagcaaggcaccgtgatttcccctagcatcccacctagccgggacctgagaacgaagagagagcgaggaggatccgccgcgagctcctctgcatctcaccggtaatcagccaatcattgaggccaagaaggggggttcgctagggagtgcacggacactggatcaaggaagacaaacagaagattcaataatttctagccgaacttgggtttcgtcaccggtccgtcccgcggcatggcgaaatcgccgccgcggccatctcatgtgcacaccgctgcgccacccatggagagctactagggatctttgccattggttctgggtcctgcggctacctttctggggtcgaatgggacctcgagtggtggatgattgctcgccggaatcctaggggtatcaccggccgcaccacgccgttgccaggcttccccacgtctacgccacagatcgcaaatgcatgtgtaatgttcaaggccgaagaccccaaggataagaagttttcatacctgcattgctggaaaatcttgaaggacaagcccaagtggatggataggcggaaggaaattggaagtgcaaaaaaatcagccactaagaaacagaagacaacgacaaattcttctccagcatcaattgcaaatgcaattgtcgtagatgcccctcttgggggtgctgatcatgatgaaccatcatgcagacccgacggtaagaagaaggagaaacaaaagctacgacaacgtacgtccatggaagttgtagactatctaattgcaaagaagaaagattctgaccttgaaaaggacttgaagaaagaggagaggtgcaataaagcctttgctctacaagaagaaaggatgaaattggacaaagaaaagtttgcgttccaaagacagctcgaagaagacagaataattggtttggaccttagcaccatgaactataaacaacggcagtattatgaagatcgtcagaacgagattcttgcaagacgtttcaatatctagaattttctagttttagttaagtatgctttgtcaacaaacttgttttagttcaacatttcatctaagtaccatcttgttcaagtttcagtttgtaatggtttaaaggtcatgaatcaacttccataagcatgtaataaattaatggcttcatagtccaagatgatttttgctgcta

SEQ ID NO: 80005 - DNA, 1610 bp, Zea Mays
cctcgtcagcatctacctcacaccaaaacaaactcatccctgaatcccgcaaacaccatagcagatctccgtgttgctcgcgtccattggatgcgctcgggttgctggggttcgacctccctataaagcaaggcaccgtgatttcccctagcatcccacctagccgggacctgagaacgaagagagagcgaggaggatccgccgcgagctcctctgcatctcaccggtaatcagccaatcattgaggccaagaaggggggttcgctagggagtgcacggacactggatcaaggaagacaaacagaagattcaataatttctagccgaacttgggtttcgtcaccggtccgtcccgcggcatggcgaaatcgccgccgcggccatctcatgtgcacaccgctgcgccacccatggagagctactagggatctttgccattggttctgggtcctgcggctacctttctggggtcgaatgggacctcgagtggtggatgattgctcgccggaatcctaggggtatcaccggccgcaccacgccgttgccaggcttccccacgtctacgccacaggtaccatggattctgggtattacacaaatctcctagttaatggtattgaagaatctcaagcaactcgtggtgatgtaagaatacagcatggtcgtgcaacagccaagagttctcagggtagaagcaaaaattttagagatgaggaggacattcttcttgtgtcagcttggctgaatgtgggcatggatcctattcaaggagttgatcaaacacatggcacactatggagaaggatacatgaatatttcaatgcaaacaagaagtttgactcaaatcgttctgaagtatctttaatgaatcgttggtccgatcgcaaatgcatgtgtaatgttcaaggccgaagaccccaaggataagaagttttcatacctgcattgctggaaaatcttgaaggacaagcccaagtggatggataggcggaaggaaattggaagtgcaaaaaaatcagccactaagaaacagaagacaacgacaaattcttctccagcatcaattgcaaatgcaattgtcgtagatgcccctcttgggggtgctgatcatgatgaaccatcatgcagacccgacggtaagaagaaggagaaacaaaagctacgacaacgtacgtccatggaagttgtagactatctaattgcaaagaagaaagattctgaccttgaaaaggacttgaagaaagaggagaggtgcaataaagcctttgctctacaagaagaaaggatgaaattggacaaagaaaagtttgcgttccaaagacagctcgaagaagacagaataattggtttggaccttagcaccatgaactataaacaacggcagtattatgaagatcgtcagaacgagattcttgcaagacgtttcaatatctagaattttctagttttagttaagtatgctttgtcaacaaacttgttttagttcaacatttcatctaagtaccatcttgttcaagtttcagtttgtaatggtttaaaggtcatgaatcaacttccataagcatgtaataaattaatggcttcatagtccaagatgatttttgctgcta

SEQ ID NO: 80006 - DNA, 1228 bp, Zea Mays
gtttcctacctaaggcgccacaatctgtctaaccttagtcgctcgaattgaagaactaaggttaggcagaaaaggttaggcatgctgtggcgtcttaggtagcaaaccaaacaacccctacatcttcctcttcatttgttggcatctcacttcacgtgcacttccccgcctcccctacgccatcttcgcaccatgcctcctgcctctcgcgcccgcacaacgagcctcgaggtctctccgtcgccatccccgtcctaggccccactttctcggcggcgttgcgattccaccagacgttagggcgaggtggcgcggttcgtgtgacaacggggctcaccgcttgcggcctcgtgggtgctcggcgatgcgccaatgtgccatgacgaccggtcggctggagcacggggccgtgggacgctgggcggctgccgtatgagtgctagggtgtcggctgggtctaggagctggccggtgggcggctgcggctcagccattgagatcgcaaatgcatgtgtaatgttcaaggccgaagaccccaaggataagaagttttcatacctgcattgctggaaaatcttgaaggacaagcccaagtggatggataggcggaaggaaattggaagtgcaaaaaaatcagccactaagaaacagaagacaacgacaaattcttctccagcatcaattgcaaatgcaattgtcgtagatgcccctcttgggggtgctgatcatgatgaaccatcatgcagacccgacggtaagaagaaggagaaacaaaagctacgacaacgtacgtccatggaagttgtagactatctaattgcaaagaagaaagattctgaccttgaaaaggacttgaagaaagaggagaggtgcaataaagcctttgctctacaagaagaaaggatgaaattggacaaagaaaagtttgcgttccaaagacagctcgaagaagacagaataattggtttggaccttagcaccatgaactataaacaacggcagtattatgaagatcgtcagaacgagattcttgcaagacgtttcaatatctagaattttctagttttagttaagtatgctttgtcaacaaacttgttttagttcaacatttcatctaagtaccatcttgttcaagtttcagtttgtaatggtttaaaggtcatgaatcaacttccataagcatgtaataaattaatggcttcatagtccaagatgatttttgctgcta

SEQ ID NO: 80007 - DNA, 1449 bp, Zea Mays
ctacgccatcttcgcaccatgcctcctgcctctcgcgcccgcacaacgagcctcgaggtctctccgtcgccatccccgtcctaggccccactttctcggcggcgttgcgattccaccagacgttagggcgaggtggcgcggttcgtgtgacaacggggctcaccgcttgcggcctcgtgggtgctcggcgatgcgccaatgtgccatgacgaccggtcggctggagcacggggccgtgggacgctgggcggctgccgtatgagtgctagggtgtcggctgggtctaggagctggccggtgggcggctgcggctcagccattgaggtaccatggattctgggtattacacaaatctcctagttaatggtattgaagaatctcaagcaactcgtggtgatgtaagaatacagcatggtcgtgcaacagccaagagttctcagggtagaagcaaaaattttagagatgaggaggacattcttcttgtgtcagcttggctgaatgtgggcatggatcctattcaaggagttgatcaaacacatggcacactatggagaaggatacatgaatatttcaatgcaaacaagaagtttgactcaaatcgttctgaagtatctttaatgaatcgttggtccggtatacaacatgatgtgaatctgttttgtggatgtctgtctagggttgaggctaggaatcatagtggttggtcaattgatgacaagatcgcaaatgcatgtgtaatgttcaaggccgaagaccccaaggataagaagttttcatacctgcattgctggaaaatcttgaaggacaagcccaagtggatggataggcggaaggaaattggaagtgcaaaaaaatcagccactaagaaacagaagacaacgacaaattcttctccagcatcaattgcaaatgcaattgtcgtagatgcccctcttgggggtgctgatcatgatgaaccatcatgcagacccgacggtaagaagaaggagaaacaaaagctacgacaacgtacgtccatggaagttgtagactatctaattgcaaagaagaaagattctgaccttgaaaaggacttgaagaaagaggagaggtgcaataaagcctttgctctacaagaagaaaggatgaaattggacaaagaaaagtttgcgttccaaagacagctcgaagaagacagaataattggtttggaccttagcaccatgaactataaacaacggcagtattatgaagatcgtcagaacgagattcttgcaagacgtttcaatatctagaattttctagttttagttaagtatgctttgtcaacaaacttgttttagttcaacatttcatctaagtaccatcttgttcaagtttcagtttgtaatggtttaaaggtcatgaatcaacttccataagcatgtaataaattaatggcttcatagtccaagatgatttttgctgcta

SEQ ID NO: 80008 - DNA, 1594 bp, Zea Mays
gacatatccattatgtttactagctgcagaaatggacaaactgatatttgagctggtcatggaatggtgaggtgtttatgcttgggaaccacgtgtattagctcctgcggtgctggcgccctggggtttcatctccactgagttttggacaaatatcagacaaagatcaaggatagttacctacgtatgcagtgcctcaagtgctaggttcagtggagctgttctcctgccctcgacctctagctagtgtccactacatgggagaggtagctctggtgttcagtcggtgtaaacctttcctagccaccaagtttgttgtactccaaagctgagcgccaacctccttccaatggtgataacgctcatgtttctctctgtctcctcgtggtcaagcatactcgaacatggcctcaacgtcgcagaacgccgccgggaaccacctaatcatcgatcgctcgattcacgacttctccgatcaaaatttataacacctagaagaagtggtgtttgaaggaggagtctactccagtggctgctgatcaagtggaggagccatctaactgggtattgggtagaaaggtcttgagcctcttcactgcaacaaaggcaagccccggtgcattttccccttccgtgtatttttaaaagacttttatacactttaagtctagtgaaatgtgcattaagtttataggagttgcttggaaactattggatgcattgactaccttgatatccattcctgttatagatacttctttggaagtatcaaatattgtttacaaaaatgcttagccctgcttagatattgtggatagaggttgtcttttgcaataatgcctagctcaggggttatcctgaggaaggatggcttctacctgcaagaatattttcattgaaagcatggtgggatcttactgcaaagttccctataatgctcttttcatccttacgaacacaaaacaatcctaagggtggaagtacttaactcgagacttgggctaggaacaggtgatgctccacccaggttaataaaggattggatgcgtatgtaggcatgtttgatcaaggactatcttaactagccaaatgccctggatatgggacagggtaagcttgaacccggctattccatacatgaaaagacaatcgcgcactaggagtggagagatagcgagagtggcacgtaccctcctggcaaaggaccgcctaaaaggggtggtgtgctctcgggtggcgcagacctgttcatgcagtggaggattcgtgggaatggtagacatatgcaagagttacgagaaacatatgtcgtatagttagagatcctcggctgagtaaatcgattcggatcgccgttatatcctcggacagtggagacttgatctctgacctgcaacctaggtcaggatgtaaacattatgaataataataataatgttgtattgatgagatggtgaaattagactaaatgcaactagagtctattaatatttaatttggcgttaaaatattgaaagtaaggactcactttagtaagctatttctgcaaaagtatctaagttgatccttgctcaagcctttccttgattcctat

SEQ ID NO: 80009 - DNA, 1723 bp, Zea Mays
aagattgtatggcgcaagctacttctgaggctggaccctcagctcccaccgaagtatgctcttcgggggccaaagcatgcccttcgggggctactcctatactcgtagaaaaagaaagtgtgcctgagaaacttaagtatcctgctgccgaggcacctaccgaagggatggagttactatgcgatagacttcagggaagcaaatgtcggaagaacagattgccgaagctaggcaatatgccagggatctgaagtatccataaagatccttggtatacaacgacactgatgaagattattttctgtattgccttccagacaataaagagatatctgtttgccgggagaagatgagaaacatggatttccgaagcttgagctcggcctatctgcaatgtcaaaggatgatcttgtagatagtcttgtttataatagcttgaaggtatatatacttttgttgtaaaataaactatgtttgtagattttcttactatcgttatgttctcacatatatttttttgtttttagggattaattctaagtaaagatttaagggctcaaaaggaggcagacgacgagagctgccagatagcccttgggaatcttcgatcagaggtcatcacactaaggaacaaagcttttgaaaaagataagatacttttttccttagtggacaagctgaaaacttgcgaagccaagcttagtactcaagacgaagcccataaagctgaagttgaagatttgaagaaaaaacttgcagaaatgaatgaaaatttcgaggttgcaaaggctaagcaagaaatatgtgaaatggagaggtccagggtgcaaaagattattgaagagcttctggattcgaaggagaaatgctacgaaacatccatagaatgcgcgaagaaactgaaagatagctttgcaaaggtgggagtgtactctttggaacaaagatttatccgtggtgatcccgaaggagttatccagtggattggcgaagaagccgaagattttgatgaaatactcggcgatcgcggggatttctgcacattcgctggtgcacgaggggttgcggcaattttggaaaaggctggttgtgaacatgtcaaggtcgtagcctagccagaatatactttctcagctcatgacacgaaggacccttcggccgaagcttctttgctaggcgggaggttctatcctgatgtctggatgaagggcggtcgtgagatggctggtgaagccattaaaaagaatgaaaaagaatctcacgacgtccgagagaaggcaaaacaagctaaagaagccgctgaacgcgccatgattatagctgggctttcaccaccaccagagccgtacaaccctgaggccgacccagttatgaaagaggctttggatgtaatgaagattgccaacgaagtcgttgacgaagtagtcgacagactattacatgaagctgctgagaaaatactaaaagaagattaaattcttgtatgttggaaaatgtaatgcttgtgtatggctactgccatgtgtacgaaacaaacatcaagtatttgtatgtacattaatgtaatatatctctttgtgatgcatgaaatctgcgtacgtaccgtttttgagccttttggcgaaaaaacaccttcccttcttttcatgcttcgcaaagagagttttccttatgccactgttgatgaaggttggcctcgtataatacagtatgtctgtcgaag

SEQ ID NO: 80010 - DNA, 697 bp, Zea Mays
gcgagagactaatcaaaagccaacgtgagagtgagatcggaggaaggaaacaccttcgaaagcagaggcgatcaagtcactcggtcgccagcctagcagccagctaccgcatctccgggcgttgcacttgcacagggcggcctccatagttccatactacgaacatgcccaactgtccgctgggtctgggtcagacagaatctgccacccaccccacctcctagtctcccgccgcggccctctggtcagaggcccacatagatagaggggaaccagcacacgcagacgcaggaagccaagtcgcctgacttgcgtcttcttgcttcctcctgtgccgtgtttcatttctttgacacaacgacgtccgggcagccgcctcctgtcgccagttcgccactctctggttgctgcacgcctctagtcggcggggccaagaggtggaaaagggcaggatgaagtccggcgagcggccgaagcagatgcggggcgtccggcaggaatctcggcggttccggcttctggtcatcgtcgccggcttcttcctcgtctccctgaccttcgtcgtcatctccaagcccgattccatcctgtccagcctggacgcgaacggctctggcccatgccacaagcagggggtgaaataggcgatgttggatctgctgaagacatggggtgcatagtttgtagttatagctag

SEQ ID NO: 80011 - DNA, 2772 bp, Zea Mays
gtcatcttctagcttccatatgattcctctccactagtcattcctctgaaaaatctccagccgccaccctccatctgatatttctcatccgtcgtatatctcctggcgcgcgcgttccttgtcttgtcccagcgcccggcagctgcgccctgctccagctcatggcgcgtccctgctcctcccatggcagctccccagctcgatttccctccccagccatggccgcgcccagatcctctccctccctgttcggattccgccagacctgcgtagctccctggtgtgtcttcctccctgcgcgctccgcggtgctcagctctccagcgccggtgcccagctcgccagggccgcgtgtgctccagcgtcgcgctctgctcgcggagttccttcgcggcgttcatctccctgctcagctcgccgcgccgaactgtccagcacctctctgctcctttcgttcctagcgcgtcgagttgagcttgccgatgatgctttggctggtcagcctctgctctagctcgcagttgctgcgttgccgagtccctggccgccgtgccctgtgcgctttcctccgctcgccgggctgtacgttgctaggatcggaagcaccgccttcgtttggacagcaacggcgtgcacaaaagctttgttgctgctgttggaggcttctcgacgaaatatctaataaagggttgaagctccagtgcatcgccgtcgtttcgctatgtccggcgtcgtgcttttttgtgccggtcattggtttcctattcatcacaacgccgtcgtccccgcgtcgcgcccggaatttcgtcgcgcgtcctgtttcctgctcgctagcgtgccctctcggctcgctcggctttaattcccaatcgcgtcgtcgattccgccggttagcgttgttcgtcgtcgcgtcgcaggtgcagctctatatacgtcaccctcctgtgacgtcgtcgctccgcgcgtcagcaagaaatcccaagaatcgggtgaagacgaagctagcagcgcgatattccccaagcgttcgacaaattgcctggatcggaaaatcgctaccgatctagcggattcgtgtcagctgtggaaacgataagctgataaattattcagaatagttcgatcgatgaataaattaatgtactagtgcgatgctcattaaggtgctcgataaattgtgtaagtcacgaaactctcgtcgacttcgcagttcttgcgattatcgagccagattcagttatagcgagttatttcgctattctcgtcaattagttgaattagtgtaccgagtagaattttagtaggcatgtgtgttgaggaaatattttaatcacttataaagatgtagtataatttataaagcaagggataagtttagaatttaattaattaattgataaattgtgattaggctaattgtattaaaggtgtataaatttgttgttttgtgatgttcgcgttaggttcggttaatctagagaagtgtaattattgcgcgtagtcatatattcataactagtgttttcgtacaaaattgtacaacgcctcgccgctaggtgtttaaattcgccatcgcgtagcactatttagggtttttgatattcctgtctatatgcattcatgtgcataatgcatttcattcaggtgcgataattaatcacgtgatgcgaaagatgactcaagtcgaccccaagcgcgggctaatccgcaggatgatgctgatggatggaccagaagatggataatctgaacgagtgccaagccaaaggatgctcgccaagtggtcgcctaacaacactaacctagtgttacccaggcaagccccggtgcatgcaaccccttccttgtgtttttaaataatttttacacactttaagtctagtgaaatgcgcattaggtttataggagttgcttggaaccctttgatgcattgtcttccttgatatccatacctttatagatacttatggtgaagtatcaaaatatgatttacaaaaatgcttagccttgctcagatcttgtggatagaggttgtcttttgcattaaggcctagctcaggggttatcctgaggaaagatggcttctacctgcaagaatattttcattgagagcgtggtgggatcttactgcaaagttccttttgatgctcttttcatcctaggaacataaacaatcctaaggatggaagtacttaaatcgggacttgggctaggaacaagtgatgttctacccaggttagttaaggattggatgcgtatgtaggcctgttgatcaaggactatcttaactagccacatgccctggaaatgggacagggtaagcttgaacccggctattccatacatgaaaagacaatcgcgcactgggagtggagagatggcgagagtggcacgtaccctactggcaaaggaccgcctaaaaggggtggtgtgctctcgggtggcgcggacctgttcatgcagtgaaggatccgtgggaatggtagacatgcaaggtttacaagaaacatatgtcgtgtggttagagatcctcagctgagtaaatcgattcggatcgccgctatatctccggagagtggagacttgatctccgacctacaaagtaagtcaggatgtgaacctcatgaataaaaatgatgttgtattgatgagatggtgaaattagaccagatgcaaatagagtctattaatatttaatctggcattaaaatattgaaagtaaggattcactttagtaagctatttctgcaaagtatctaagttgattcttgc

SEQ ID NO: 80012 - DNA, 3073 bp, Zea Mays
acaaattttccagctcactcagcgtttctctctgctcgcctcggcctccaactccggccgtggtggccaccggaagcgcgtctcccggccccggctcagcggtctgcgttctccctgctctcccaagctatgcgcccctgtcctgttccctgcgcgcgctgttcctgctcgctttggcgtccacgccatgaagccctgcgctcgtcgcggcagactccagtcctcctctgccgagcagcttgcccagccttcttctccctacacgccggagctcgcccagccgaccgaagctctaagctccagccatggcgcgtcctcgctccctcttccctgctcgccggttctccttgccgagctcccctacgtgctgagctctctgctgcggctttcctttccccaagctcctccagccgcgcagtccagctgcttcttcctcctcctggcgttcttcctgtgccatgcgccctgcccatctcccagttccagctgccgcatgcgcagctgctccttctgcccagccgccccggatcttgctcggccatagcaagttcctccctttcctctgctcgcgggctgctccagtcggtcgcgcgtccagcttgcccagtctgcacgccacgctcccttgtcgtggctttctgcttcctcgtcgctcgtagcgttctgttgttcctgcgcgtgctgccgcgaagctccctgttcagttcgcctccgtcacgttatcgtgctcgcgaaactgctcgcagtcaatatcaagtccgtgacgcccacgttggacacggtaaaacgctgtgtgtgctggtgtccgaactcgccctggtcatggcgtttggtaccgtgccgtgctgtttctctacgcacgtcctcctgttagctgtcgcgactgccgtcaaatcatcggagtcgttcaacttgccgatcacatcttggtcggtcgtcgatttcctattcgtcatggtacaacactgttattaaatccggtctccaacccgccatggcgtttgtcatcctctagtcccagttcgacccatccgtgtgtttgctcttcatccctcgggcttcacgcgtgctcgcatttgtcatcgagctgttgaacccgtccttccttgctcgtgacttcatcgtcgccagagccctcactaaatttgtgtcctcgctagctcgctccatattcaatctcgtcgtcgttccgtgcgtcagcaagaaatctcaagaatcgggtgaagacgaggctagcagcatggtgttcaccaagtgagcgacaaaaagctcggacatcctgcgcaactcaagttcggttcgtcaaaattattcaatcgaggaaaagatcttcagaaattgattaccgaagaaaagaaggcccctggatgacgtcaaccggaacccatagtcgtgcttgcgactaacgcgtcgaattagtcagggtaagtaaatttgttactcgtgttagtggattggtggatggtttgactaggtttaatatttattagattgcctgagtcgttttagtaatttggtcgatgtcgtaggatgaaaaagatctcaataggtctcagtgtttgcgggattgtaggtgctaaaaatgggaagttatattaatatatatatgatacaccggttaatcggtaaatcaagtaattaagatacacaatttaaagagttaataaaaagctagaaataaaaatagatgttcgagtgttattatgtcaatttgattaatgaatatagtcgatgccctgatattgtataaaatatgcttggttataggttataagtgtttcatccattttagtgtagattatctatcttgtactatttatactcgttatacttgtgctcatacatgtgcatcatgcatctcatgaggtacgataaataatcgcgtgatgcggaagacgacccaagtcgaccccaagcacgggctaatccacaggatgatgctgatggacaaacctgaaggtggataatggaacgagtatcaaaataaaggttgatcgccaagtagacgtcgcctaacaaacactaacctagtgttattcaggcaagccccagtgcattcgccacctccgagatgagacaacctctttgtttcctttccctatttttttgtttgttctctggttctatcctttctctttcgtttttttttcttttctttttttgtttctgttttttttacgtaaccgaaggagaaaaacaaggaagcggcgttgacccggtttgtggcgtgatcaaacgggagatggtggcggcgcgctagggtttgaatggtggaagaaagaaggatggtgaaaaaaacacaatgcaaccagcaacaaatgacgcgcaagcacccaaattcaacaatgcagattattgaaagaaagtgcgaggctcaaaagggtgttgggataaggtctaacctgaatttttatgtggttttgtggactgtaggagaaaaaacactcgataaactcaccgatcaacctagaaatctgataccacttgatatagttgaggtgcccgatctttcggtgagtggagataattccgatttggcggaagatgatccttgcgatctgactacgacgagcaagctcgaggcgccaatgcaatcgctgaaccaactccctgtgtttaccgaccttgctcatgcgagatcggtctgatctcagaatggtgtcaacaagctcctgtaaaaatttcagattttttgaacaaccgagcgaaaagttatgcccggtttaaggaaggtaactcaagttatggttaaaaacgaccgagatgagactaccgctttgtttcctttccctatttttttgtttgttctctggttctatcctttctctttcattttctttttttcttttctttttttatgtttctgttttatttttgacgtaaccgaaggagaaaaacaaggaagcggcgttgactcggtttgtggcgtgatcaaacgggagatggtggcggcgcgctagggtttgaatggtggaagaaagaaggatgttgaaaaaaaacacaatgcaaccagcaacaaatgacgcgcaagcacacaaattcaacaatgcagattattgaaagaaagtgtgag

SEQ ID NO: 80013 - DNA, 365 bp, Zea Mays
cctcgcgcgagtgctagaaaaatcactcgacttctaccgagatccctaattagcaaagcagctacgcgacctatcatactagtatccatctcaaaaggaatcctgagttcatgcaactaggttttcagccaactcctacacttaagtgcacagtacaagcctacaaacattaagtgcagtaaaatagcatatataacggttatgcataaaaccggggcttgcctttaatttaacacttaggtagtgtttgctgggggaggtattcgcttggcgagcatctactgggtaagtccaccattcttcaggtcgtccaccaactgcatcttgtgggtggcaccacatcactggctcgatcatcatctctc

SEQ ID NO: 80014 - DNA, 2237 bp, Zea Mays
cgagacgggcggtgacacagcgcctcatctcgatctccctcccggctccccgacctttgtaaaccctaaaaatcaatctagttcgcaccaaatcgatcgcgcctcagctcaaaatccgaaacggttcgaacgatcagaacgattcagcttcagctcctgaatccagcagcaatggatcgctcccgctccaagcgcggctaccactacgaccaggactccccgccgccccgctccaagcagcgcttcgaccgccgcagcggtggcggccagaatgctaactcgagctatcaccgccgcggccccctcggcggcggcggctccgaccgccgcgggttcctgccccctgcccccgcgccgcccccgcccccgcccccaccgccgcttcctccctcgtcggccacggcgggtggcggcgctggtcccaccaccaccaccacctccttccgcatcctgtgccccgagtgcaaggcctacggcttcccacccggcttcgttgccaaggtccgggacgacagcggcgcgcttgtcactgtgcacccgcccttcgcgggcgactacgtccgggtcatcgagacggtggacggcgcgaggcgcgaggcagacggccgcccgcccatgttctccccggcccaagaggcccttctcatggtgcaccgccggattctcgagaccgacgctgacgacggcgacgaggatggcgagtatgggcccaggggcaaggactccagggacagggggaagaccaccacacgactcatcgtgcccaagatgcacgtcggatgcttgctcggcaaaggtgggaagatcatagagcaaatgaggatggagaccaagacgcacattaggatcctgccgcgtgaccagcacactccgcgctgcgtttccttgtccgaggaggttgtacaggttgttggagatggaaattgtgttaagaaggctgtagcaataatcactgatcgcctaaaggaaagcttacaccgtgaccgtggtcccttccgtgggcgaatgaattcaccagagcctcgaatttctcaggaagatgattatttgggtgtttcgcagatgcctgcatacgaggaatctctgggacgatctgatcagattaggaacaacactagcatggagccaccaggatatgagtttgattcaaatgatggcaaggtgattgaacatccagatatcctgtacgatgacataatttttcgaattctatgcccaaatgacaaggttgacaatttagttgcaacaaatgatggaatactggagatgctacaggctgatgttggtgttgatgttagactatctgatattattgctggttctgatgaaagggtagtaatcatcacatctagagagggaccagaccatgagcttttcccagctcaggaagcagtgctgcacattcaaactcatattgtagacctcggcccagacaaggataacattatcacaacaagactacttgtaccttcaagtgaaattgcttgctttgatggaagggaggggtcattatctgatatacagcgacagactagtgcaaacgtgcagatattaccaaaagaagatcttccattatgcgctttagagtcagatgaactcatacaggatagtggaggcagtgcaagtggctcatttgatcaaggcagcaacattattgatgagatcagacaaggtgctacaaaaagatttgccgttcctctagtaactaggagcacactagaagttgtcataccaaatagtgctgttgcaagcctcaccatgagagctggtagcaagcttgctcaaataagcgagatctctggtgctactgtaacgctagctgaggacagacctgacatcttagagaaagttgttcgaatatctggtacccctgagcaggctagcaaagctgagaatttgctgcagggatttattctaagcattccagatgacattccttcaggctagttgaagacactctgcatgtcatagttgttagttcgtaaaattcctgtgtatattcgaggtagaatatgctgatgtcatgtgattatttgtttaattgagcagcatgtattcatgtgtggatacatgctgttttccttgtagccgttaactggctgacgggggtgtaagattagcatgtgaatttacagattgattcaacattcaattctcatgtccatatgtgaccgctgaacatgaaacctccaacttatttaattctcagtctggtgcttagctgtgaaaacagtacg

SEQ ID NO: 80015 - DNA, 1928 bp, Zea Mays
cacagcgcctcatctcgatctccctcccggctccccgacctttgtaaaccctaaaaatcaatctagttcgcaccaaatcgatcgcgcctcagctcaaaatccgaaacggttcgaacgatcagaacgattcagcttcagctcctgaatccagcagcaatggatcgctcccgctccaagcgcggctaccactacgaccaggactccccgccgccccgctccaagcagcgcttcgaccgccgcagcggtggcggccagaatgctaactcgagctatcaccgccgcggccccctcggcggcggcggctccgaccgccgcgggttcctgccccctgcccccgcgccgcccccgcccccgcccccaccgccgcttcctccctcgtcggccacggcgggtggcggcgctggtcccaccaccaccaccacctccttccgcatcctgtgccccgagtgcaaggcctacggcttcccacccggcttcgttgccaaggtccgggacgacagcggcgcgcttgtcactgtgcacccgcccttcgcgggcgactacgtccgggtcatcgagacggtggacggcgcgaggcgcgaggcagacggccgcccgcccatgttctccccggcccaagaggcccttctcatggtgcaccgccggattctcgagaccgacgctgacgacggcgacgaggatggcgagtatgggcccaggggcaaggactccagggacagggggaagaccaccacacgactcatcgtgcccaagatgcacgtcggatgcttgctcggcaaaggtgggaagatcatagagcaaatgaggatggagaccaagacgcacattaggatcctgccgcgtgaccagcacactccgcgctgcgtttccttgtccgaggaggttgtacaggttgttggagatggaaattgtgttaagaaggctgtagcaataatcactgatcgcctaaaggaaagcttacaccgtgaccgtggtcccttccgtgggcgaatgaattcaccagagcctcgaatttctcaggaagatgattatttgggtgtttcgcagatgcctgcatacgaggaatctctgggacgatctgatcagattaggaacaacactagcatggagccaccaggatatgagtttgattcaaatgatggcaaggtgattgaacatccagatatcctgtacgatgacataatttttcgaattctatgcccaaatgacaaggttgacaatttagttgcaacaaatgatggaatactggagatgctacaggctgatgttggtgttgatgttagactatctgatattattgctggttctgatgaaagggtagtaatcatcacatctagagagggaccagaccatgagcttttcccagctcaggaagcagtgctgcacattcaaactcatattgtagacctcggcccagacaaggataacattatcacaacaagactacttgtaccttcaagtgaaattgcttgctttgatggaagggaggggtcattatctgatatacagcgacagactagtgcaaacgtgcagatattaccaaaagaagatcttccattatgcgctttagagtcagatgaactcatacagattgttggagagattagtgctgctcggaatgctctgatacaagtaacaacaaaattaaggagttttctataccgtgagatgtctggtcctattcaagttggcaatattaatgtacatggagccatttctccagtagcaggctcacctggaggacccaacctcggaaatgatatgccaatgagtgcttatcaccaagcatcacaactggcaacttcatggcattcaaaatttggtgttcctctgcagggcatctagtgcgacaatggcacaaaattcgataactccaactccctcgtcttcttcctagctaatggcattcgcctatgcatgtcatgtcc

SEQ ID NO: 80016 - DNA, 2314 bp, Zea Mays
agcgcctcatctcgatctccctcccggctccccgacctttgtaaaccctaaaaatcaatctagttcgcaccaaatcgatcgcgcctcagctcaaaatccgaaacggttcgaacgatcagaacgattcagcttcagctcctgaatccagcagcaatggatcgctcccgctccaagcgcggctaccactacgaccaggactccccgccgccccgctccaagcagcgcttcgaccgccgcagcggtggcggccagaatgctaactcgagctatcaccgccgcggccccctcggcggcggcggctccgaccgccgcgggttcctgccccctgcccccgcgccgcccccgcccccgcccccaccgccgcttcctccctcgtcggccacggcgggtggcggcgctggtcccaccaccaccaccacctccttccgcatcctgtgccccgagtgcaaggcctacggcttcccacccggcttcgttgccaaggtccgggacgacagcggcgcgcttgtcactgtgcacccgcccttcgcgggcgactacgtccgggtcatcgagacggtggacggcgcgaggcgcgaggcagacggccgcccgcccatgttctccccggcccaagaggcccttctcatggtgcaccgccggattctcgagaccgacgctgacgacggcgacgaggatggcgagtatgggcccaggggcaaggactccagggacagggggaagaccaccacacgactcatcgtgcccaagatgcacgtcggatgcttgctcggcaaaggtgggaagatcatagagcaaatgaggatggagaccaagacgcacattaggatcctgccgcgtgaccagcacactccgcgctgcgtttccttgtccgaggaggttgtacaggttgttggagatggaaattgtgttaagaaggctgtagcaataatcactgatcgcctaaaggaaagcttacaccgtgaccgtggtcccttccgtgggcgaatgaattcaccagagcctcgaatttctcaggaagatgattatttgggtgtttcgcagatgcctgcatacgaggaatctctgggacgatctgatcagattaggaacaacactagcatggagccaccaggatatgagtttgattcaaatgatggcaaggtgattgaacatccagatatcctgtacgatgacataatttttcgaattctatgcccaaatgacaaggttgacaatttagttgcaacaaatgatggaatactggagatgctacaggctgatgttggtgttgatgttagactatctgatattattgctggttctgatgaaagggtagtaatcatcacatctagagagggaccagaccatgagcttttcccagctcaggaagcagtgctgcacattcaaactcatattgtagacctcggcccagacaaggataacattatcacaacaagactacttgtaccttcaagtgaaattgcttgctttgatggaagggaggggtcattatctgatatacagcgacagactagtgcaaacgtgcagatattaccaaaagaagatcttccattatgcgctttagagtcagatgaactcatacagtagcaggctcacctggaggacccaacctcggaaatgatatgccaatgagtgcttatcaccaagcatcacaactggcaacttcatggcattcaaaagatagtggaggcagtgcaagtggctcatttgatcaaggcagcaacattattgatgagatcagacaaggtgctacaaaaagatttgccgttcctctagtaactaggagcacactagaagttgtcataccaaatagtgctgttgcaagcctcaccatgagagctggtagcaagcttgctcaaataagcgagatctctggtgctactgtaacgctagctgaggacagacctgacatcttagagaaagttgttcgaatatctggtacccctgagcaggctagcaaagctgagaatttgctgcagggatttattctaagcattccagatgacattccttcaggctagttgaagacactctgcatgtcatagttgttagttcgtaaaattcctgtgtatattcgaggtagaatatgctgatgtcatgtgattatttgtttaattgagcagcatgtattcatgtgtggatacatgctgttttccttgtagccgttaactggctgacgggggtgtaagattagcatgtgaatttacagattgattcaacattcaattctcatgtccatatgtgaccgctgaacatgaaacctccaacttatttaattctcagtctggtgcttagctgtgaaaacagtacg

SEQ ID NO: 80017 - DNA, 1992 bp, Zea Mays
ctcatctcgatctccctcccggctccccgacctttgtaaaccctaaaaatcaatctagttcgcaccaaatcgatcgcgcctcagctcaaaatccgaaacggttcgaacgatcagaacgattcagcttcagctcctgaatccagcagcaatggatcgctcccgctccaagcgcggctaccactacgaccaggactccccgccgccccgctccaagcagcgcttcgaccgccgcagcggtggcggccagaatgctaactcgagctatcaccgccgcggccccctcggcggcggcggctccgaccgccgcgggttcctgccccctgcccccgcgccgcccccgcccccgcccccaccgccgcttcctccctcgtcggccacggcgggtggcggcgctggtcccaccaccaccaccacctccttccgcatcctgtgccccgagtgcaaggcctacggcttcccacccggcttcgttgccaaggtccgggacgacagcggcgcgcttgtcactgtgcacccgcccttcgcgggcgactacgtccgggtcatcgagacggtggacggcgcgaggcgcgaggcagacggccgcccgcccatgttctccccggcccaagaggcccttctcatggtgcaccgccggattctcgagaccgacgctgacgacggcgacgaggatggcgagtatgggcccaggggcaaggactccagggacagggggaagaccaccacacgactcatcgtgcccaagatgcacgtcggatgcttgctcggcaaaggtgggaagatcatagagcaaatgaggatggagaccaagacgcacattaggatcctgccgcgtgaccagcacactccgcgctgcgtttccttgtccgaggaggttgtacagggaccagaccatgagcttttcccagctcaggaagcagtgctgcacattcaaactcatattgtagacctcggcccagacaaggataacattatcacaacaagactacttgtaccttcaagtgaaattgcttgctttgatggaagggaggggtcattatctgatatacagcgacagactagtgcaaacgtgcagatattaccaaaagaagatcttccattatgcgctttagagtcagatgaactcatacagattgttggagagattagtgctgctcggaatgctctgatacaagtaacaacaaaattaaggagttttctataccgtgagatgtctggtcctattcaagttggcaatattaatgtacatggagccatttctccagtagcaggctcacctggaggacccaacctcggaaatgatatgccaatgagtgcttatcaccaagcatcacaactggcaacttcatggcattcaaaagatagtggaggcagtgcaagtggctcatttgatcaaggcagcaacattattgatgagatcagacaaggtgctacaaaaagatttgccgttcctctagtaactaggagcacactagaagttgtcataccaaatagtgctgttgcaagcctcaccatgagagctggtagcaagcttgctcaaataagcgagatctctggtgctactgtaacgctagctgaggacagacctgacatcttagagaaagttgttcgaatatctggtacccctgagcaggctagcaaagctgagaatttgctgcagggatttattctaagcattccagatgacattccttcaggctagttgaagacactctgcatgtcatagttgttagttcgtaaaattcctgtgtatattcgaggtagaatatgctgatgtcatgtgattatttgtttaattgagcagcatgtattcatgtgtggatacatgctgttttccttgtagccgttaactggctgacgggggtgtaagattagcatgtgaatttacagattgattcaacattcaattctcatgtccatatgtgaccgctgaacatgaaacctccaacttatttaattctcagtctggtgcttagctgtgaaaacagtacg

SEQ ID NO: 80018 - DNA, 2260 bp, Zea Mays
ctcatctcgatctccctcccggctccccgacctttgtaaaccctaaaaatcaatctagttcgcaccaaatcgatcgcgcctcagctcaaaatccgaaacggttcgaacgatcagaacgattcagcttcagctcctgaatccagcagcaatggatcgctcccgctccaagcgcggctaccactacgaccaggactccccgccgccccgctccaagcagcgcttcgaccgccgcagcggtggcggccagaatgctaactcgagctatcaccgccgcggccccctcggcggcggcggctccgaccgccgcgggttcctgccccctgcccccgcgccgcccccgcccccgcccccaccgccgcttcctccctcgtcggccacggcgggtggcggcgctggtcccaccaccaccaccacctccttccgcatcctgtgccccgagtgcaaggcctacggcttcccacccggcttcgttgccaaggtccgggacgacagcggcgcgcttgtcactgtgcacccgcccttcgcgggcgactacgtccgggtcatcgagacggtggacggcgcgaggcgcgaggcagacggccgcccgcccatgttctccccggcccaagaggcccttctcatggtgcaccgccggattctcgagaccgacgctgacgacggcgacgaggatggcgagtatgggcccaggggcaaggactccagggacagggggaagaccaccacacgactcatcgtgcccaagatgcacgtcggatgcttgctcggcaaaggtgggaagatcatagagcaaatgaggatggagaccaagacgcacattaggatcctgccgcgtgaccagcacactccgcgctgcgtttccttgtccgaggaggttgtacaggttgttggagatggaaattgtgttaagaaggctgtagcaataatcactgatcgcctaaaggaaagcttacaccgtgaccgtggtcccttccgtgggcgaatgaattcaccagagcctcgaatttctcaggaagatgattatttgggtgtttcgcagatgcctgcatacgaggaatctctgggacgatctgatcagattaggaacaacactagcatggagccaccaggatatgagtttgattcaaatgatggcaaggtgattgaacatccagatatcctgctgatgttggtgttgatgttagactatctgatattattgctggttctgatgaaagggtagtaatcatcacatctagagagggaccagaccatgagcttttcccagctcaggaagcagtgctgcacattcaaactcatattgtagacctcggcccagacaaggataacattatcacaacaagactacttgtaccttcaagtgaaattgcttgctttgatggaagggaggggtcattatctgatatacagcgacagactagtgcaaacgtgcagatattaccaaaagaagatcttccattatgcgctttagagtcagatgaactcatacagattgttggagagattagtgctgctcggaatgctctgatacaatagcaggctcacctggaggacccaacctcggaaatgatatgccaatgagtgcttatcaccaagcatcacaactggcaacttcatggcattcaaaagatagtggaggcagtgcaagtggctcatttgatcaaggcagcaacattattgatgagatcagacaaggtgctacaaaaagatttgccgttcctctagtaactaggagcacactagaagttgtcataccaaatagtgctgttgcaagcctcaccatgagagctggtagcaagcttgctcaaataagcgagatctctggtgctactgtaacgctagctgaggacagacctgacatcttagagaaagttgttcgaatatctggtacccctgagcaggctagcaaagctgagaatttgctgcagggatttattctaagcattccagatgacattccttcaggctagttgaagacactctgcatgtcatagttgttagttcgtaaaattcctgtgtatattcgaggtagaatatgctgatgtcatgtgattatttgtttaattgagcagcatgtattcatgtgtggatacatgctgttttccttgtagccgttaactggctgacgggggtgtaagattagcatgtgaatttacagattgattcaacattcaattctcatgtccatatgtgaccgctgaacatgaaacctccaacttatttaattctcagtctggtgcttagctgtgaaaacagtacg

SEQ ID NO: 80019 - DNA, 1466 bp, Zea Mays
tctcgatctccctcccggctccccgacctttgtaaaccctaaaaatcaatctagttcgcaccaaatcgatcgcgcctcagctcaaaatccgaaacggttcgaacgatcagaacgattcagcttcagctcctgaatccagcagcaatggatcgctcccgctccaagcgcggctaccactacgaccaggactccccgccgccccgctccaagcagcgcttcgaccgccgcagcggtggcggccagaatgctaactcgagctatcaccgccgcggccccctcggcggcggcggctccgaccgccgcgggttcctgccccctgcccccgcgccgcccccgcccccgcccccaccgccgcttcctccctcgtcggccacggcgggtggcggcgctggtcccaccaccaccaccacctccttccgcatcctgtgccccgagtgcaaggcctacggcttcccacccggcttcgttgccaaggtccgggacgacagcggcgcgcttgtcactgtgcacccgcccttcgcgggcgactacgtccgggtcatcgagacggtggacggcgcgaggcgcgaggcagacggccgcccgcccatgttctccccggcccaagaggcccttctcatggtgcaccgccggattctcgagaccgacgctgacgacggcgacgaggatggcgagtatgggcccaggggcaaggactccagggacagggggaagaccaccacacgactcatcgtgcccaagatgcacgtcggatgcttgctcggcaaaggtgggaagatcatagagcaaatgaggatggagaccaagacgcacattaggatcctgccgcgtgaccagcacactccgcgctgcgtttccttgtccgaggaggttgtacagggaccagaccatgagcttttcccagctcaggaagcagtgctgcacattcaaactcatattgtagacctcggcccagacaaggataacattatcacaacaagactacttgtaccttcaagtgaaattgcttgctttgatggaagggaggggtcattatctgatatacagcgacagactagtgcaaacgtgcagatattaccaaaagaagatcttccattatgcgctttagagtcagatgaactcatacagattgttggagagattagtgctgctcggaatgctctgatacaagtaacaacaaaattaaggagttttctataccgtgagatgtctggtcctattcaagttggcaatattaatgtacatggagccatttctccagtagcaggctcacctggaggacccaacctcggaaatgatatgccaatgagtgcttatcaccaagcatcacaactggcaacttcatggcattcaaaatttggtgttcctctgcagggcatctagtgcgacaatggcacaaaattcgataactccaactccctcgtcttcttcctagctaatggcattcgcctatgcatgtcatgtcc

SEQ ID NO: 80020 - DNA, 1759 bp, Zea Mays
ctcgatctccctcccggctccccgacctttgtaaaccctaaaaatcaatctagttcgcaccaaatcgatcgcgcctcagctcaaaatccgaaacggttcgaacgatcagaacgattcagcttcagctcctgaatccagcagcaatggatcgctcccgctccaagcgcggctaccactacgaccaggactccccgccgccccgctccaagcagcgcttcgaccgccgcagcggtggcggccagaatgctaactcgagctatcaccgccgcggccccctcggcggcggcggctccgaccgccgcgggttcctgccccctgcccccgcgccgcccccgcccccgcccccaccgccgcttcctccctcgtcggccacggcgggtggcggcgctggtcccaccaccaccaccacctccttccgcatcctgtgccccgagtgcaaggcctacggcttcccacccggcttcgttgccaaggtccgggacgacagcggcgcgcttgtcactgtgcacccgcccttcgcgggcgactacgtccgggtcatcgagacggtggacggcgcgaggcgcgaggcagacggccgcccgcccatgttctccccggcccaagaggcccttctcatggtgcaccgccggattctcgagaccgacgctgacgacggcgacgaggatggcgagtatgggcccaggggcaaggactccagggacagggggaagaccaccacacgactcatcgtgcccaagatgcacgtcggatgcttgctcggcaaaggtgggaagatcatagagcaaatgaggatggagaccaagacgcacattaggatcctgccgcgtgaccagcacactccgcgctgcgtttccttgtccgaggaggttgtacagggaccagaccatgagcttttcccagctcaggaagcagtgctgcacattcaaactcatattgtagacctcggcccagacaaggataacattatcacaacaagactacttgtaccttcaagtgaaattgcttgctttgatggaagggaggggtcattatctgatatacagcgacagactagtgcaaacgtgcagatattaccaaaagaagatcttccattatgcgctttagagtcagatgaactcatacaggatagtggaggcagtgcaagtggctcatttgatcaaggcagcaacattattgatgagatcagacaaggtgctacaaaaagatttgccgttcctctagtaactaggagcacactagaagttgtcataccaaatagtgctgttgcaagcctcaccatgagagctggtagcaagcttgctcaaataagcgagatctctggtgctactgtaacgctagctgaggacagacctgacatcttagagaaagttgttcgaatatctggtacccctgagcaggctagcaaagctgagaatttgctgcagggatttattctaagcattccagatgacattccttcaggctagttgaagacactctgcatgtcatagttgttagttcgtaaaattcctgtgtatattcgaggtagaatatgctgatgtcatgtgattatttgtttaattgagcagcatgtattcatgtgtggatacatgctgttttccttgtagccgttaactggctgacgggggtgtaagattagcatgtgaatttacagattgattcaacattcaattctcatgtccatatgtgaccgctgaacatgaaacctccaacttatttaattctcagtctggtgcttagctgtgaaaacagtacg

SEQ ID NO: 80021 - DNA, 2310 bp, Zea Mays
tcgatctccctcccggctccccgacctttgtaaaccctaaaaatcaatctagttcgcaccaaatcgatcgcgcctcagctcaaaatccgaaacggttcgaacgatcagaacgattcagcttcagctcctgaatccagcagcaatggatcgctcccgctccaagcgcggctaccactacgaccaggactccccgccgccccgctccaagcagcgcttcgaccgccgcagcggtggcggccagaatgctaactcgagctatcaccgccgcggccccctcggcggcggcggctccgaccgccgcgggttcctgccccctgcccccgcgccgcccccgcccccgcccccaccgccgcttcctccctcgtcggccacggcgggtggcggcgctggtcccaccaccaccaccacctccttccgcatcctgtgccccgagtgcaaggcctacggcttcccacccggcttcgttgccaaggtccgggacgacagcggcgcgcttgtcactgtgcacccgcccttcgcgggcgactacgtccgggtcatcgagacggtggacggcgcgaggcgcgaggcagacggccgcccgcccatgttctccccggcccaagaggcccttctcatggtgcaccgccggattctcgagaccgacgctgacgacggcgacgaggatggcgagtatgggcccaggggcaaggactccagggacagggggaagaccaccacacgactcatcgtgcccaagatgcacgtcggatgcttgctcggcaaaggtgggaagatcatagagcaaatgaggatggagaccaagacgcacattaggatcctgccgcgtgaccagcacactccgcgctgcgtttccttgtccgaggaggttgtacaggttgttggagatggaaattgtgttaagaaggctgtagcaataatcactgatcgcctaaaggaaagcttacaccgtgaccgtggtcccttccgtgggcgaatgaattcaccagagcctcgaatttctcaggaagatgattatttgggtgtttcgcagatgcctgcatacgaggaatctctgggacgatctgatcagattaggaacaacactagcatggagccaccaggatatgagtttgattcaaatgatggcaagggaccagaccatgagcttttcccagctcaggaagcagtgctgcacattcaaactcatattgtagacctcggcccagacaaggataacattatcacaacaagactacttgtaccttcaagtgaaattgcttgctttgatggaagggaggggtcattatctgatatacagcgacagactagtgcaaacgtgcagatattaccaaaagaagatcttccattatgcgctttagagtcagatgaactcatacagattgttggagagattagtgctgctcggaatgctctgatacaagtaacaacaaaattaaggagttttctataccgtgagatgtctggtcctattcaagttggcaatattaatgtacatggagccatttctccagtagcaggctcacctggaggacccaacctcggaaatgatatgccaatgagtgcttatcaccaagcatcacaactggcaacttcatggcattcaaaagatagtggaggcagtgcaagtggctcatttgatcaaggcagcaacattattgatgagatcagacaaggtgctacaaaaaggtaatatgttatccttgcagttgtttcttatggtttgtttatttgatcaccttttttgccctccatcagatttgccgttcctctagtaactaggagcacactagaagttgtcataccaaatagtgctgttgcaagcctcaccatgagagctggtagcaagcttgctcaaataagcgagatctctggtgctactgtaacgctagctgaggacagacctgacatcttagagaaagttgttcgaatatctggtacccctgagcaggctagcaaagctgagaatttgctgcagggatttattctaagcattccagatgacattccttcaggctagttgaagacactctgcatgtcatagttgttagttcgtaaaattcctgtgtatattcgaggtagaatatgctgatgtcatgtgattatttgtttaattgagcagcatgtattcatgtgtggatacatgctgttttccttgtagccgttaactggctgacgggggtgtaagattagcatgtgaatttacagattgattcaacattcaattctcatgtccatatgtgaccgctgaacatgaaacctccaacttatttaattctcagtctggtgcttagctgtgaaaacagtacg

SEQ ID NO: 80022 - DNA, 2357 bp, Zea Mays
tcgatctccctcccggctccccgacctttgtaaaccctaaaaatcaatctagttcgcaccaaatcgatcgcgcctcagctcaaaatccgaaacggttcgaacgatcagaacgattcagcttcagctcctgaatccagcagcaatggatcgctcccgctccaagcgcggctaccactacgaccaggactccccgccgccccgctccaagcagcgcttcgaccgccgcagcggtggcggccagaatgctaactcgagctatcaccgccgcggccccctcggcggcggcggctccgaccgccgcgggttcctgccccctgcccccgcgccgcccccgcccccgcccccaccgccgcttcctccctcgtcggccacggcgggtggcggcgctggtcccaccaccaccaccacctccttccgcatcctgtgccccgagtgcaaggcctacggcttcccacccggcttcgttgccaaggtccgggacgacagcggcgcgcttgtcactgtgcacccgcccttcgcgggcgactacgtccgggtcatcgagacggtggacggcgcgaggcgcgaggcagacggccgcccgcccatgttctccccggcccaagaggcccttctcatggtgcaccgccggattctcgagaccgacgctgacgacggcgacgaggatggcgagtatgggcccaggggcaaggactccagggacagggggaagaccaccacacgactcatcgtgcccaagatgcacgtcggatgcttgctcggcaaaggtgggaagatcatagagcaaatgaggatggagaccaagacgcacattaggatcctgccgcgtgaccagcacactccgcgctgcgtttccttgtccgaggaggttgtacaggttgttggagatggaaattgtgttaagaaggctgtagcaataatcactgatcgcctaaaggaaagcttacaccgtgaccgtggtcccttccgtgggcgaatgaattcaccagagcctcgaatttctcaggaagatgattatttgggtgtttcgcagatgcctgcatacgaggaatctctgggacgatctgatcagattaggaacaacactagcatggagccaccaggatatgagtttgattcaaatgatggcaagttgcaacaaatgatggaatactggagatgctacaggctgatgttggtgttgatgttagactatctgatattattgctggttctgatgaaagggtagtaatcatcacatctagagagggaccagaccatgagcttttcccagctcaggaagcagtgctgcacattcaaactcatattgtagacctcggcccagacaaggataacattatcacaacaagactacttgtaccttcaagtgaaattgcttgctttgatggaagggaggggtcattatctgatatacagcgacagactagtgcaaacgtgcagatattaccaaaagaagatcttccattatgcgctttagagtcagatgaactcatacagattgttggagagattagtgctgctcggaatgctctgatacaagtaacaacaaaattaaggagttttctataccgtgagatgtctggtcctattcaagttggcaatattaatgtacatggagccatttctccagtagcaggctcacctggaggacccaacctcggaaatgatatgccaatgagtgcttatcaccaagcatcacaactggcaacttcatggcattcaaaagatagtggaggcagtgcaagtggctcatttgatcaaggcagcaacattattgatgagatcagacaaggtgctacaaaaagatttgccgttcctctagtaactaggagcacactagaagttgtcataccaaatagtgctgttgcaagcctcaccatgagagctggtagcaagcttgctcaaataagcgagatctctggtgctactgtaacgctagctgaggacagacctgacatcttagagaaagttgttcgaatatctggtacccctgagcaggctagcaaagctgagaatttgctgcagggatttattctaagcattccagatgacattccttcaggctagttgaagacactctgcatgtcatagttgttagttcgtaaaattcctgtgtatattcgaggtagaatatgctgatgtcatgtgattatttgtttaattgagcagcatgtattcatgtgtggatacatgctgttttccttgtagccgttaactggctgacgggggtgtaagattagcatgtgaatttacagattgattcaacattcaattctcatgtccatatgtgaccgctgaacatgaaacctccaacttatttaattctcagtctggtgcttagctgtgaaaacagtacg

SEQ ID NO: 80023 - DNA, 540 bp, Zea Mays
gactgcagcgcattctgcacaccgcccacgacgcaccgctcgtggtcgggcacgccgtcctgcatcagctgcagcacggcgaggtcgaacgtccagaggcccaggcgcgaggtcgccacgccggccatgagcatccaggcggacgccacgccggtggccgcccagacggaggccacgcacagcagcaggcagcaccactgcatccagatggaccacagccccgtccggagcgtggtaacccgggagtgcacgagcgggtacagcagggtcgctccgatcccaacaatggcgctgaagccccgcgccaaactgatcacgtatgcaggtatgcctttccagtcaagtgtcgcggtcatcagcgtaccaaagctgcacatcaattgccacttggtggcaaattaatactcattcatcatatctgtgactgtgagctgttgcagggttgagcgcagagtgacttgcagctagcttagcttgcctgagaactgtgaagtagaggaatgcgagcgccaccccgggaagcgcgacgtcctgcctcgc

SEQ ID NO: 80024 - DNA, 219 bp, Zea Mays
gactgcagcgaattctgcaccccgcccacgacgcagcgctcgtggtcgggcacgccatcctgcatcagctgcatcacggcgaggtcgaacatccagagccctaggcgcgacgcggcgacgccggccatcagcatccacgccgacgccacgtcgctcgccgcccagatggaagcgacgcacaccagcaggcagcaccactggccgcagacgccgccgcgc

SEQ ID NO: 80025 - DNA, 237 bp, Zea Mays
atggccatatgcctctggatgttgaagtatggcagaaccgtgaaccaccggcgaggaggtgatcatcgtggtgataggctctactggtgtgttgatgtggaatgctgcagcagttgcagccatgcggcgcctgtgctcttggttgccaaattgattgcggtgaagattatgatcctggtgaaggttgagatgcgctgcatgcatttcctcctcgtccctcatcgaaacctgaactga

SEQ ID NO: 80026 - DNA, 2113 bp, Zea Mays
attttttctgcttttgttcttatctccacaattgttctcttaccttatccttccatgccgctcttctccctggaaaaatcccagccattctcttaccttcttcacgtgctggacctctggaacacacacacactctccttcctgtccctcacgcacgccatggtgtcgagtttcattccctccgtcttctatctgctctacgacgctgaggtcgccctcatcgtcttcttccccaaccgcgctaagcccagccttccctccatcaccgagatcctgcaccgtctacagttcgctggccgagctcctccctcgcgctcggatccagccactgacgcccagccccaacgcgatgtcacacacccttggcgagcccctcactattcttattatcctgcactcgatgtgttcgacgaaatgtcgcagcaagctccgccccggatctgtgcagccccaacacacaccgtcgatctgcgcagctacgaccacgacagctccctcgcatcgtgtgctccgcctcatcgcactcgccgtgctcgacgtcgacctcacacaacaacgtcgttgattcgcgcagccatgacacatgtcgttgtcttcctatttggacagccccggtcacgatgtcatcgaatcccggtagttaattaatcatgtgatgtggaggccaagagttggattaatctcaaagtgatgctgatgaataaaccagaggagtggatgatctgatcaagtaccaggatgggagatgctcactaagtggtcatcatttaacaacactgacgtagtgtttatcccaggcaagtcccggtgcatttgccatctccatgctgttttaaaaacttttatcatttatctgctacattaggtgataagagctgagtgaataaacaattgatgcattaccattccttggaatttgattgtcctccttgctacctgttttataaagagaactaatgaggcttagccctacctagagaattaaaacttgtttctttttaaaagaatattgtgtaacactaggtatgggtttgttttatgaaaaaggaacttgcaataatgaaggcatcactcatgatgatgaattcattattcaagtatggtacctctgtcaggtacatgattttgggaaggaaataataattttagaccaaacgttgagcaggaaaggtcgcccgtttatgtcgattaaggatcgcaatgaaagtaggcttgctgatctaggaccttttaactggacacatgcctcgtcatggctaagcttagccttggctggaccaataccagaaaggccggcccgcaatggaagtggagagatggcgagagtatagtgtatccacctggcaagaggctggatggtgggtactgagctctcggttggcggggacccgttctggtcttgagaaatccggtgacgagttgacatatgcaaggattaagtgctacatatatcgtgtggttggagatcctcatctgagtattaatcgattcagatcaccgttacttctcggatatgaagattggatcactgctctgcattgtagataacaagtgaaactaaagctgctaaaatgaagctagtgtaggacaagtgaatgctctagattaggcaaatctagattcagaaaaagtacttaacttgtgaagtaaaattttggcataaggatccactactagtaagctcttctgtgaaatgagtcttcaatatttgataagctttaccttgaatcccttcaaggcagcatatcctttagagtcttttctttagtcgggtaagtcttgctgagtaattgcgtactcagggctttattccatgttgtttttcaggttataattttgttctgttgtggatggtgctaagtgctggtgggctcggccttctcatatgtataagtatatcctatctatagtttctttattgaggattgtcacttaagctagcatgcatttcaaacttacaaatattttatgacaattcaaagtgtaactcttttgaaacactttcttttgtaatcaactccgataattgtataatgtaaacttattataacttgtaaccattttgtaataaagaatttctgctgtaaatgttggtgtgtgatttttgtttact

SEQ ID NO: 80027 - DNA, 2109 bp, Zea Mays
attttttctgcttttgttcttatctccacaattgttctcttaccttatccttccatgccgctcttctccctggaaaaatcccagccattctcttaccttcttcacgtgctggacctctggaacacacacacactctccttcctgtccctcacgcacgccatggtgtcgagtttcattccctccgtcttctatctgctctacgacgctgaggtcgccctcatcgtcttcttccccaaccgcgctaagcccagccttccctccatcaccgagatcctgcaccgtctacagttcgctggccgagctcctccctcgcgctcggatccagccactgacgcccagccccaacgcgatgtcacacacccttggcgagcccctcactattcttattatcctgcactcgatgtgttcgacgaaatgtcgcagcaagctccgccccggatctgtgcagccccaacacacaccgtcgatctgcgcagctacgaccacgacagctccctcgcatcgtgtgctccgcctcatcgcactcgccgtgctcgacgtcgacctcacacaacaacgtcgttgattcgcgcagccatgacacatgtcgttgtcttcctatttggacagccccggtcacgatgtcatcgaatcccgttaattaatcatgtgatgtggaggccaagagttggattaatctcaaagtgatgctgatgaataaaccagaggagtggatgatctgatcaagtaccaggatgggagatgctcactaagtggtcatcatttaacaacactgacgtagtgtttatcccaggcaagtcccggtgcatttgccatctccatgctgttttaaaaacttttatcatttatctgctacattaggtgataagagctgagtgaataaacaattgatgcattaccattccttggaatttgattgtcctccttgctacctgttttataaagagaactaatgaggcttagccctacctagagaattaaaacttgtttctttttaaaagaatattgtgtaacactaggtatgggtttgttttatgaaaaaggaacttgcaataatgaaggcatcactcatgatgatgaattcattattcaagtatggtacctctgtcaggtacatgattttgggaaggaaataataattttagaccaaacgttgagcaggaaaggtcgcccgtttatgtcgattaaggatcgcaatgaaagtaggcttgctgatctaggaccttttaactggacacatgcctcgtcatggctaagcttagccttggctggaccaataccagaaaggccggcccgcaatggaagtggagagatggcgagagtatagtgtatccacctggcaagaggctggatggtgggtactgagctctcggttggcggggacccgttctggtcttgagaaatccggtgacgagttgacatatgcaaggattaagtgctacatatatcgtgtggttggagatcctcatctgagtattaatcgattcagatcaccgttacttctcggatatgaagattggatcactgctctgcattgtagataacaagtgaaactaaagctgctaaaatgaagctagtgtaggacaagtgaatgctctagattaggcaaatctagattcagaaaaagtacttaacttgtgaagtaaaattttggcataaggatccactactagtaagctcttctgtgaaatgagtcttcaatatttgataagctttaccttgaatcccttcaaggcagcatatcctttagagtcttttctttagtcgggtaagtcttgctgagtaattgcgtactcagggctttattccatgttgtttttcaggttataattttgttctgttgtggatggtgctaagtgctggtgggctcggccttctcatatgtataagtatatcctatctatagtttctttattgaggattgtcacttaagctagcatgcatttcaaacttacaaatattttatgacaattcaaagtgtaactcttttgaaacactttcttttgtaatcaactccgataattgtataatgtaaacttattataacttgtaaccattttgtaataaagaatttctgctgtaaatgttggtgtgtgatttttgtttact

SEQ ID NO: 80028 - DNA, 1575 bp, Zea Mays
gttgatcaccatcctggattcctggtggtggtaccaagcatgcatcgggccgacgacgaagctactaggaccgcttcacaccggcctgctctcctataagtagcagtgcctcaatgcgacgccttttggcaagttcgatccagattatagcagctagctcaccgtcaccgacatacagtacaatagcagcttattagcttgtgtcagtccatccatccatccatggagaaactcgtctacttcgcgaccattatatccttatccatggcggcgctgctagtgccactccgcgtacagtgcgaagaagcagctagagctgctgctgccagaagctgccatgccggcaccggagcttctgcttctgcaccagccgcagcagcagcgtggaaaaggagctgcggcggcggcaaggcggggaagcagcagccgcaggtggagggcatgttcgtgttcgggagctcgctggtggacaacggcaacaacaactttctcaacggctccggcgtgcgcgcagactacctcccctacggcgtggacttccccctcggcccctccggccgtttctccaacggccgcaacgtcatcgacgcgctcggcgagctcctcggcctccccgggctcgtcccacccttcgccgacccgcgcacccggcgggcccgcgccgcgctgcgcggcgtcaacttcgcctccggcggctccggcatcctggagcacaccgggcagggcaaggtggtgagcctgcggcagcagatcaccaactttgagtcggtgacccttcctgacctgcgggcccaactgcgtggaccagctgcggccgccaaccactggatcaagggtcaagattccttccacaagtgctacctctccaagtgcctcttcgtcatcggcacaggtggcaatgactacctgctcgactacttcaaccccgggaacggcacccaaggtgggccgcccttgtcagagttcactgcgtctctcatcaccaagctctccggacatcttcaggcgttagggagacgagcagagcctgctgcgagatgtcgaggagctcgtcgggcgtgctgtgcaagaagcaggggcccatctgcagcgaccggacggagtacgtcttcttcgacgggctgcacccgacggacgccgtgaacgccaggatcgcgcgcaagggctacggctccagctcgcccgaccacgcctaccccatcaacgtcaagaagctagccatgctgtagcccttgtagaagctagccatgcatgcttgtaacctagctttgtactagtagtaataatctagaattaatgcctacctcatcaacgccaacatcgttcgactacttactagtagtactagttctctgtgaaatagtctaataagccatctcccattcgtctttgctaggcgttaagtgtttttagtgaagagtacgcgcgggcatgcagggtggtctagacaatcctaatgtatagtatccgctacttggtcttttatgtatcatgagtgatgcattcgtcttttatagtatccgctacttggtctatataatcctaatgtatagtatgcatatgtcttaatgtgtg

SEQ ID NO: 80029 - DNA, 2341 bp, Zea Mays
ccttgccggctgacagccggggccagcgccaccccggacctccagctataaatgccgtgcgaattttgcctccagaggaaccaaagccgccaccgttgccgtagccgtgttcttggactctgttacgtgctgccattttgccaaggctagccccctcctcctcttcttcctcttcttcttttcgcgacgatcagagaagaagatgacgatcaccattgaacagccccagctcgatgcggtggcggagaggaaagtccccggcggaggtgaccccgcggagctggtgctcgacgccggcttcgtcgtgccggacgccaacgccttcggcaataccttcaggtgaaacagcctactgatttgctacggtgggttcttggggatccgtacgtcgacgccaaaactcaaaggccaggcgcaagcagagaagattggggcttatctagatatgcacatatttatataatggaattaaccaatacgtgttgaggtggattttaagatgaaaactaaagtaatttttactttaatctacgtcaacgtggattgataataaatagtacctcagatcagttcacttgtgtgcttctcgttccgagtcaaagacggaaacagacgcgtgacgtgacgcatttttccactcttgtgtttaatgataaagtaaccataaaaagacactcgggcaaatccacatttttacttggcaggataaaaattatttgtctgccaacaagcttgtcatcacaaaacacacacgaagtcggcggacgagaaaggcctttgctgcccgcttccactctgctggaccgctgcattgccgtacaggctccagcaaaattactgaggaatttgccaccgaaattactgaggaatttgccatcccaccgaaattattgttaagttttacgttccgagtgatacagttttgtttccaaaggcatctgaacaagcaggttgccaaatgaaggaacaacttggcatgtgcgcccccaaagatttatgggtgtccacgacagcggccccacaagcaccaacgatatttttgtggctactgtgactatgctaacacggtggatttatttatattatctttttaagttatacatagcgaacccggactaattttttcttccttgcactgagctgtgtggccttaatgtccttgggaaaaaataaaaaatgagaacgcaggagctgatgaacgaccgggaactcctgacccttggtgcagggactacgacgcggagtcggagcggaagcagacggtagaggagttctaccgggtgaaccacgtgaggcagacgcacgagttcgtggcgcggatgcgggcggagtacgggcggctggacaagacggagatgggcatctgggagtgcatcgagctgctgaacgagttcatcgacgacagcgacccggacctggacatgccccagatcgagcacctgctgcagaccgccgaggccatccgcaaggactaccccgacgaggactggctccacctcaccggactcatccacgacctgggcaaggtgctgctgcacccaagcttcggggagctccctcagtgggctgtcgtcggtgacaccttccccgtcggctgcgcatacgacgagtgcaacgtccacttcaagtacttcaaggagaaccccgactaccacaacccgaagctcaacaccaagttgggggtctactcggagggctgcggcctcaacaaggtgctcatgtcatggggccacgacgactacatgtacctggtggccaaggagaacaagtgcacccttccttccgcggggctgttcatcatcagataccactcgttctaccccctgcacaagcatggagcctacacacacctgatggacgatgaggacaaggagaacctcaagtggctgcatgtgttcaacaagtatgacctgtacagcaagagcaacagcaggatcgacgtggaggaggtgaagccctactacatgtccctaatcgacaagtacttcccggccaagctaagatggtgagaaggggcggcctggcctggacctggatggatggaaccccaaggccccaccaagagctgtcgttccaagtgtccatgtaccatatacatatatatagactacgaatacatgctacaataagcgagcctctccttttgttctacttcccagattttgtggtgttgcgaaagttccacctgtccgaactgctcttcgacactagtagtaaatatggaaaatctattttagactcggtaagctttttttaaaattaaggggaacaactctcctcaaccactttgtcattgtcttacctatcgtcttatcatttttcaccatttttaaatcaaatt

SEQ ID NO: 80030 - DNA, 1903 bp, Zea Mays
gcttgcaccaaaatgagtgattgcacaggatatgtcctctacaaattgccacagcgtcacaaactcacaacgctacacaatacgcacacttcgcaaagcgtcttcctccgaccccatcgcctctgtggcttcctggctgtctgactgcgtctgcctggtcgtacgcgagcgcgtgcgtcccttcaccgtcacgagcggcgcacaccgtcaccgccacgctccgtcgccttccagaaaatctaaaccccagcggagccggccacggccagtcagccctcacacggactccgacgcgctgcccgctcgcctgccaaacccccaccccctcgccggcgatgctgccgcgtcggtttagcaaccacccgggctcctcctcacccctcccgttcctcgtcgtctgcggcctgctcctcgctgcggccgtagcattttccccggtcgctgccgccgaggccgctggccgcggcggcggcggcggcggcggcggcgctgggcacgagggccgcgcggggaagccggaggtcgaggcggaggcggaggcgcgcggggatggggtggccgtggcggaggccggcggcgaggtggtggctcagggcaatgccacggaggccaaggagggcagcctcgccgacatgatcgaccgcgcgctggagaaggagttcccggagtccgagagcgagcagggcggcggagagaccgatcctggtagcttcaacaacacggtagctgagaagcagggagttcttgaaactgtagctagaagagtaacaaagaagaatgaaaccaaagataacaagtcatttccttttaaggaggtcttcttggatcgatctgagcaagaagatgttcccacattgattgatcggaaggacaatgtttttatcatatcaaacccaaagtcaaaataccctgtgctgcagctggaccttagattgatatcagatcttgttgttgttatcgtgtctgctacatgtggtggaatcgcttttgcttgccttgggcaacctgtgattacaggttatctacttgcaggatctataattgggcctggaggttttagctttgtcaatgaaatggtgcaagttgaaacggtagcccagtttggtgtgatatttctcctgtttgcattgggacttgagttttctactgcaaaacttcgagttgttcgtgctgttgctgttctcggaggaatgctccaaattatgctgttcatgtttctttgtggtattttggctacactatgtggaggcaaaacaaaagaaggtgtttttgttggtgtgcttctctccatgtcttcaacagctgtggttttaaagtttctgatggaaagaaatagtatcaatgctcttcatggccaagttacagttgggacacttatattgcaggattgtgctgttggtctgctgtttgcgcttcttccaattttgagtggtacatctggccttcttcacggagttgcatcaatgacgaagtcgttggtggtattgataacgttcctgaccattctctctatcctctcccgcacgggcgttccttggtttcttaaactgatgataagtctgtcatcacagacaaatgaactataccagctggcagcggttgcgttctgcttgttatttgcttgggagattcggcttattttctggcttttaccgaagtacccatcccacttggaggatcgctggcatttgctatccacaacggcataaccaagaactgagcattgctgcccttttgccacccacaactacttttcccttgaacacgcaggagagctgctatttgccaattacctataagccagcgtacaagctgggttgccaaacaacaacaacaacaacaacaacaacaacaaagcctttttgggctagagttgaaatccaacaaaaaccacaagtcaagg

SEQ ID NO: 80031 - DNA, 2719 bp, Zea Mays
gcttgcaccaaaatgagtgattgcacaggatatgtcctctacaaattgccacagcgtcacaaactcacaacgctacacaatacgcacacttcgcaaagcgtcttcctccgaccccatcgcctctgtggcttcctggctgtctgactgcgtctgcctggtcgtacgcgagcgcgtgcgtcccttcaccgtcacgagcggcgcacaccgtcaccgccacgctccgtcgccttccagaaaatctaaaccccagcggagccggccacggccagtcagccctcacacggactccgacgcgctgcccgctcgcctgccaaacccccaccccctcgccggcgatgctgccgcgtcggtttagcaaccacccgggctcctcctcacccctcccgttcctcgtcgtctgcggcctgctcctcgctgcggccgtagcattttccccggtcgctgccgccgaggccgctggccgcggcggcggcggcggcggcggcggcgctgggcacgagggccgcgcggggaagccggaggtcgaggcggaggcggaggcgcgcggggatggggtggccgtggcggaggccggcggcgaggtggtggctcagggcaatgccacggaggccaaggagggcagcctcgccgacatgatcgaccgcgcgctggagaaggagttcccggagtccgagagcgagcagggcggcggagagaccgatcctggtagcttcaacaacacggtagctgagaagcagggagttcttgaaactgtagctagaagagtaacaaagaagaatgaaaccaaagataacaagtcatttccttttaaggaggtcttcttggatcgatctgagcaagaagatgttcccacattgattgatcggaaggacaatgtttttatcatatcaaacccaaagtcaaaataccctgtgctgcagctggaccttagattgatatcagatcttgttgttgttatcgtgtctgctacatgtggtggaatcgcttttgcttgccttgggcaacctgtgattacaggttatctacttgcaggatctataattgggcctggaggttttagctttgtcaatgaaatggtgcaagttgaaacggtagcccagtttggtgtgatatttctcctgtttgcattgggacttgagttttctactgcaaaacttcgagttgttcgtgctgttgctgttctcggaggaatgctccaaattatgctgttcatgtttctttgtggtattttggctacactatgtggaggcaaaacaaaagaaggtgtttttgttggtgtgcttctctccatgtcttcaacagctgtggttttaaagtttctgatggaaagaaatagtatcaatgctcttcatggccaagttacagttgggacacttatattgcaggattgtgctgttggtctgctgtttgcgcttcttccaattttgagtggtacatctggccttcttcacggagttgcatcaatgacgaagtcgttggtggtattgataacgttcctgaccattctctctatcctctcccgcacgggcgttccttggtttcttaaactgatgataagtctgtcatcacagacaaatgaactataccagctggcagcggttgcgttctgcttgttatttgcttggtgtagtgataagctgggcctgagtctcgagttgggttcatttgcagctggagtaatgatatcaacaacagaccttgcgcaacatactcttgaacaacattgggatgctaattaatgtccatttcttgtggaaccatgtggatatactccttgcagcggtaattttggtgatcaccgtaaagacatttattgttgctattgtcgtaaaagggtttgggtatagcaacaaaacatctcttcttgtcggcatgtctcttgcacaaataggagagtttgcttttgttctcctaagccgtgcttcaagtatccatctcatcgagggcaagctatacctgcttcttcttggaaccactgcactcagtttggtgacaacccctctgctattcaaaatgatcccagcagtggtccacctcggggttcttttgagatggttttctgtcgataccaatcagctgggcctaaaaaatgatgtcctccgcattgatagcggcaagcgcataaatctgatagtccaaggctcacatgactcatgacacatggcacactgcaagctacttttttgtatggcttgagtttacaagctctgtaaagtgttttcacctgtattgaagagtttgtagcagatatacaagggtggaggcaagagaactcaactcagatcttgctcatagggtgagatcaatcctcccccatcatggagactgcatgggcagttgggtttgccgtttttgagagcagtgtgtctaggatgattggtggagtgagtggctgtcgaccccaaatgagggtctcgtgtaacataagaatgtatgatggttaattgattggatcagcatgataggatctaggcgtgatcgttatgccattgtatcctttcagcaaaactgtgtatcctcgcaacacgaaagtgtgtacaacagtatccatcagatcacgaatttcgttatgtaaccatatactcgtcctagttcatgattttttttcacgcgaggcttctagtaacctgtctatatatcactttgttggattcaggctcacaatgatgggtgtgcctcaacgaattgattgaatccattttattatgcgtggtcccgt

SEQ ID NO: 80032 - DNA, 1830 bp, Zea Mays
ccacagcgtcacaaactcacaacgctacacaatacgcacacttcgcaaagcgtcttcctccgaccccatcgcctctgtggcttcctggctgtctgactgcgtctgcctggtcgtacgcgagcgcgtgcgtcccttcaccgtcacgagcggcgcacaccgtcaccgccacgctccgtcgccttccagaaaatctaaaccccagcggagccggccacggccagtcagccctcacacggactccgacgcgctgcccgctcgcctgccaaacccccaccccctcgccggcgatgctgccgcgtcggtttagcaaccacccgggctcctcctcacccctcccgttcctcgtcgtctgcggcctgctcctcgctgcggccgtagcattttccccggtcgctgccgccgaggccgctggccgcggcggcggcggcggcggcggcggcgctgggcacgagggccgcgcggggaagccggaggtcgaggcggaggcggaggcgcgcggggatggggtggccgtggcggaggccggcggcgaggtggtggctcagggcaatgccacggaggccaaggagggcagcctcgccgacatgatcgaccgcgcgctggagaaggagttcccggagtccgagagcgagcagggcggcggagagaccgatcctggtagcttcaacaacacggtagctgagaagcagggagttcttgaaactgtagctagaagagtaacaaagaagaatgaaaccaaagataacaagtcatttccttttaaggaggtcttcttggatcgatctgagcaagaagatgttcccacattgattgatcggaaggacaatgtttttatcatatcaaacccaaagtcaaaataccctgtgctgcagctggaccttagattgatatcagatcttgttgttgttatcgtgtctgctacatgtggtggaatcgcttttgcttgccttgggcaacctgatctataattgggcctggaggttttagctttgtcaatgaaatggtgcaagttgaaacggtagcccagtttggtgtgatatttctcctgtttgcattgggacttgagttttctactgcaaaacttcgagttgttcgtgctgttgctgttctcggaggaatgctccaaattatgctgttcatgtttctttgtggtattttggctacactatgtggaggcaaaacaaaagaaggtgtttttgttggtgtgcttctctccatgtcttcaacagctgtggttttaaagtttctgatggaaagaaatagtatcaatgctcttcatggccaagttacagttgggacacttatattgcaggattgtgctgttggtctgctgtttgcgcttcttccaattttgagtggtacatctggccttcttcacggagttgcatcaatgacgaagtcgttggtggtattgataacgttcctgaccattctctctatcctctcccgcacgggcgttccttggtttcttaaactgatgataagtctgtcatcacagacaaatgaactataccagctggcagcggttgcgttctgcttgttatttgcttgggagattcggcttattttctggcttttaccgaagtacccatcccacttggaggatcgctggcatttgctatccacaacggcataaccaagaactgagcattgctgcccttttgccacccacaactacttttcccttgaacacgcaggagagctgctatttgccaattacctataagccagcgtacaagctgggttgccaaacaacaacaacaacaacaacaacaacaacaaagcctttttgggctagagttgaaatccaacaaaaaccacaagtcaagg

SEQ ID NO: 80033 - DNA, 4213 bp, Zea Mays
ccacagcgtcacaaactcacaacgctacacaatacgcacacttcgcaaagcgtcttcctccgaccccatcgcctctgtggcttcctggctgtctgactgcgtctgcctggtcgtacgcgagcgcgtgcgtcccttcaccgtcacgagcggcgcacaccgtcaccgccacgctccgtcgccttccagaaaatctaaaccccagcggagccggccacggccagtcagccctcacacggactccgacgcgctgcccgctcgcctgccaaacccccaccccctcgccggcgatgctgccgcgtcggtttagcaaccacccgggctcctcctcacccctcccgttcctcgtcgtctgcggcctgctcctcgctgcggccgtagcattttccccggtcgctgccgccgaggccgctggccgcggcggcggcggcggcggcggcggcgctgggcacgagggccgcgcggggaagccggaggtcgaggcggaggcggaggcgcgcggggatggggtggccgtggcggaggccggcggcgaggtggtggctcagggcaatgccacggaggccaaggagggcagcctcgccgacatgatcgaccgcgcgctggagaaggagttcccggagtccgagagcgagcagggcggcggagagaccgatcctggtagcttcaacaacacggtagctgagaagcagaggaaaggaaattcgcttttggactggactgtgcctgattcctacacttgtgaatctactagtatatagttatggagccttgaccctgtcgttagtatatctatgttgcaaccttctagcattcaatgacccatccatatgtcatcattgtatagcttttgggcactttgactttatatgatcattttgctttatgttgtttgatcggcattttcctagtgctgatgagggacatcaatatcttggatgttgtttatttcgtgctatgcttggcaatgttaagggcttatttgtttcggctttttttatgagcttttctgagaatctggttgtggggagaatttggttgtgagggagaatctgagtatcgtggggattacgtgcggaggaatatgaaggggtacatagtgtttaggatctaggaagtgacggattccttctatcgtgatgattcagccgattgtgtattcatgttgattttggacggttttcaccaaatcaattatcatagaagtgggctgaaaagctaggcgtttgtcagtccacagcacagtagcttctggcgaccagaatcaacaaaaaagctgaaacaaacatgcccgaagtatgactatatgcttgttgtgcacatgggagggagttcttgaaactgtagctagaagagtaacaaagaagaatgaaaccaaagataacaagtcatttccttttaaggaggtcttcttggatcgatctgagcaagaagatgttcccacattgattgatcggaaggacaatgtttttatcatatcaaacccaaagtcaaaataccctgtgctgcagctggaccttagattgatatcagatcttgttgttgttatcgtgtctgctacatgtggtggaatcgcttttgcttgccttgggcaacctgtgattacaggttatctacttgcaggatctataattgggcctggaggttttagctttgtcaatgaaatggtgcaagtaaggttgaaacggtagcccagtttggtgtgatatttctcctgtttgcattgggacttgagttttctactgcaaaacttcgagttgttcgtgctgttgctgttctcggaggaatgctccaaattatgctgttcatgtttctttgtggtattttggctacactatgtggaggcaaaacaaaagaaggtgtttttgttggtgtgcttctctccatgtcttcaacagctgtggttttaaagtttctgatggaaagaaatagtatcaatgctcttcatggccaagttacagttgggacacttatattgcaggattgtgctgttggtctgctgtttgcgcttcttccaattttgagtggtacatctggccttcttcacggagttgcatcaatgacgaagtcgttggtggtattgataacgttcctgaccattctctctatcctctcccgcacgggcgttccttggtttcttaaactgatgataagtctgtcatcacagacaaatgaactataccagctggcagcggttgcgttctgcttgttatttgcttgggagattcggcttattttctggcttttaccgaagtacccatcccacttggaggatcgctggcatttgctatccacaacggcataaccaagaactgagcattgctgcccttttgccacccacaactacttttcccttgaacacgcaggagagctgctatttgccaattacctataagccagcgtacaagctgggttgccaaacaacaacaacaacaacaacaacaacaacaaagcctttttgggctagagttgaaatccaacaaaaaccacaagtcaaggactcaaggttgccaaacaaccctacaactttgggtctgtttggcaacaatgtttctcaaaaccatggttttacaatactatacttcgcaagggtttggagatcttgggctccaccaaaatgctgttttttcatttggttggtggcccaaaatagatgttggacagttgatcgcttggcaaaaggggattgaatcaccctatcagatgtcctttatgtgaccagcaaggggaaaccctgaaccacttgcttgtgaattgtgtcttctcaaggattttctggtacaacctgctaagaaagttcgggctgcatagtttagccccacagccagatgcagtctcttttatggattggtgggagatggtttcagagacagtaaatggtttggtcagggaaggtcttgactccctcatcattttagggtcgtggatgatttggaagcatcgtaatagagttatttttgatggagggtctcccaaccttcctctgattatggagcatgcagatgaggaaagaagaggctgggaaattgctggagccaaagggctatccttcttggctgcccccttgcatagtgtagtgataagctgggcctgagtctcgagttgggttcatttgcagctggagtaatgatatcaacaacagaccttgcgcaacatactcttgaacaaatcgaacctatccgcaacttattcgctgctcttttccttgccagcattgggatgctaattaatgtccatttcttgtggaaccatgtggatatactccttgcagcggtaattttggtgatcaccgtaaagacatttattgttgctattgtcgtaaaagggtttgggtatagcaacaaaacatctcttcttgtcggcatgtctcttgcacaaataggagagtttgcttttgttctcctaagccgtgcttcaagtatccatctcatcgagggcaagctatacctgcttcttcttggaaccactgcactcagtttggtgacaacccctctgctattcaaaatgatcccagcagtggtccacctcggggttcttttgagatggttttctgtcgataccaatcaggtggagctgggcctaaaaaatgatgtcctccgcattgatagcggcaagcgcataaatctgatagtccaaggctcacatgactcatgacacatggcacactgcaagctacttttttgtatggcttgagtttacaagctctgtaaagtgttttcacctgtattgaagagtttgtagcagatatacaagggtggaggcaagagaactcaactcagatcttgctcatagggtgagatcaatcctcccccatcatggagactgcatgggcagttgggtttgccgtttttgagagcagtgtgtctaggatgattggtggagtgagtggctgtcgaccccaaatgagggtctcgtgtaacataagaatgtatgatggttaattgattggatcagcatgataggatctaggcgtgatcgttatgccattgtatcctttcagcaaaactgtgtatcctcgcaacacgaaagtgtgtacaacagtatccatcagatcacgaatttcgttatgtaaccatatactcgtcctagttcatgattttttttcacgcgaggcttctagtaacctgtctatatatcactttgttggattcaggctcacaatgatgggtgtgcctcaacgaattgattgaatccattttattatgcgtggtcccgt

SEQ ID NO: 80034 - DNA, 1834 bp, Zea Mays
acacaatacgcacacttcgcaaagcgtcttcctccgaccccatcgcctctgtggcttcctggctgtctgactgcgtctgcctggtcgtacgcgagcgcgtgcgtcccttcaccgtcacgagcggcgcacaccgtcaccgccacgctccgtcgccttccagaaaatctaaaccccagcggagccggccacggccagtcagccctcacacggactccgacgcgctgcccgctcgcctgccaaacccccaccccctcgccggcgatgctgccgcgtcggtttagcaaccacccgggctcctcctcacccctcccgttcctcgtcgtctgcggcctgctcctcgctgcggccgtagcattttccccggtcgctgccgccgaggccgctggccgcggcggcggcggcggcggcggcggcgctgggcacgagggccgcgcggggaagccggaggtcgaggcggaggcggaggcgcgcggggatggggtggccgtggcggaggccggcggcgaggtggtggctcagggcaatgccacggaggccaaggagggcagcctcgccgacatgatcgaccgcgcgctggagaaggagttcccggagtccgagagcgagcagggcggcggagagaccgatcctggtagcttcaacaacacggtagctgagaagcagggagttcttgaaactgtagctagaagagtaacaaagaagaatgaaaccaaagataacaagtcatttccttttaaggaggtcttcttggatcgatctgagcaagaagatgttcccacattgattgatcggaaggacaatgtttttatcatatcaaacccaaagtcaaaataccctgtgctgcagctggaccttagattgatatcagatcttgttgttgttatcgtgtctgctacatgtggtggaatcgcttttgcttgccttgggcaacctgtgattacaggttatctacttgcaggatctataattgggcctggaggttttagctttgtcaatgaaatggtgcaagtaaggttgaaacggtagcccagtttggtgtgatatttctcctgtttgcattgggacttgagttttctactgcaaaacttcgagttgttcgtgctgttgctgttctcggaggaatgctccaaattatgctgttcatgtttctttgtggtattttggctacactatgtggaggcaaaacaaaagaaggtgtttttgttggtgtgcttctctccatgtcttcaacagctgtggttttaaagtttctgatggaaagaaatagtatcaatgctcttcatggccaagttacagttgggacacttatattgcaggattgtgctgttggtctgctgtttgcgcttcttccaattttgagtggtacatctggccttcttcacggagttgcatcaatgacgaagtcgttggtggtattgataacgttcctgaccattctctctatcctctcccgcacgggcgttccttggtttcttaaactgatgataagtctgtcatcacagacaaatgaactataccagctggcagcggttgcgttctgcttgttatttgcttgggagattcggcttattttctggcttttaccgaagtacccatcccacttggaggatcgctggcatttgctatccacaacggcataaccaagaactgagcattgctgcccttttgccacccacaactacttttcccttgaacacgcaggagagctgctatttgccaattacctataagccagcgtacaagctgggttgccaaacaacaacaacaacaacaacaacaacaacaaagcctttttgggctagagttgaaatccaacaaaaaccacaagtcaagg

SEQ ID NO: 80035 - DNA, 1761 bp, Zea Mays
acacaatacgcacacttcgcaaagcgtcttcctccgaccccatcgcctctgtggcttcctggctgtctgactgcgtctgcctggtcgtacgcgagcgcgtgcgtcccttcaccgtcacgagcggcgcacaccgtcaccgccacgctccgtcgccttccagaaaatctaaaccccagcggagccggccacggccagtcagccctcacacggactccgacgcgctgcccgctcgcctgccaaacccccaccccctcgccggcgatgctgccgcgtcggtttagcaaccacccgggctcctcctcacccctcccgttcctcgtcgtctgcggcctgctcctcgctgcggccgtagcattttccccggtcgctgccgccgaggccgctggccgcggcggcggcggcggcggcggcggcgctgggcacgagggccgcgcggggaagccggaggtcgaggcggaggcggaggcgcgcggggatggggtggccgtggcggaggccggcggcgaggtggtggctcagggcaatgccacggaggccaaggagggcagcctcgccgacatgatcgaccgcgcgctggagaaggagttcccggagtccgagagcgagcagggcggcggagagaccgatcctggtagcttcaacaacacggtagctgagaagcaggtcatttccttttaaggaggtcttcttggatcgatctgagcaagaagatgttcccacattgattgatcggaaggacaatgtttttatcatatcaaacccaaagtcaaaataccctgtgctgcagctggaccttagattgatatcagatcttgttgttgttatcgtgtctgctacatgtggtggaatcgcttttgcttgccttgggcaacctgtgattacaggttatctacttgcaggatctataattgggcctggaggttttagctttgtcaatgaaatggtgcaagtaaggttgaaacggtagcccagtttggtgtgatatttctcctgtttgcattgggacttgagttttctactgcaaaacttcgagttgttcgtgctgttgctgttctcggaggaatgctccaaattatgctgttcatgtttctttgtgctatgtggaggcaaaacaaaagaaggtgtttttgttggtgtgcttctctccatgtcttcaacagctgtggttttaaagtttctgatggaaagaaatagtatcaatgctcttcatggccaagttacagttgggacacttatattgcaggattgtgctgttggtctgctgtttgcgcttcttccaattttgagtggtacatctggccttcttcacggagttgcatcaatgacgaagtcgttggtggtattgataacgttcctgaccattctctctatcctctcccgcacgggcgttccttggtttcttaaactgatgataagtctgtcatcacagacaaatgaactataccagctggcagcggttgcgttctgcttgttatttgcttgggagattcggcttattttctggcttttaccgaagtacccatcccacttggaggatcgctggcatttgctatccacaacggcataaccaagaactgagcattgctgcccttttgccacccacaactacttttcccttgaacacgcaggagagctgctatttgccaattacctataagccagcgtacaagctgggttgccaaacaacaacaacaacaacaacaacaacaacaaagcctttttgggctagagttgaaatccaacaaaaaccacaagtcaagg

SEQ ID NO: 80036 - DNA, 2566 bp, Zea Mays
acacaatacgcacacttcgcaaagcgtcttcctccgaccccatcgcctctgtggcttcctggctgtctgactgcgtctgcctggtcgtacgcgagcgcgtgcgtcccttcaccgtcacgagcggcgcacaccgtcaccgccacgctccgtcgccttccagaaaatctaaaccccagcggagccggccacggccagtcagccctcacacggactccgacgcgctgcccgctcgcctgccaaacccccaccccctcgccggcgatgctgccgcgtcggtttagcaaccacccgggctcctcctcacccctcccgttcctcgtcgtctgcggcctgctcctcgctgcggccgtagcattttccccggtcgctgccgccgaggccgctggccgcggcggcggcggcggcggcggcggcgctgggcacgagggccgcgcggggaagccggaggtcgaggcggaggcggaggcgcgcggggatggggtggccgtggcggaggccggcggcgaggtggtggctcagggcaatgccacggaggccaaggagggcagcctcgccgacatgatcgaccgcgcgctggagaaggagttcccggagtccgagagcgagcagggcggcggagagaccgatcctggtagcttcaacaacacggtagctgagaagcagggagttcttgaaactgtagctagaagagtaacaaagaagaatgaaaccaaagataacaagtcatttccttttaaggaggtcttcttggatcgatctgagcaagaagatgttcccacattgattgatcggaaggacaatgtttttatcatatcaaacccaaagtcaaaataccctgtgctgcagctggaccttagattgatatcagatcttgttgttgttatcgtgtctgctacatgtggtggaatcgcttttgcttgccttgggcaacctgatctataattgggcctggaggttttagctttgtcaatgaaatggtgcaagtaaggttgaaacggtagcccagtttggtgtgatatttctcctgtttgcattgggacttgagttttctactgcaaaacttcgagttgttcgtgctgttgctgttctcggaggaatgctccaaattatgctgttcatgtttctttgtggtattttggctacactatgtggaggcaaaacaaaagaaggtgtttttgttggtgtgcttctctccatgtcttcaacagctgtggttttaaagtttctgatggaaagaaatagtatcaatgctcttcatggccaagttacagttgggacacttatattgcaggattgtgctgttggtctgctgtttgcgcttcttccaattttgagtggtacatctggccttcttcacggagttgcatcaatgacgaagtcgttggtggtattgataacgttcctgaccattctctctatcctctcccgcacgggcgttccttggtttcttaaactgatgataagtctgtcatcacagacaaatgaactataccagctggcagcggttgcgttctgcttgttatttgcttggtgtagtgataagctgggcctgagtctcgagttgggttcatttgcagctggagtaatgatatcaacaacagaccttgcgcaacatactcttgaacaacggtaattttggtgatcaccgtaaagacatttattgttgctattgtcgtaaaagggtttgggtatagcaacaaaacatctcttcttgtcggcatgtctcttgcacaaataggagagtttgcttttgttctcctaagccgtgcttcaagtatccatctcatcgagggcaagctatacctgcttcttcttggaaccactgcactcagtttggtgacaacccctctgctattcaaaatgatcccagcagtggtccacctcggggttcttttgagatggttttctgtcgataccaatcagctgggcctaaaaaatgatgtcctccgcattgatagcggcaagcgcataaatctgatagtccaaggctcacatgactcatgacacatggcacactgcaagctacttttttgtatggcttgagtttacaagctctgtaaagtgttttcacctgtattgaagagtttgtagcagatatacaagggtggaggcaagagaactcaactcagatcttgctcatagggtgagatcaatcctcccccatcatggagactgcatgggcagttgggtttgccgtttttgagagcagtgtgtctaggatgattggtggagtgagtggctgtcgaccccaaatgagggtctcgtgtaacataagaatgtatgatggttaattgattggatcagcatgataggatctaggcgtgatcgttatgccattgtatcctttcagcaaaactgtgtatcctcgcaacacgaaagtgtgtacaacagtatccatcagatcacgaatttcgttatgtaaccatatactcgtcctagttcatgattttttttcacgcgaggcttctagtaacctgtctatatatcactttgttggattcaggctcacaatgatgggtgtgcctcaacgaattgattgaatccattttattatgcgtggtcccgt

SEQ ID NO: 80037 - DNA, 2586 bp, Zea Mays
acacaatacgcacacttcgcaaagcgtcttcctccgaccccatcgcctctgtggcttcctggctgtctgactgcgtctgcctggtcgtacgcgagcgcgtgcgtcccttcaccgtcacgagcggcgcacaccgtcaccgccacgctccgtcgccttccagaaaatctaaaccccagcggagccggccacggccagtcagccctcacacggactccgacgcgctgcccgctcgcctgccaaacccccaccccctcgccggcgatgctgccgcgtcggtttagcaaccacccgggctcctcctcacccctcccgttcctcgtcgtctgcggcctgctcctcgctgcggccgtagcattttccccggtcgctgccgccgaggccgctggccgcggcggcggcggcggcggcggcggcgctgggcacgagggccgcgcggggaagccggaggtcgaggcggaggcggaggcgcgcggggatggggtggccgtggcggaggccggcggcgaggtggtggctcagggcaatgccacggaggccaaggagggcagcctcgccgacatgatcgaccgcgcgctggagaaggagttcccggagtccgagagcgagcagggcggcggagagaccgatcctggtagcttcaacaacacggtagctgagaagcagggagttcttgaaactgtagctagaagagtaacaaagaagaatgaaaccaaagataacaagtcatttccttttaaggaggtcttcttggatcgatctgagcaagaagatgttcccacattgattgatcggaaggacaatgtttttatcatatcaaacccaaagtcaaaataccctgtgctgcagctggaccttagattgatatcagatcttgttgttgttatcgtgtctgctacatgtggtggaatcgcttttgcttgccttgggcaacctgtgattacaggttatctacttgcaggatctataattgggcctggaggttttagctttgtcaatgaaatggtgcaagttgaaacggtagcccagtttggtgtgatatttctcctgtttgcattgggacttgagttttctactgcaaaacttcgagttgttcgtgctgttgctgttctcggaggaatgctccaaattatgctgttcatgtttctttgtggtattttggctacactatgtggaggcaaaacaaaagaaggtgtttttgttggtgtgcttctctccatgtcttcaacagctgtggttttaaagtttctgatggaaagaaatagtatcaatgctcttcatggccaagttacagttgggacacttatattgcaggattgtgctgttggtctgctgtttgcgcttcttccaattttgagtggtacatctggccttcttcacggagttgcatcaatgacgaagtcgttggtggtattgataacgttcctgaccattctctctatcctctcccgcacgggcgttccttggtttcttaaactgatgataagtctgtcatcacagacaaatgaactataccagctggcagcggttgcgttctgcttgttatttgcttggtgtagtgataagctgggcctgagtctcgagttgggttcatttgcagctggagtaatgatatcaacaacagaccttgcgcaacatactcttgaacaacggtaattttggtgatcaccgtaaagacatttattgttgctattgtcgtaaaagggtttgggtatagcaacaaaacatctcttcttgtcggcatgtctcttgcacaaataggagagtttgcttttgttctcctaagccgtgcttcaagtatccatctcatcgagggcaagctatacctgcttcttcttggaaccactgcactcagtttggtgacaacccctctgctattcaaaatgatcccagcagtggtccacctcggggttcttttgagatggttttctgtcgataccaatcagctgggcctaaaaaatgatgtcctccgcattgatagcggcaagcgcataaatctgatagtccaaggctcacatgactcatgacacatggcacactgcaagctacttttttgtatggcttgagtttacaagctctgtaaagtgttttcacctgtattgaagagtttgtagcagatatacaagggtggaggcaagagaactcaactcagatcttgctcatagggtgagatcaatcctcccccatcatggagactgcatgggcagttgggtttgccgtttttgagagcagtgtgtctaggatgattggtggagtgagtggctgtcgaccccaaatgagggtctcgtgtaacataagaatgtatgatggttaattgattggatcagcatgataggatctaggcgtgatcgttatgccattgtatcctttcagcaaaactgtgtatcctcgcaacacgaaagtgtgtacaacagtatccatcagatcacgaatttcgttatgtaaccatatactcgtcctagttcatgattttttttcacgcgaggcttctagtaacctgtctatatatcactttgttggattcaggctcacaatgatgggtgtgcctcaacgaattgattgaatccattttattatgcgtggtcccgt

SEQ ID NO: 80038 - DNA, 2592 bp, Zea Mays
acacaatacgcacacttcgcaaagcgtcttcctccgaccccatcgcctctgtggcttcctggctgtctgactgcgtctgcctggtcgtacgcgagcgcgtgcgtcccttcaccgtcacgagcggcgcacaccgtcaccgccacgctccgtcgccttccagaaaatctaaaccccagcggagccggccacggccagtcagccctcacacggactccgacgcgctgcccgctcgcctgccaaacccccaccccctcgccggcgatgctgccgcgtcggtttagcaaccacccgggctcctcctcacccctcccgttcctcgtcgtctgcggcctgctcctcgctgcggccgtagcattttccccggtcgctgccgccgaggccgctggccgcggcggcggcggcggcggcggcggcgctgggcacgagggccgcgcggggaagccggaggtcgaggcggaggcggaggcgcgcggggatggggtggccgtggcggaggccggcggcgaggtggtggctcagggcaatgccacggaggccaaggagggcagcctcgccgacatgatcgaccgcgcgctggagaaggagttcccggagtccgagagcgagcagggcggcggagagaccgatcctggtagcttcaacaacacggtagctgagaagcagggagttcttgaaactgtagctagaagagtaacaaagaagaatgaaaccaaagataacaagtcatttccttttaaggaggtcttcttggatcgatctgagcaagaagatgttcccacattgattgatcggaaggacaatgtttttatcatatcaaacccaaagtcaaaataccctgtgctgcagctggaccttagattgatatcagatcttgttgttgttatcgtgtctgctacatgtggtggaatcgcttttgcttgccttgggcaacctgtgattacaggttatctacttgcaggatctataattgggcctggaggttttagctttgtcaatgaaatggtgcaagttgaaacggtagcccagtttggtgtgatatttctcctgtttgcattgggacttgagttttctactgcaaaacttcgagttgttcgtgctgttgctgttctcggaggaatgctccaaattatgctgttcatgtttctttgtggtattttggctacactatgtggaggcaaaacaaaagaaggtgtttttgttggtgtgcttctctccatgtcttcaacagctgtggttttaaagtttctgatggaaagaaatagtatcaatgctcttcatggccaagttacagttgggacacttatattgcaggattgtgctgttggtctgctgtttgcgcttcttccaattttgagtggtacatctggccttcttcacggagttgcatcaatgacgaagtcgttggtggtattgataacgttcctgaccattctctctatcctctcccgcacgggcgttccttggtttcttaaactgatgataagtctgtcatcacagacaaatgaactataccagctggcagcggttgcgttctgcttgttatttgcttggtgtagtgataagctgggcctgagtctcgagttgggttcatttgcagctggagtaatgatatcaacaacagaccttgcgcaacatactcttgaacaacggtaattttggtgatcaccgtaaagacatttattgttgctattgtcgtaaaagggtttgggtatagcaacaaaacatctcttcttgtcggcatgtctcttgcacaaataggagagtttgcttttgttctcctaagccgtgcttcaagtatccatctcatcgagggcaagctatacctgcttcttcttggaaccactgcactcagtttggtgacaacccctctgctattcaaaatgatcccagcagtggtccacctcggggttcttttgagatggttttctgtcgataccaatcaggtggagctgggcctaaaaaatgatgtcctccgcattgatagcggcaagcgcataaatctgatagtccaaggctcacatgactcatgacacatggcacactgcaagctacttttttgtatggcttgagtttacaagctctgtaaagtgttttcacctgtattgaagagtttgtagcagatatacaagggtggaggcaagagaactcaactcagatcttgctcatagggtgagatcaatcctcccccatcatggagactgcatgggcagttgggtttgccgtttttgagagcagtgtgtctaggatgattggtggagtgagtggctgtcgaccccaaatgagggtctcgtgtaacataagaatgtatgatggttaattgattggatcagcatgataggatctaggcgtgatcgttatgccattgtatcctttcagcaaaactgtgtatcctcgcaacacgaaagtgtgtacaacagtatccatcagatcacgaatttcgttatgtaaccatatactcgtcctagttcatgattttttttcacgcgaggcttctagtaacctgtctatatatcactttgttggattcaggctcacaatgatgggtgtgcctcaacgaattgattgaatccattttattatgcgtggtcccgt

SEQ ID NO: 80039 - DNA, 2706 bp, Zea Mays
acacaatacgcacacttcgcaaagcgtcttcctccgaccccatcgcctctgtggcttcctggctgtctgactgcgtctgcctggtcgtacgcgagcgcgtgcgtcccttcaccgtcacgagcggcgcacaccgtcaccgccacgctccgtcgccttccagaaaatctaaaccccagcggagccggccacggccagtcagccctcacacggactccgacgcgctgcccgctcgcctgccaaacccccaccccctcgccggcgatgctgccgcgtcggtttagcaaccacccgggctcctcctcacccctcccgttcctcgtcgtctgcggcctgctcctcgctgcggccgtagcattttccccggtcgctgccgccgaggccgctggccgcggcggcggcggcggcggcggcggcgctgggcacgagggccgcgcggggaagccggaggtcgaggcggaggcggaggcgcgcggggatggggtggccgtggcggaggccggcggcgaggtggtggctcagggcaatgccacggaggccaaggagggcagcctcgccgacatgatcgaccgcgcgctggagaaggagttcccggagtccgagagcgagcagggcggcggagagaccgatcctggtagcttcaacaacacggtagctgagaagcagggagttcttgaaactgtagctagaagagtaacaaagaagaatgaaaccaaagataacaagtcatttccttttaaggaggtcttcttggatcgatctgagcaagaagatgttcccacattgattgatcggaaggacaatgtttttatcatatcaaacccaaagtcaaaataccctgtgctgcagctggaccttagattgatatcagatcttgttgttgttatcgtgtctgctacatgtggtggaatcgcttttgcttgccttgggcaacctgtgattacaggttatctacttgcaggatctataattgggcctggaggttttagctttgtcaatgaaatggtgcaagttgaaacggtagcccagtttggtgtgatatttctcctgtttgcattgggacttgagttttctactgcaaaacttcgagttgttcgtgctgttgctgttctcggaggaatgctccaaattatgctgttcatgtttctttgtggtattttggctacactatgtggaggcaaaacaaaagaaggtgtttttgttggtgtgcttctctccatgtcttcaacagctgtggttttaaagtttctgatggaaagaaatagtatcaatgctcttcatggccaagttacagttgggacacttatattgcaggattgtgctgttggtctgctgtttgcgcttcttccaattttgagtggtacatctggccttcttcacggagttgcatcaatgacgaagtcgttggtggtattgataacgttcctgaccattctctctatcctctcccgcacgggcgttccttggtttcttaaactgatgataagtctgtcatcacagacaaatgaactataccagctggcagcggttgcgttctgcttgttatttgcttggtgtagtgataagctgggcctgagtctcgagttgggttcatttgcagctggagtaatgatatcaacaacagaccttgcgcaacatactcttgaacaagtttgttctttctgcagatcgaacctatccgcaacttattcgctgctcttttccttgccagcattgggatgctaattaatgtccatttcttgtggaaccatgtggatatactccttgcagcggtaattttggtgatcaccgtaaagacatttattgttgctattgtcgtaaaagggtttgggtatagcaacaaaacatctcttcttgtcggcatgtctcttgcacaaataggagagtttgcttttgttctcctaagccgtgcttcaagtatccatctcatcgagggcaagctatacctgcttcttcttggaaccactgcactcagtttggtgacaacccctctgctattcaaaatgatcccagcagtggtccacctcggggttcttttgagatggttttctgtcgataccaatcagctgggcctaaaaaatgatgtcctccgcattgatagcggcaagcgcataaatctgatagtccaaggctcacatgactcatgacacatggcacactgcaagctacttttttgtatggcttgagtttacaagctctgtaaagtgttttcacctgtattgaagagtttgtagcagatatacaagggtggaggcaagagaactcaactcagatcttgctcatagggtgagatcaatcctcccccatcatggagactgcatgggcagttgggtttgccgtttttgagagcagtgtgtctaggatgattggtggagtgagtggctgtcgaccccaaatgagggtctcgtgtaacataagaatgtatgatggttaattgattggatcagcatgataggatctaggcgtgatcgttatgccattgtatcctttcagcaaaactgtgtatcctcgcaacacgaaagtgtgtacaacagtatccatcagatcacgaatttcgttatgtaaccatatactcgtcctagttcatgattttttttcacgcgaggcttctagtaacctgtctatatatcactttgttggattcaggctcacaatgatgggtgtgcctcaacgaattgattgaatccattttattatgcgtggtcccgt

SEQ ID NO: 80040 - DNA, 2712 bp, Zea Mays
acacaatacgcacacttcgcaaagcgtcttcctccgaccccatcgcctctgtggcttcctggctgtctgactgcgtctgcctggtcgtacgcgagcgcgtgcgtcccttcaccgtcacgagcggcgcacaccgtcaccgccacgctccgtcgccttccagaaaatctaaaccccagcggagccggccacggccagtcagccctcacacggactccgacgcgctgcccgctcgcctgccaaacccccaccccctcgccggcgatgctgccgcgtcggtttagcaaccacccgggctcctcctcacccctcccgttcctcgtcgtctgcggcctgctcctcgctgcggccgtagcattttccccggtcgctgccgccgaggccgctggccgcggcggcggcggcggcggcggcggcgctgggcacgagggccgcgcggggaagccggaggtcgaggcggaggcggaggcgcgcggggatggggtggccgtggcggaggccggcggcgaggtggtggctcagggcaatgccacggaggccaaggagggcagcctcgccgacatgatcgaccgcgcgctggagaaggagttcccggagtccgagagcgagcagggcggcggagagaccgatcctggtagcttcaacaacacggtagctgagaagcagggagttcttgaaactgtagctagaagagtaacaaagaagaatgaaaccaaagataacaagtcatttccttttaaggaggtcttcttggatcgatctgagcaagaagatgttcccacattgattgatcggaaggacaatgtttttatcatatcaaacccaaagtcaaaataccctgtgctgcagctggaccttagattgatatcagatcttgttgttgttatcgtgtctgctacatgtggtggaatcgcttttgcttgccttgggcaacctgtgattacaggttatctacttgcaggatctataattgggcctggaggttttagctttgtcaatgaaatggtgcaagttgaaacggtagcccagtttggtgtgatatttctcctgtttgcattgggacttgagttttctactgcaaaacttcgagttgttcgtgctgttgctgttctcggaggaatgctccaaattatgctgttcatgtttctttgtggtattttggctacactatgtggaggcaaaacaaaagaaggtgtttttgttggtgtgcttctctccatgtcttcaacagctgtggttttaaagtttctgatggaaagaaatagtatcaatgctcttcatggccaagttacagttgggacacttatattgcaggattgtgctgttggtctgctgtttgcgcttcttccaattttgagtggtacatctggccttcttcacggagttgcatcaatgacgaagtcgttggtggtattgataacgttcctgaccattctctctatcctctcccgcacgggcgttccttggtttcttaaactgatgataagtctgtcatcacagacaaatgaactataccagctggcagcggttgcgttctgcttgttatttgcttggtgtagtgataagctgggcctgagtctcgagttgggttcatttgcagctggagtaatgatatcaacaacagaccttgcgcaacatactcttgaacaagtttgttctttctgcagatcgaacctatccgcaacttattcgctgctcttttccttgccagcattgggatgctaattaatgtccatttcttgtggaaccatgtggatatactccttgcagcggtaattttggtgatcaccgtaaagacatttattgttgctattgtcgtaaaagggtttgggtatagcaacaaaacatctcttcttgtcggcatgtctcttgcacaaataggagagtttgcttttgttctcctaagccgtgcttcaagtatccatctcatcgagggcaagctatacctgcttcttcttggaaccactgcactcagtttggtgacaacccctctgctattcaaaatgatcccagcagtggtccacctcggggttcttttgagatggttttctgtcgataccaatcaggtggagctgggcctaaaaaatgatgtcctccgcattgatagcggcaagcgcataaatctgatagtccaaggctcacatgactcatgacacatggcacactgcaagctacttttttgtatggcttgagtttacaagctctgtaaagtgttttcacctgtattgaagagtttgtagcagatatacaagggtggaggcaagagaactcaactcagatcttgctcatagggtgagatcaatcctcccccatcatggagactgcatgggcagttgggtttgccgtttttgagagcagtgtgtctaggatgattggtggagtgagtggctgtcgaccccaaatgagggtctcgtgtaacataagaatgtatgatggttaattgattggatcagcatgataggatctaggcgtgatcgttatgccattgtatcctttcagcaaaactgtgtatcctcgcaacacgaaagtgtgtacaacagtatccatcagatcacgaatttcgttatgtaaccatatactcgtcctagttcatgattttttttcacgcgaggcttctagtaacctgtctatatatcactttgttggattcaggctcacaatgatgggtgtgcctcaacgaattgattgaatccattttattatgcgtggtcccgt

SEQ ID NO: 80041 - DNA, 2707 bp, Zea Mays
acacaatacgcacacttcgcaaagcgtcttcctccgaccccatcgcctctgtggcttcctggctgtctgactgcgtctgcctggtcgtacgcgagcgcgtgcgtcccttcaccgtcacgagcggcgcacaccgtcaccgccacgctccgtcgccttccagaaaatctaaaccccagcggagccggccacggccagtcagccctcacacggactccgacgcgctgcccgctcgcctgccaaacccccaccccctcgccggcgatgctgccgcgtcggtttagcaaccacccgggctcctcctcacccctcccgttcctcgtcgtctgcggcctgctcctcgctgcggccgtagcattttccccggtcgctgccgccgaggccgctggccgcggcggcggcggcggcggcggcggcgctgggcacgagggccgcgcggggaagccggaggtcgaggcggaggcggaggcgcgcggggatggggtggccgtggcggaggccggcggcgaggtggtggctcagggcaatgccacggaggccaaggagggcagcctcgccgacatgatcgaccgcgcgctggagaaggagttcccggagtccgagagcgagcagggcggcggagagaccgatcctggtagcttcaacaacacggtagctgagaagcagggagttcttgaaactgtagctagaagagtaacaaagaagaatgaaaccaaagataacaagtcatttccttttaaggaggtcttcttggatcgatctgagcaagaagatgttcccacattgattgatcggaaggacaatgtttttatcatatcaaacccaaagtcaaaataccctgtgctgcagctggaccttagattgatatcagatcttgttgttgttatcgtgtctgctacatgtggtggaatcgcttttgcttgccttgggcaacctgtgattacaggttatctacttgcaggatctataattgggcctggaggttttagctttgtcaatgaaatggtgcaagttgaaacggtagcccagtttggtgtgatatttctcctgtttgcattgggacttgagttttctactgcaaaacttcgagttgttcgtgctgttgctgttctcggaggaatgctccaaattatgctgttcatgtttctttgtggtattttggctacactatgtggaggcaaaacaaaagaaggtgtttttgttggtgtgcttctctccatgtcttcaacagctgtggttttaaagtttctgatggaaagaaatagtatcaatgctcttcatggccaagttacagttgggacacttatattgcaggattgtgctgttggtctgctgtttgcgcttcttccaattttgagtggtacatctggccttcttcacggagttgcatcaatgacgaagtcgttggtggtattgataacgttcctgaccattctctctatcctctcccgcacgggcgttccttggtttcttaaactgatgataagtctgtcatcacagacaaatgaactataccagctggcagcggttgcgttctgcttgttatttgcttggtgtagtgataagctgggcctgagtctcgagttgggttcatttgcagctggagtaatgatatcaacaacagaccttgcgcaacatactcttgaacaagtttgttctttctgcagatcgaacctatccgcaacttattcgctgctcttttccttgccagcattgggatgctaattaatgtccatttcttgtggaaccatgtggatatactccttgcagcggtaattttggtgatcaccgtaaagacatttattgttgctattgtcgtaaaagggtttgggtatagcaacaaaacatctcttcttgtcggcatgtctcttgcacaaataggagagtttgcttttgttctcctaagccgtgcttcaagtatccatctcatcgagggcaagctatacctgcttcttcttggaaccactgcactcagtgacaacccctctgctattcaaaatgatcccagcagtggtccacctcggggttcttttgagatggttttctgtcgataccaatcaggtggagctgggcctaaaaaatgatgtcctccgcattgatagcggcaagcgcataaatctgatagtccaaggctcacatgactcatgacacatggcacactgcaagctacttttttgtatggcttgagtttacaagctctgtaaagtgttttcacctgtattgaagagtttgtagcagatatacaagggtggaggcaagagaactcaactcagatcttgctcatagggtgagatcaatcctcccccatcatggagactgcatgggcagttgggtttgccgtttttgagagcagtgtgtctaggatgattggtggagtgagtggctgtcgaccccaaatgagggtctcgtgtaacataagaatgtatgatggttaattgattggatcagcatgataggatctaggcgtgatcgttatgccattgtatcctttcagcaaaactgtgtatcctcgcaacacgaaagtgtgtacaacagtatccatcagatcacgaatttcgttatgtaaccatatactcgtcctagttcatgattttttttcacgcgaggcttctagtaacctgtctatatatcactttgttggattcaggctcacaatgatgggtgtgcctcaacgaattgattgaatccattttattatgcgtggtcccgt

SEQ ID NO: 80042 - DNA, 2651 bp, Zea Mays
acacaatacgcacacttcgcaaagcgtcttcctccgaccccatcgcctctgtggcttcctggctgtctgactgcgtctgcctggtcgtacgcgagcgcgtgcgtcccttcaccgtcacgagcggcgcacaccgtcaccgccacgctccgtcgccttccagaaaatctaaaccccagcggagccggccacggccagtcagccctcacacggactccgacgcgctgcccgctcgcctgccaaacccccaccccctcgccggcgatgctgccgcgtcggtttagcaaccacccgggctcctcctcacccctcccgttcctcgtcgtctgcggcctgctcctcgctgcggccgtagcattttccccggtcgctgccgccgaggccgctggccgcggcggcggcggcggcggcggcggcgctgggcacgagggccgcgcggggaagccggaggtcgaggcggaggcggaggcgcgcggggatggggtggccgtggcggaggccggcggcgaggtggtggctcagggcaatgccacggaggccaaggagggcagcctcgccgacatgatcgaccgcgcgctggagaaggagttcccggagtccgagagcgagcagggcggcggagagaccgatcctggtagcttcaacaacacggtagctgagaagcagggagttcttgaaactgtagctagaagagtaacaaagaagaatgaaaccaaagataacaagtcatttccttttaaggaggtcttcttggatcgatctgagcaagaagatgttcccacattgattgatcggaaggacaatgtttttatcatatcaaacccaaagtcaaaataccctgtgctgcagctggaccttagattgatatcagatcttgttgttgttatcgtgtctgctacatgtggtggaatcgcttttgcttgccttgggcaacctgtgattacaggttatctacttgcaggatctataattgggcctggaggttttagctttgtcaatgaaatggtgcaagttgaaacggtagcccagtttggtgtgatatttctcctgtttgcattgggacttgagttttctactgcaaaacttcgagttgttcgtgctgttgctgttctcggaggaatgctccaaattatgctgttcatgtttctttgtggtattttggctacactatgtggaggcaaaacaaaagaaggtgtttttgttggtgtgcttctctccatgtcttcaacagctgtggttttaaagtttctgatggaaagaaatagtatcaatgctcttcatggccaagttacagttgggacacttatattgcaggattgtgctgttggtctgctgtttgcgcttcttccaattttgagtggtacatctggccttcttcacggagttgcatcaatgacgaagtcgttggtggtattgataacgttcctgaccattctctctatcctctcccgcacgggcgttccttggtttcttaaactgatgataagtctgtcatcacagacaaatgaactataccagctggcagcggttgcgttctgcttgttatttgcttggtgtagtgataagctgggcctgagtctcgagttgggttcatttgcagctggagtaatgatatcaacaacagaccttgcgcaacatactcttgaacaacattgggatgctaattaatgtccatttcttgtggaaccatgtggatatactccttgcagcggtaattttggtgatcaccgtaaagacatttattgttgctattgtcgtaaaagggtttgggtatagcaacaaaacatctcttcttgtcggcatgtctcttgcacaaataggagagtttgcttttgttctcctaagccgtgcttcaagtatccatctcatcgagggcaagctatacctgcttcttcttggaaccactgcactcagtttggtgacaacccctctgctattcaaaatgatcccagcagtggtccacctcggggttcttttgagatggttttctgtcgataccaatcaggtggagctgggcctaaaaaatgatgtcctccgcattgatagcggcaagcgcataaatctgatagtccaaggctcacatgactcatgacacatggcacactgcaagctacttttttgtatggcttgagtttacaagctctgtaaagtgttttcacctgtattgaagagtttgtagcagatatacaagggtggaggcaagagaactcaactcagatcttgctcatagggtgagatcaatcctcccccatcatggagactgcatgggcagttgggtttgccgtttttgagagcagtgtgtctaggatgattggtggagtgagtggctgtcgaccccaaatgagggtctcgtgtaacataagaatgtatgatggttaattgattggatcagcatgataggatctaggcgtgatcgttatgccattgtatcctttcagcaaaactgtgtatcctcgcaacacgaaagtgtgtacaacagtatccatcagatcacgaatttcgttatgtaaccatatactcgtcctagttcatgattttttttcacgcgaggcttctagtaacctgtctatatatcactttgttggattcaggctcacaatgatgggtgtgcctcaacgaattgattgaatccattttattatgcgtggtcccgt

SEQ ID NO: 80043 - DNA, 2824 bp, Zea Mays
acacaatacgcacacttcgcaaagcgtcttcctccgaccccatcgcctctgtggcttcctggctgtctgactgcgtctgcctggtcgtacgcgagcgcgtgcgtcccttcaccgtcacgagcggcgcacaccgtcaccgccacgctccgtcgccttccagaaaatctaaaccccagcggagccggccacggccagtcagccctcacacggactccgacgcgctgcccgctcgcctgccaaacccccaccccctcgccggcgatgctgccgcgtcggtttagcaaccacccgggctcctcctcacccctcccgttcctcgtcgtctgcggcctgctcctcgctgcggccgtagcattttccccggtcgctgccgccgaggccgctggccgcggcggcggcggcggcggcggcggcgctgggcacgagggccgcgcggggaagccggaggtcgaggcggaggcggaggcgcgcggggatggggtggccgtggcggaggccggcggcgaggtggtggctcagggcaatgccacggaggccaaggagggcagcctcgccgacatgatcgaccgcgcgctggagaaggagttcccggagtccgagagcgagcagggcggcggagagaccgatcctggtagcttcaacaacacggtagctgagaagcagggagttcttgaaactgtagctagaagagtaacaaagaagaatgaaaccaaagataacaagtcatttccttttaaggaggtcttcttggatcgatctgagcaagaagatgttcccacattgattgatcggaaggtgcaatcacatccgctggatggaattttctgtcaagttactgcacatgtggcatacatgttgggcatagtgttgtggacatgttgtgactgttttttaattacagttttctgttaatccaatctttaccccaggacaatgtttttatcatatcaaacccaaagtcaaaataccctgtgctgcagctggaccttagattgatatcagatcttgttgttgttatcgtgtctgctacatgtggtggaatcgcttttgcttgccttgggcaacctgtgattacaggttatctacttgcaggatctataattgggcctggaggttttagctttgtcaatgaaatggtgcaagttgaaacggtagcccagtttggtgtgatatttctcctgtttgcattgggacttgagttttctactgcaaaacttcgagttgttcgtgctgttgctgttctcggaggaatgctccaaattatgctgttcatgtttctttgtggtattttggctacactatgtggaggcaaaacaaaagaaggtgtttttgttggtgtgcttctctccatgtcttcaacagctgtggttttaaagtttctgatggaaagaaatagtatcaatgctcttcatggccaagttacagttgggacacttatattgcaggattgtgctgttggtctgctgtttgcgcttcttccaattttgagtggtacatctggccttcttcacggagttgcatcaatgacgaagtcgttggtggtattgataacgttcctgaccattctctctatcctctcccgcacgggcgttccttggtttcttaaactgatgataagtctgtcatcacagacaaatgaactataccagctggcagcggttgcgttctgcttgttatttgcttggtgataagctgggcctgagtctcgagttgggttcatttgcagctggagtaatgatatcaacaacagaccttgcgcaacatactcttgaacaaatcgaacctatccgcaacttattcgctgctcttttccttgccagcattgggatgctaattaatgtccatttcttgtggaaccatgtggatatactccttgcagcggtaattttggtgatcaccgtaaagacatttattgttgctattgtcgtaaaagggtttgggtatagcaacaaaacatctcttcttgtcggcatgtctcttgcacaaataggagagtttgcttttgttctcctaagccgtgcttcaagtatccatctcatcgagggcaagctatacctgcttcttcttggaaccactgcactcagtttggtgacaacccctctgctattcaaaatgatcccagcagtggtccacctcggggttcttttgagatggttttctgtcgataccaatcaggtggagctgggcctaaaaaatgatgtcctccgcattgatagcggcaagcgcataaatctgatagtccaaggctcacatgactcatgacacatggcacactgcaagctacttttttgtatggcttgagtttacaagctctgtaaagtgttttcacctgtattgaagagtttgtagcagatatacaagggtggaggcaagagaactcaactcagatcttgctcatagggtgagatcaatcctcccccatcatggagactgcatgggcagttgggtttgccgtttttgagagcagtgtgtctaggatgattggtggagtgagtggctgtcgaccccaaatgagggtctcgtgtaacataagaatgtatgatggttaattgattggatcagcatgataggatctaggcgtgatcgttatgccattgtatcctttcagcaaaactgtgtatcctcgcaacacgaaagtgtgtacaacagtatccatcagatcacgaatttcgttatgtaaccatatactcgtcctagttcatgattttttttcacgcgaggcttctagtaacctgtctatatatcactttgttggattcaggctcacaatgatgggtgtgcctcaacgaattgattgaatccattttattatgcgtggtcccgt

SEQ ID NO: 80044 - DNA, 1634 bp, Zea Mays
cccatccatatgtcatcattgtatagcttttgggcactttgactttatatgatcattttgctttatgttgtttgatcggcattttcctagtgctgatgagggacatcaatatcttggatgttgtttatttcgtgctatgcttggcaatgttaagggcttatttgtttcggctttttttatgagcttttctgagaatctggttgtggggagaatttggttgtgagggagaatctgagtatcgtggggattacgtgcggaggaatatgaaggggtacatagtgtttaggatctaggaagtgacggattccttctatcgtgatgattcagccgattgtgtattcatgttgattttggacggttttcaccaaatcaattatcatagaagtgggctgaaaagctaggcgtttgtcagtccacagcacagtagcttctggcgaccagaatcaacaaaaaagctgaaacaaacatgcccgaagtatgactatatgcttgttgtgcacatgggagggagttcttgaaactgtagctagaagagtaacaaagaagaatgaaaccaaagataacaagtcatttccttttaaggaggtcttcttggatcgatctgagcaagaagatgttcccacattgattgatcggaaggacaatgtttttatcatatcaaacccaaagtcaaaataccctgtgctgcagctggaccttagattgatatcagatcttgttgttgttatcgtgtctgctacatgtggtggaatcgcttttgcttgccttgggcaacctgatctataattgggcctggaggttttagctttgtcaatgaaatggtgcaagttgaaacggtagcccagtttggtgtgatatttctcctgtttgcattgggacttgagttttctactgcaaaacttcgagttgttcgtgctgttgctgttctcggaggaatgctccaaattatgctgttcatgtttctttgtgctatgtggaggcaaaacaaaagaaggtgtttttgttggtgtgcttctctccatgtcttcaacagctgtggttttaaagtttctgatggaaagaaatagtatcaatgctcttcatggccaagttacagttgggacacttatattgcaggattgtgctgttggtctgctgtttgcgcttcttccaattttgagtggtacatctggccttcttcacggagttgcatcaatgacgaagtcgttggtggtattgataacgttcctgaccattctctctatcctctcccgcacgggcgttccttggtttcttaaactgatgataagtctgtcatcacagacaaatgaactataccagctggcagcggttgcgttctgcttgttatttgcttgggagattcggcttattttctggcttttaccgaagtacccatcccacttggaggatcgctggcatttgctatccacaacggcataaccaagaactgagcattgctgcccttttgccacccacaactacttttcccttgaacacgcaggagagctgctatttgccaattacctataagccagcgtacaagctgggttgccaaacaacaacaacaacaacaacaacaacaacaaagcctttttgggctagagttgaaatccaacaaaaaccacaagtcaagg

SEQ ID NO: 80045 - DNA, 2433 bp, Zea Mays
gtttatttcgtgctatgcttggcaatgttaagggcttatttgtttcggctttttttatgagcttttctgagaatctggttgtggggagaatttggttgtgagggagaatctgagtatcgtggggattacgtgcggaggaatatgaaggggtacatagtgtttaggatctaggaagtgacggattccttctatcgtgatgattcagccgattgtgtattcatgttgattttggacggttttcaccaaatcaattatcatagaagtgggctgaaaagctaggcgtttgtcagtccacagcacagtagcttctggcgaccagaatcaacaaaaaagctgaaacaaacatgcccgaagtatgactatatgcttgttgtgcacatgggagggagttcttgaaactgtagctagaagagtaacaaagaagaatgaaaccaaagataacaagtcatttccttttaaggaggtcttcttggatcgatctgagcaagaagatgttcccacattgattgatcggaaggacaatgtttttatcatatcaaacccaaagtcaaaataccctgtgctgcagctggaccttagattgatatcagatcttgttgttgttatcgtgtctgctacatgtggtggaatcgcttttgcttgccttgggcaacctgtgattacaggttatctacttgcaggatctataattgggcctggaggttttagctttgtcaatgaaatggtgcaagtaaggttgaaacggtagcccagtttggtgtgatatttctcctgtttgcattgggacttgagttttctactgcaaaacttcgagttgttcgtgctgttgctgttctcggaggaatgctccaaattatgctgttcatgtttctttgtggtattttggctacactatgtggaggcaaaacaaaagaaggtgtttttgttggtgtgcttctctccatgtcttcaacagctgtggttttaaagtttctgatggaaagaaatagtatcaatgctcttcatggccaagttacagttgggacacttatattgcaggattgtgctgttggtctgctgtttgcgcttcttccaattttgagtggtacatctggccttcttcacggagttgcatcaatgacgaagtcgttggtggtattgataacgttcctgaccattctctctatcctctcccgcacgggcgttccttggtttcttaaactgatgataagtctgtcatcacagacaaatgaactataccagctggcagcggttgcgttctgcttgttatttgcttggtgtagtgataagctgggcctgagtctcgagttgggttcatttgcagctggagtaatgatatcaacaacagaccttgcgcaacatactcttgaacaagtttgttctttctgcagatcgaacctatccgcaacttattcgctgctcttttccttgccagcattgggatgctaattaatgtccatttcttgtggaaccatgtggatatactccttgcagcggtaattttggtgatcaccgtaaagacatttattgttgctattgtcgtaaaagggtttgggtatagcaacaaaacatctcttcttgtcggcatgtctcttgcacaaataggagagtttgcttttgttctcctaagccgtgcttcaagtatccatctcatcgagggcaagctatacctgcttcttcttggaaccactgcactcagtttggtgacaacccctctgctattcaaaatgatcccagcagtggtccacctcggggttcttttgagatggttttctgtcgataccaatcagctgggcctaaaaaatgatgtcctccgcattgatagcggcaagcgcataaatctgatagtccaaggctcacatgactcatgacacatggcacactgcaagctacttttttgtatggcttgagtttacaagctctgtaaagtgttttcacctgtattgaagagtttgtagcagatatacaagggtggaggcaagagaactcaactcagatcttgctcatagggtgagatcaatcctcccccatcatggagactgcatgggcagttgggtttgccgtttttgagagcagtgtgtctaggatgattggtggagtgagtggctgtcgaccccaaatgagggtctcgtgtaacataagaatgtatgatggttaattgattggatcagcatgataggatctaggcgtgatcgttatgccattgtatcctttcagcaaaactgtgtatcctcgcaacacgaaagtgtgtacaacagtatccatcagatcacgaatttcgttatgtaaccatatactcgtcctagttcatgattttttttcacgcgaggcttctagtaacctgtctatatatcactttgttggattcaggctcacaatgatgggtgtgcctcaacgaattgattgaatccattttattatgcgtggtcccgt

SEQ ID NO: 80046 - DNA, 2209 bp, Zea Mays
attgtgtattcatgttgattttggacggttttcaccaaatcaattatcatagaagtgggctgaaaagctaggcgtttgtcagtccacagcacagtagcttctggcgaccagaatcaacaaaaaagctgaaacaaacatgcccgaagtatgactatatgcttgttgtgcacatgggagggagttcttgaaactgtagctagaagagtaacaaagaagaatgaaaccaaagataacaagtcatttccttttaaggaggtcttcttggatcgatctgagcaagaagatgttcccacattgattgatcggaaggacaatgtttttatcatatcaaacccaaagtcaaaataccctgtgctgcagctggaccttagattgatatcagatcttgttgttgttatcgtgtctgctacatgtggtggaatcgcttttgcttgccttgggcaacctgtgattacaggttatctacttgcaggatctataattgggcctggaggttttagctttgtcaatgaaatggtgcaagttgaaacggtagcccagtttggtgtgatatttctcctgtttgcattgggacttgagttttctactgcaaaacttcgagttgttcgtgctgttgctgttctcggaggaatgctccaaattatgctgttcatgtttctttgtggtattttggctacactatgtggaggcaaaacaaaagaaggtgtttttgttggtgtgcttctctccatgtcttcaacagctgtggttttaaagtttctgatggaaagaaatagtatcaatgctcttcatggccaagttacagttgggacacttatattgcaggattgtgctgttggtctgctgtttgcgcttcttccaattttgagtggtacatctggccttcttcacggagttgcatcaatgacgaagtcgttggtggtattgataacgttcctgaccattctctctatcctctcccgcacgggcgttccttggtttcttaaactgatgataagtctgtcatcacagacaaatgaactataccagctggcagcggttgcgttctgcttgttatttgcttggtgtagtgataagctgggcctgagtctcgagttgggttcatttgcagctggagtaatgatatcaacaacagaccttgcgcaacatactcttgaacaaatcgaacctatccgcaacttattcgctgctcttttccttgccagcattgggatgctaattaatgtccatttcttgtggaaccatgtggatatactccttgcagcggtaattttggtgatcaccgtaaagacatttattgttgctattgtcgtaaaagggtttgggtatagcaacaaaacatctcttcttgtcggcatgtctcttgcacaaataggagagtttgcttttgttctcctaagccgtgcttcaagtatccatctcatcgagggcaagctatacctgcttcttcttggaaccactgcactcagtttggtgacaacccctctgctattcaaaatgatcccagcagtggtccacctcggggttcttttgagatggttttctgtcgataccaatcaggtggagctgggcctaaaaaatgatgtcctccgcattgatagcggcaagcgcataaatctgatagtccaaggctcacatgactcatgacacatggcacactgcaagctacttttttgtatggcttgagtttacaagctctgtaaagtgttttcacctgtattgaagagtttgtagcagatatacaagggtggaggcaagagaactcaactcagatcttgctcatagggtgagatcaatcctcccccatcatggagactgcatgggcagttgggtttgccgtttttgagagcagtgtgtctaggatgattggtggagtgagtggctgtcgaccccaaatgagggtctcgtgtaacataagaatgtatgatggttaattgattggatcagcatgataggatctaggcgtgatcgttatgccattgtatcctttcagcaaaactgtgtatcctcgcaacacgaaagtgtgtacaacagtatccatcagatcacgaatttcgttatgtaaccatatactcgtcctagttcatgattttttttcacgcgaggcttctagtaacctgtctatatatcactttgttggattcaggctcacaatgatgggtgtgcctcaacgaattgattgaatccattttattatgcgtggtcccgt

SEQ ID NO: 80047 - DNA, 2101 bp, Zea Mays
caaatcaattatcatagaagtgggctgaaaagctaggcgtttgtcagtccacagcacagtagcttctggcgaccagaatcaacaaaaaagctgaaacaaacatgcccgaagtatgactatatgcttgttgtgcacatgggagggagttcttgaaactgtagctagaagagtaacaaagaagaatgaaaccaaagataacaagtcatttccttttaaggaggtcttcttggatcgatctgagcaagaagatgttcccacattgattgatcggaaggacaatgtttttatcatatcaaacccaaagtcaaaataccctgtgctgcagctggaccttagattgatatcagatcttgttgttgttatcgtgtctgctacatgtggtggaatcgcttttgcttgccttgggcaacctgtgattacaggttatctacttgcaggatctataattgggcctggaggttttagctttgtcaatgaaatggtgcaagtaaggttgaaacggtagcccagtttggtgtgatatttctcctgtttgcattgggacttgagttttctactgcaaaactatgtggaggcaaaacaaaagaaggtgtttttgttggtgtgcttctctccatgtcttcaacagctgtggttttaaagtttctgatggaaagaaatagtatcaatgctcttcatggccaagttacagttgggacacttatattgcaggattgtgctgttggtctgctgtttgcgcttcttccaattttgagtggtacatctggccttcttcacggagttgcatcaatgacgaagtcgttggtggtattgataacgttcctgaccattctctctatcctctcccgcacgggcgttccttggtttcttaaactgatgataagtctgtcatcacagacaaatgaactataccagctggcagcggttgcgttctgcttgttatttgcttggtgtagtgataagctgggcctgagtctcgagttgggttcatttgcagctggagtaatgatatcaacaacagaccttgcgcaacatactcttgaacaagtttgttctttctgcagatcgaacctatccgcaacttattcgctgctcttttccttgccagcattgggatgctaattaatgtccatttcttgtggaaccatgtggatatactccttgcagcggtaattttggtgatcaccgtaaagacatttattgttgctattgtcgtaaaagggtttgggtatagcaacaaaacatctcttcttgtcggcatgtctcttgcacaaataggagagtttgcttttgttctcctaagccgtgcttcaagtatccatctcatcgagggcaagctatacctgcttcttcttggaaccactgcactcagtgacaacccctctgctattcaaaatgatcccagcagtggtccacctcggggttcttttgagatggttttctgtcgataccaatcagctgggcctaaaaaatgatgtcctccgcattgatagcggcaagcgcataaatctgatagtccaaggctcacatgactcatgacacatggcacactgcaagctacttttttgtatggcttgagtttacaagctctgtaaagtgttttcacctgtattgaagagtttgtagcagatatacaagggtggaggcaagagaactcaactcagatcttgctcatagggtgagatcaatcctcccccatcatggagactgcatgggcagttgggtttgccgtttttgagagcagtgtgtctaggatgattggtggagtgagtggctgtcgaccccaaatgagggtctcgtgtaacataagaatgtatgatggttaattgattggatcagcatgataggatctaggcgtgatcgttatgccattgtatcctttcagcaaaactgtgtatcctcgcaacacgaaagtgtgtacaacagtatccatcagatcacgaatttcgttatgtaaccatatactcgtcctagttcatgattttttttcacgcgaggcttctagtaacctgtctatatatcactttgttggattcaggctcacaatgatgggtgtgcctcaacgaattgattgaatccattttattatgcgtggtcccgt

SEQ ID NO: 80048 - DNA, 1161 bp, Zea Mays
tatccttcttggctgcccccttgcatagtgataagctgggcctgagtctcgagttgggttcatttgcagctggagtaatgatatcaacaacagaccttgcgcaacatactcttgaacaaatcgaacctatccgcaacttattcgctgctcttttccttgccagcattgggatgctaattaatgtccatttcttgtggaaccatgtggatatactccttgcagcggtaattttggtgatcaccgtaaagacatttattgttgctattgtcgtaaaagggtttgggtatagcaacaaaacatctcttcttgtcggcatgtctcttgcacaaataggagagtttgcttttgttctcctaagccgtgcttcaagtatccatctcatcgagggcaagctatacctgcttcttcttggaaccactgcactcagtttggtgacaacccctctgctattcaaaatgatcccagcagtggtccacctcggggttcttttgagatggttttctgtcgataccaatcagctgggcctaaaaaatgatgtcctccgcattgatagcggcaagcgcataaatctgatagtccaaggctcacatgactcatgacacatggcacactgcaagctacttttttgtatggcttgagtttacaagctctgtaaagtgttttcacctgtattgaagagtttgtagcagatatacaagggtggaggcaagagaactcaactcagatcttgctcatagggtgagatcaatcctcccccatcatggagactgcatgggcagttgggtttgccgtttttgagagcagtgtgtctaggatgattggtggagtgagtggctgtcgaccccaaatgagggtctcgtgtaacataagaatgtatgatggttaattgattggatcagcatgataggatctaggcgtgatcgttatgccattgtatcctttcagcaaaactgtgtatcctcgcaacacgaaagtgtgtacaacagtatccatcagatcacgaatttcgttatgtaaccatatactcgtcctagttcatgattttttttcacgcgaggcttctagtaacctgtctatatatcactttgttggattcaggctcacaatgatgggtgtgcctcaacgaattgattgaatccattttattatgcgtggtcccgt

SEQ ID NO: 80049 - DNA, 1180 bp, Zea Mays
cgttcatcatttcatccccatgcctccggtgaattctgtagtgataagctgggcctgagtctcgagttgggttcatttgcagctggagtaatgatatcaacaacagaccttgcgcaacatactcttgaacaaatcgaacctatccgcaacttattcgctgctcttttccttgccagcattgggatgctaattaatgtccatttcttgtggaaccatgtggatatactccttgcagcggtaattttggtgatcaccgtaaagacatttattgttgctattgtcgtaaaagggtttgggtatagcaacaaaacatctcttcttgtcggcatgtctcttgcacaaataggagagtttgcttttgttctcctaagccgtgcttcaagtatccatctcatcgagggcaagctatacctgcttcttcttggaaccactgcactcagtttggtgacaacccctctgctattcaaaatgatcccagcagtggtccacctcggggttcttttgagatggttttctgtcgataccaatcaggtggagctgggcctaaaaaatgatgtcctccgcattgatagcggcaagcgcataaatctgatagtccaaggctcacatgactcatgacacatggcacactgcaagctacttttttgtatggcttgagtttacaagctctgtaaagtgttttcacctgtattgaagagtttgtagcagatatacaagggtggaggcaagagaactcaactcagatcttgctcatagggtgagatcaatcctcccccatcatggagactgcatgggcagttgggtttgccgtttttgagagcagtgtgtctaggatgattggtggagtgagtggctgtcgaccccaaatgagggtctcgtgtaacataagaatgtatgatggttaattgattggatcagcatgataggatctaggcgtgatcgttatgccattgtatcctttcagcaaaactgtgtatcctcgcaacacgaaagtgtgtacaacagtatccatcagatcacgaatttcgttatgtaaccatatactcgtcctagttcatgattttttttcacgcgaggcttctagtaacctgtctatatatcactttgttggattcaggctcacaatgatgggtgtgcctcaacgaattgattgaatccattttattatgcgtggtcccgt

SEQ ID NO: 80050 - DNA, 720 bp, Zea Mays
ttttccttcgtttggtatctttgccgaggctgtgcgattggccatctccccctcgcgctctcgtgccctcacacgaccttctgctccccgcactgttcgattctgtgtcctcgtgcccttctgtgtgctattccgctcccgcttctgctgccgtgcacaatcgttgccatcacggccgtcttcaccatgttcaggccgccgcgtgctcgtccaacgacgctcgtggaaaccagcgttctagagagtactctcgcttcacagatgcctctagacaggatccgaagccaggtcgttgggtgggggagatggaagactgcggtttggagccctacactgactgctacaggaggcttcggctttgggatgaaggtatgcgtgatatggagatataacccgaaggcaggatgaacggacgctgaagctgtggctgaaggagcttcgtcttagtataatgatgaaggtggaagatgaaaccgacctaaaggggaaaaactacttagtccttgatagcccgccttatgattatcagtaaatatcagggacatgaatgtaattttatccggactgcgccacgtgcttataaatagatgaacagtaacaccatactgttcacgctgaatggtaatcactctcgcgtcactcttgcattttcaccttctggcaagccgaaggtattgatgtaatataaataccattgatgtttatccatgtttgtaaaaa

SEQ ID NO: 80051 - DNA, 358 bp, Zea Mays
ttttccttcgtttggtatctttgccgaggctgtgcgattggccatctccccctcgcgctctcgtgccctcacacgaccttctgctccccgcactgttcgattctgtgtcctcgtgcccttctgtgtgctattccgctcccgcttctgctgccgtgcacaatcgttgccatcacggccgtcttcaccatgttcaggccgccgcgtgctcgtccaacgacgctcgtggaaaccagcgttctagagagtactctcgcttcacagatgcctctagacaggatccgaagccaggtcgttgggtgggggagatggaagactgcggtttggagccctacactgtgtaacatagactgctacagga

SEQ ID NO: 80052 - DNA, 822 bp, Zea Mays
ctagccaccgtcacatggggcccgcatggcggtagcgtcttctccgcaaagcacgcacgggaaaacagaaggcgtccgtagcgtccgggccgaaccgagcgggtctttgtcatcggcttccgggatccggctcgctcggggctatatagggcctagagcgccgcctctctctctgcttgcaaccacccaagaatcgtgtagcagaccaacgccagtgtgagagggggagaggtattccatgaccgccgccgtcaccgtgtcgcagcgttcttgtgccgaggggtggttgaggacaatccatgggcaacaagccgttggtggcctacgtgcgtagaggaaccccggtgattgtctgttcaactgcgcggatcgtgtcccgcccgcgtccgatggcgcagtgacatcatcggcgtcgacctcctcatccccacggagaagtacaagtggctcaggaggagccacacaacgaggagtttgattcgatctaggtggcgtctcccagttgactttctggcgccaacgatggattttagatcctgttatatttatcatttatttttgtaagtcttccactatgtaataaatactatgattattgtgacatttatctctatacactctgttattatatatgttgtcttctttggcgcatgtatgagatacacccggctttgtccctttaaaaccggggtgttacactatttcggtcctccagtcttcattatgtacaggtgagattgtgagcactgctctttccatgagctcgactgaaggtgcttttattgtttcaataaatacttccgaaggcaaagggagcccctt

SEQ ID NO: 80053 - DNA, 1834 bp, Zea Mays
ctagccaccgtcacatggggcccgcatggcggtagcgtcttctccgcaaagcacgcacgggaaaacagaaggcgtccgtagcgtccgggccgaaccgagcgggtctttgtcatcggcttccgggatccggctcgctcggggctatatagggcctagagcgccgcctctctctctgcttgcaaccacccaagaatcgtgtagcagaccaacgccagtgtgagagggggagaggtattccatgaccgccgccgtcaccgtgtcgcagcgttcttgtgccgaggggtggttgaggacaatccatgggcaacaagccgttggtggcctacgtgcgtagaggaaccccggtgattgtctgttcaactgcgcggatcgtgtcccgcccgcgtccgatggcgcagtgacatcatcggcgtcgacctcctcatccccacgtacggtcacgaggatccgaagaatcaccctggtaactggaatctcaagtgctaggcaagttgtgcccttgaccacttttgttacccaataatattctttattatcactattcatgcataggtttaattttgatgggacccaataggtcaccctagactggttattctttttaccttgtttatccctgaatcaattaggtagctatgctattgctttatatggttttaggataatatttcattacatccatgtaccaattattgtgttatgttatttatgttcatgataagatcattatgttaattggaacatggagcgaccacccggaaaaacagtgctaccacaagggtagtatgggatgcccttgactgattaactaggaaagctagtggatgactatcttacccgaaaggggcaagggcagtaggggagtggtcagtgtagggaggtccttgggttaattttactgtgatggtggtcaggcgagggattcctgcacatgagcttcctataaactgtagcgggttttctaaagctagtggaactttgtaaaggcctcgtagtgttaccctgcctcgcctccttggtagaggtgtatgggattcatgaccccttggcagatgggtaacatgacttgtgggtaaagatgcgcaacctctgcagagtgtaaaactgatatactagtcgtgctcacggtcatgagcagctcggaccctcacatgattaatctatggaattaaaactcaatttgtcttttgcatcgcattgggattattttattattaattttacttattattactaaggtttggtatttacttatacttagtaactgctaacaaaatttgaccaacttattaaaagcaatgctcagctttaacccctattgttgatcagctttacacatcacatgaactcccacctttggtgagttcatgccacattattccccataacttgttgagcgatgaacatgcgtgagctcacccttgctgtctcacaccccccacaggagaagtacaagtggctcaggaggagccacacaacgaggagtttgattcgatctaggtggcgtctcccagttgactttctggcgccaacgatggattttagatcctgttatatttatcatttatttttgtaagtcttccactatgtaataaatactatgattattgtgacatttatctctatacactctgttattatatatgttgtcttctttggcgcatgtatgagatacacccggctttgtccctttaaaaccggggtgttacactatttcggtcctccagtcttcattatgtacaggtgagattgtgagcactgctctttccatgagctcgactgaaggtgcttttattgtttcaataaatacttccgaaggcaaagggagcccctt

SEQ ID NO: 80054 - DNA, 5317 bp, Zea Mays
ctcgcatcggtcggtccgcgctgtggtgtcgggcatttctgatggatgcgatgagaaaaaaagaagtatatcgtcgaaaccggatccgcacgccgctggagccgctacagtgcacttccctgcataaaatgcgggtcagcctagcatacctacccggctggcagtgccgctagcccgctacagtgccctccatgcaaaatacagcgctcaagacaacagcagcgaatgccaatgccaattaataactagctactgtctcgtccgtccaggaaataggccggagaaggagacgcctcggcctctcattgctgggtgcgctccatgttagcggccgtaatggctgatagcggcgatgcggccatggccgttgttcttggctggtcgtcatcttggatctgcggggaagaggacggcgggcggctcaccctcaccgtcgcgtccaagtgcgtgcagaggacactcatagactgcgtcaatgtggtcctgttcatcgcgtacgtctgcacgctggctgccgcctgcgtcaggcggcggcagcgctctgcagatgcgagcagcgggaggagcggcgctcctagtaggtgggtgctgctcgtcgtctccacgtgctgcgtggcagctgccgtggcctactgtgtcacggctctccaagacgcctacgacatcaagacggcggttccttacttcgtcaggggcctggtctggatcgcgctggcggcctcgctgcacgcccagccgacgaggccggcgagggtcgtggccgtgctctggtgggtgctcttgtcgctgctggccaccgcgtacaattcggagatccttgccggggggcacagcctggacctcgcggagatgattgcgtggccggtgagcctcctcctgctgctctgcgccctcggctccctgctgccgcggggcgacgggcaccactaccgggacgcctccaacggcagcagcggcttgtcggagcctctgatcggcaatgacagaaccgtgccaacctcggagttgtaccgcgctggcctgttcggccagcttgccttctcgtggttgaaccctctgctccgtgtcggccgctccaaggcgctggacctcggcgacatcccgctcatcgccaccgacgacaccgcgcaccacacgtcgcagcagttcacggaggcctggagccgccacgtgagcgacaaagccaggagccgccggggcgtgggcagcaacagcctcgccctcgtcttgggcaagtgcttcctcagcgagatcctgctcaccggcttctacgccttcctgagaatgctgtccatagcagttgcccccctgctgctcttcgggttcgtgtggtacagcaaccaggaggaacgagacctccgggtcggcctgtcccttgtcggctgcctgctgctcgccaagctcgtggagtcgctgtcgcagcggcattggttcttcagctcgaggaggaccgggatgcgtatccggtcagcgctgatggcggtcatcttccagaagcagctcaggctgtccattcaggggaggaacaaccactccactggcgagattgtcaactacattgcggttgatgcgtaccggcttggcgacgccatcagctggctgcacatggggtggacctcgccacttcagctcgtctttgcagttgccacgctcttctgggcactcaagcttggggctcttcctggtctagtcccgctagtcatctttggtttcctcaacgtgccattcgcgaaaatgctgcaggggtaccaggccaagttcatggttgcacaggacgagaggctccggtccacgtcggagatactcaacagcatgaagatcatcaagctgcagtcgtgggaagacaagttccgcagcacgatcgagtcgctcagggacggcgagttcaaatggctgaggcagacccagatgaagaaggcctatggtgcagtcatgtactggatgtccccgacggtcgtctctgctgtcatgtacacagcaacggccatcatggggagtgctcccctgaatgctagcacgctcttcacggtcttggccaccctgagggtaatgtctgagccagtgaggatgcttccggaggtcctcacaatgatgatccagtacaaggtggcattagatcgaattgagaagttccttctcgaagacgagatcagagaggacgatgtgaaaagggtaccttcagatgactctggtgtcagagttcgagtccaagccggaaatttcagctggaaggcaagcggagctgatctgtcactgaggaatgttaaccttcgcgtgaaccgaggagagaaggtggccgtatgcggcccagttggctcagggaaatcttcactcctgtatgcattacttggggagataccaagattatcaggatcagttgaagtttttggttcagtagcatacgtttcacagagctcgtggatacagagtgggactgttcgtgacaacatactctttgggaagcctttcaacaaggaactgtatgataaggcgatcaaatcttgtgctctggacaaggatatcgaaaattttgaccatggagacctcacagagatcggtcagagaggactgaacatgagtggaggccagaagcaaaggattcagctggctcgagccgtctacagtgatgcagatgtttatctactggatgacccattcagtgcagttgatgcgcataccgctgcagtccttttctatgaatgtgtgatgacagcacttgcagagaagactgtcgtccttgtgacccaccaggttgaatttctgactgaaaccgataggattctggtaatggaaggtggtcaagttagtcaacaagggaaatattcagaactcctgggatctgggacagcatttgagaaactggtgtctgctcaccagtcttcgatcacagcattggataccagtgctagccaacagaaccaagttcaagggcaacaagagtctgatgaatacatagtgccaagtgcgcttcaggttataaggcaggccagcgacatcgacgtgaccgcaaagggcccttcagcagcaatacagcttacagaagaggaagagaagggcattggcgacctgggatggaagccatacaaagaatatataaatgtatccaagggggctttccaattctctggcatgtgtattgctcaagtgctcttcacgtgcttccagatcgcatccacatattggttggcagtggctgttcagatgggtaacgtcagtgctgcacttcttgttggggcatattctggactctctatcttcagctgcttctttgcctactttagaagctgttttgcggctattctgggtctcaaggcctccaaagcattctttggcgggctaatggactccgtattcaaggctcccatgtcattttttgactcaacaccagtgggaagaattttaacgagggcatcttcagatttgagcattctagacttcgacataccttactccatggcttttgtggcgacgggcggcattgaggttgttaccacagtactggtcatgggtactgtaacttggcaagtcctggttgtagcgatcccagttgctgtcaccatgatatatgttcagaggcactacgtttcctcagctagggagctagtaagactcaacggaacaacaaaggcacctgtaatgaactatgcatcagaatcaattctcggtgtggtgacgatcagggcatttgcagcaactgagaggtttatctacagcaacatgcagctcatcgacactgatgccacactgttcttccataccattgccgcacaagagtgggtactcataagagtagaggcactgcagtccttgacaataatcacagcagcattgttccttgttctggttcctccaggagcaatttctccgggctttgcaggactttgtctctcctatgctttgactttaacttcagcacaaatattcttgacaaggttctattcgtacttggaaaactacatcatctcggttgaacgaatcaagcagtatatgcacctcccagtggagccacctgccattataccagatagtagacctccaacttcgtggccgcaggagggaaggatagacctgcaagatttgaagataagataccgtccaaatgcgccgcttgtcctcaaaggaatcacttgcacttttgctgctgggaacaagattggggttgtagggaggacaggaagtggaaaatcaacacttatcagctcattgttccgtctcgttgatccggcgggtgggaggatacttattgacaagttggatatttgctccattggccttaaggatctaagaactaaactaagtattatccctcaagaacctacacttttcaggggaaccgtgcgcaacaatttggatccccttggccagcattctgatgaagagatatgggaggccttggagaagtgtcaactgaagacagcaatcagcaccacctctgctcttctggatacagttgtgagtgatgatggcgataactggagtgctggacagcgtcagctcttctgtcttggcagagttctcctacgcaggaacaaaattctagttctagacgaggcaacagcatccatcgactctgcaacagatgcaatcctgcagaaagtaatcaggcagcagttctcaagttgcacggttataaccatagctcacagggtaccaactgtgacagacagtgacaaggtcatggtcctgtcctacgggaagcttctagaatatgaaacaccagccaagctgttggaagacaaacaatcagcatttgctaaacttgtggctgagtattgggctaataccaagagaaattcaacatgatctaccattattgcaggacatgataaaagatatgatcattttaatcaagatatcgaaagattcaagggttctcaaattgaatctttaacaagacaaggaatgccatcatgattatttgattgatgtggttactgggagtgaataagatatcaacagaaattcaattttggtaatggaagcaatttttggagtgagggctgatgttcgagagaactccagctggttgattgaacatgtggtattcaatgcaaaatgaaatggaggatccacttctagcatgatcaatggcatttttcatacataagcctttttgaataagagaagcgaagtaccaagtcgtgaattgcaatgaagaatgagtaaagtgcagtgctgagaagaataattttcatgtatcttgtgtactcaataatgataaactttatatgactgagaaggaaactgtcgcaaattgtcaaagtgattattcaatagattagggctaacccaacaggttagctatatagtgttttac

SEQ ID NO: 80055 - DNA, 5207 bp, Zea Mays
ctacagtgccctccatgcaaaatacagcgctcaagacaacagcagcgaatgccaatgccaattaataactagctactgtctcgtccgtccaggaaataggccggagaaggagacgcctcggcctctcattgctgggtgcgctccatgttagcggccgtaatggctgatagcggcgatgcggccatggccgttgttcttggctggtcgtcatcttggatctgcggggaagaggacggcgggcggctcaccctcaccgtcgcgtccaagtgcgtgcagaggacactcatagactgcgtcaatgtggtcctgttcatcgcgtacgtctgcacgctggctgccgcctgcgtcaggcggcggcagcgctctgcagatgcgagcagcgggaggagcggcgctcctagtaggtgggtgctgctcgtcgtctccacgtgctgcgtggcagctgccgtggcctactgtgtcacggctctccaagacgcctacgacatcaagacggcggttccttacttcgtcaggggcctggtctggatcgcgctggcggcctcgctgcacgcccagccgacgaggccggcgagggtcgtggccgtgctctggtgggtgctcttgtcgctgctggccaccgcgtacaattcggagatccttgccggggggcacagcctggacctcgcggagatgattgcgtggccggtgagcctcctcctgctgctctgcgccctcggctccctgctgccgcggggcgacgggcaccactaccgggacgcctccaacggcagcagcggcttgtcggagcctctgatcggcaatgacagaaccgtgccaacctcggagttgtaccgcgctggcctgttcggccagcttgccttctcgtggttgaaccctctgctccgtgtcggccgctccaaggcgctggacctcggcgacatcccgctcatcgccaccgacgacaccgcgcaccacacgtcgcagcagttcacggaggcctggagccgccacgtgagcgacaaagccaggagccgccggggcgtgggcagcaacagcctcgccctcgtcttgggcaagtgcttcctcagcgagatcctgctcaccggcttctacgccttcctgagaatgctgtccatagcagttgcccccctgctgctcttcgggttcgtgtggtacagcaaccaggaggaacgagacctccgggtcggcctgtcccttgtcggctgcctgctgctcgccaagctcgtggagtcgctgtcgcagcggcattggttcttcagctcgaggaggaccgggatgcgtatccggtcagcgctgatggcggtcatcttccagaagcagctcaggctgtccattcaggggaggaacaaccactccactggcgagattgtcaactacattgcggttgatgcgtaccggcttggcgacgccatcagctggctgcacatggggtggacctcgccacttcagctcgtctttgcagttgccacgctcttctgggcactcaagcttggggctcttcctggtctagtcccgctagtcatctttggtttcctcaacgtgccattcgcgaaaatgctgcaggggtaccaggccaagttcatggttgcacaggacgagaggctccggtccacgtcggagatactcaacagcatgaagatcatcaagctgcagtcgtgggaagacaagttccgcagcacgatcgagtcgctcagggacggcgagttcaaatggctgaggcagacccagatgaagaaggcctatggtgcagtcatgtactggatgtccccgacggtcgtctctgctgtcatgtacacagcaacggccatcatggggagtgctcccctgaatgctagcacgctcttcacggtcttggccaccctgagggtaatgtctgagccagtgaggatgcttccggaggtcctcacaatgatgatccagtacaaggtggcattagatcgaattgagaagttccttctcgaagacgagatcagagaggacgatgtgaaaagggtaccttcagatgactctggtgtcagagttcgagtccaagccggaaatttcagctggaaggcaagcggagctgatctgtcactgaggaatgttaaccttcgcgtgaaccgaggagagaaggtggccgtatgcggcccagttggctcagggaaatcttcactcctgtatgcattacttggggagataccaagattatcaggatcagttgaagtttttggttcagtagcatacgtttcacagagctcgtggatacagagtgggactgttcgtgacaacatactctttgggaagcctttcaacaaggaactgtatgataaggcgatcaaatcttgtgctctggacaaggatatcgaaaattttgaccatggagacctcacagagatcggtcagagaggactgaacatgagtggaggccagaagcaaaggattcagctggctcgagccgtctacagtgatgcagatgtttatctactggatgacccattcagtgcagttgatgcgcataccgctgcagtccttttctatgtatgctgcagataagctcctcgaactttatccatgaaatggtatgttttctgcttcacgtagtactaaggccaatgttcatgcaggaatgtgtgatgacagcacttgcagagaagactgtcgtccttgtgacccaccaggttgaatttctgactgaaaccgataggattctggtaatggaaggtggtcaagttagtcaacaagggaaatattcagaactcctgggatctgggacagcatttgagaaactggtgtctgctcaccagtcttcgatcacagcattggataccagtgctagccaacagaaccaagttcaagggcaacaagagtctgatgaatacatagtgccaagtgcgcttcaggttataaggcaggccagcgacatcgacgtgaccgcaaagggcccttcagcagcaatacagcttacagaagaggaagagaagggcattggcgacctgggatggaagccatacaaagaatatataaatgtatccaagggggctttccaattctctggcatgtgtattgctcaagtgctcttcacgtgcttccagatcgcatccacatattggttggcagtggctgttcagatgggtaacgtcagtgctgcacttcttgttggggcatattctggactctctatcttcagctgcttctttgcctactttagaagctgttttgcggctattctgggtctcaaggcctccaaagcattctttggcgggctaatggactccgtattcaaggctcccatgtcattttttgactcaacaccagtgggaagaattttaacgagggcatcttcagatttgagcattctagacttcgacataccttactccatggcttttgtggcgacgggcggcattgaggttgttaccacagtactggtcatgggtactgtaacttggcaagtcctggttgtagcgatcccagttgctgtcaccatgatatatgttcagaggcactacgtttcctcagctagggagctagtaagactcaacggaacaacaaaggcacctgtaatgaactatgcatcagaatcaattctcggtgtggtgacgatcagggcatttgcagcaactgagaggtttatctacagcaacatgcagctcatcgacactgatgccacactgttcttccataccattgccgcacaagagtgggtactcataagagtagaggcactgcagtccttgacaataatcacagcagcattgttccttgttctggttcctccaggagcaatttctccgggctttgcaggactttgtctctcctatgctttgactttaacttcagcacaaatattcttgacaaggttctattcgtacttggaaaactacatcatctcggttgaacgaatcaagcagtatatgcacctcccagtggagccacctgccattataccagatagtagacctccaacttcgtggccgcaggagggaaggatagacctgcaagatttgaagataagataccgtccaaatgcgccgcttgtcctcaaaggaatcacttgcacttttgctgctgggaacaagattggggttgtagggaggacaggaagtggaaaatcaacacttatcagctcattgttccgtctcgttgatccggcgggtgggaggatacttattgacaagttggatatttgctccattggccttaaggatctaagaactaaactaagtattatccctcaagaacctacacttttcaggggaaccgtgcgcaacaatttggatccccttggccagcattctgatgaagagatatgggaggccttggagaagtgtcaactgaagacagcaatcagcaccacctctgctcttctggatacagttgtgagtgatgatggcgataactggagtgctggacagcgtcagctcttctgtcttggcagagttctcctacgcaggaacaaaattctagttctagacgaggcaacagcatccatcgactctgcaacagatgcaatcctgcagaaagtaatcaggcagcagttctcaagttgcacggttataaccatagctcacagggtaccaactgtgacagacagtgacaagggaagcttctagaatatgaaacaccagccaagctgttggaagacaaacaatcagcatttgctaaacttgtggctgagtattgggctaataccaagagaaattcaacatgatctaccattattgcaggacatgataaaagatatgatcattttaatcaagatatcgaaagattcaagggttctcaaattgaatctttaacaagacaaggaatgccatcatgattatttgattgatgtggttactgggagtgaataagatatcaacagaaattcaattttggtaatggaagcaatttttggagtgagggctgatgttcgagagaactccagctggttgattgaacatgtggtattcaatgcaaaatgaaatggaggatccacttctagcatgatcaatggcatttttcatacataagcctttttgaataagagaagcgaagtaccaagtcgtgaattgcaatgaagaatgagtaaagtgcagtgctgagaagaataattttcatgtatcttgtgtactcaataatgataaactttatatgactgagaaggaaactgtcgcaaattgtcaaagtgattattcaatagattagggctaacccaacaggttagctatatagtgttttac

SEQ ID NO: 80056 - DNA, 5122 bp, Zea Mays
actgtctcgtccgtccaggaaataggccggagaaggagacgcctcggcctctcattgctgggtgcgctccatgttagcggccgtaatggctgatagcggcgatgcggccatggccgttgttcttggctggtcgtcatcttggatctgcggggaagaggacggcgggcggctcaccctcaccgtcgcgtccaagtgcgtgcagaggacactcatagactgcgtcaatgtggtcctgttcatcgcgtacgtctgcacgctggctgccgcctgcgtcaggcggcggcagcgctctgcagatgcgagcagcgggaggagcggcgctcctagtaggtgggtgctgctcgtcgtctccacgtgctgcgtggcagctgccgtggcctactgtgtcacggctctccaagacgcctacgacatcaagacggcggttccttacttcgtcaggggcctggtctggatcgcgctggcggcctcgctgcacgcccagccgacgaggccggcgagggtcgtggccgtgctctggtgggtgctcttgtcgctgctggccaccgcgtacaattcggagatccttgccggggggcacagcctggacctcgcggagatgattgcgtggccggtgagcctcctcctgctgctctgcgccctcggctccctgctgccgcggggcgacgggcaccactaccgggacgcctccaacggcagcagcggcttgtcggagcctctgatcggcaatgacagaaccgtgccaacctcggagttgtaccgcgctggcctgttcggccagcttgccttctcgtggttgaaccctctgctccgtgtcggccgctccaaggcgctggacctcggcgacatcccgctcatcgccaccgacgacaccgcgcaccacacgtcgcagcagttcacggaggcctggagccgccacgtgagcgacaaagccaggagccgccggggcgtgggcagcaacagcctcgccctcgtcttgggcaagtgcttcctcagcgagatcctgctcaccggcttctacgccttcctgagaatgctgtccatagcagttgcccccctgctgctcttcgggttcgtgtggtacagcaaccaggaggaacgagacctccgggtcggcctgtcccttgtcggctgcctgctgctcgccaagctcgtggagtcgctgtcgcagcggcattggttcttcagctcgaggaggaccgggatgcgtatccggtcagcgctgatggcggtcatcttccagaagcagctcaggctgtccattcaggggaggaacaaccactccactggcgagattgtcaactacattgcggttgatgcgtaccggcttggcgacgccatcagctggctgcacatggggtggacctcgccacttcagctcgtctttgcagttgccacgctcttctgggcactcaagcttggggctcttcctggtctagtcccgctagtcatctttggtttcctcaacgtgccattcgcgaaaatgctgcaggggtaccaggccaagttcatggttgcacaggacgagaggctccggtccacgtcggagatactcaacagcatgaagatcatcaagctgcagtcgtgggaagacaagttccgcagcacgatcgagtcgctcagggacggcgagttcaaatggctgaggcagacccagatgaagaaggcctatggtgcagtcatgtactggatgtccccgacggtcgtctctgctgtcatgtacacagcaacggccatcatggggagtgctcccctgaatgctagcacgctcttcacggtcttggccaccctgagggtaatgtctgagccagtgaggatgcttccggaggtcctcacaatgatgatccagtacaaggtggcattagatcgaattgagaagttccttctcgaagacgagatcagagaggacgatgtgaaaagggtaccttcagatgactctggtgtcagagttcgagtccaagccggaaatttcagctggaaggcaagcggagctgatctgtcactgaggaatgttaaccttcgcgtgaaccgaggagagaaggtggccgtatgcggcccagttggctcagggaaatcttcactcctgtatgcattacttggggagataccaagattatcaggatcagttgaagtttttggttcagtagcatacgtttcacagagctcgtggatacagagtgggactgttcgtgacaacatactctttgggaagcctttcaacaaggaactgtatgataaggcgatcaaatcttgtgctctggacaaggatatcgaaaattttgaccatggagacctcacagagatcggtcagagaggactgaacatgagtggaggccagaagcaaaggattcagctggctcgagccgtctacagtgatgcagatgtttatctactggatgacccattcagtgcagttgatgcgcataccgctgcagtccttttctatgaatgtgtgatgacagcacttgcagagaagactgtcgtccttgtgacccaccaggttgaatttctgactgaaaccgataggattctggtaatggaaggtggtcaagttagtcaacaagggaaatattcagaactcctgggatctgggacagcatttgagaaactggtgtctgctcaccagtcttcgatcacagcattggataccagtgctagccaacagaaccaagttcaagggcaacaagagtctgatgaatacatagtgccaagtgcgcttcaggttataaggcaggccagcgacatcgacgtgaccgcaaagggcccttcagcagcaatacagcttacagaagaggaagagaagggcattggcgacctgggatggaagccatacaaagaatatataaatgtatccaagggggctttccaattctctggcatgtgtattgctcaagtgctcttcacgtgcttccagatcgcatccacatattggttggcagtggctgttcagatgggtaacgtcagtgctgcacttcttgttggggcatattctggactctctatcttcagctgcttctttgcctactttagaagctgttttgcggctattctgggtctcaaggcctccaaagcattctttggcgggctaatggactccgtattcaaggctcccatgtcattttttgactcaacaccagtgggaagaattttaacgagggcatcttcagatttgagcattctagacttcgacataccttactccatggcttttgtggcgacgggcggcattgaggttgttaccacagtactggtcatgggtactgtaacttggcaagtcctggttgtagcgatcccagttgctgtcaccatgatatatgttcagctagggagctagtaagactcaacggaacaacaaaggcacctgtaatgaactatgcatcagaatcaattctcggtgtggtgacgatcagggcatttgcagcaactgagaggtttatctacagcaacatgcagctcatcgacactgatgccacactgttcttccataccattgccgcacaagagtgggtactcataagagtagaggcactgcagtccttgacaataatcacagcagcattgttccttgttctggttcctccaggagcaatttctccgggctttgcaggactttgtctctcctatgctttgactttaacttcagcacaaatattcttgacaaggttctattcgtacttggaaaactacatcatctcggttgaacgaatcaagcagtatatgcacctcccagtggagccacctgccattataccagatagtagacctccaacttcgtggccgcaggagggaaggatagacctgcaagatttgaaggtaagatgtttgttttccacagtatcctagaagctttctaagaaattgactcgctgtcatgtactccatgagcagataagataccgtccaaatgcgccgcttgtcctcaaaggaatcacttgcacttttgctgctgggaacaagattggggttgtagggaggacaggaagtggaaaatcaacacttatcagctcattgttccgtctcgttgatccggcgggtgggaggatacttattgacaagttggatatttgctccattggccttaaggatctaagaactaaactaagtattatccctcaagaacctacacttttcaggggaaccgtgcgcaacaatttggatccccttggccagcattctgatgaagagatatgggaggccttggagaagtgtcaactgaagacagcaatcagcaccacctctgctcttctggatacagttgtgagtgatgatggcgataactggagtgctggacagcgtcagctcttctgtcttggcagagttctcctacgcaggaacaaaattctagttctagacgaggcaacagcatccatcgactctgcaacagatgcaatcctgcagaaagtaatcaggcagcagttctcaagttgcacggttataaccatagctcacagggtaccaactgtgacagacagtgacaaggtcatggtcctgtcctacgggaagcttctagaatatgaaacaccagccaagctgttggaagacaaacaatcagcatttgctaaacttgtggctgagtattgggctaataccaagagaaattcaacatgatctaccattattgcaggacatgataaaagatatgatcattttaatcaagatatcgaaagattcaagggttctcaaattgaatctttaacaagacaaggaatgccatcatgattatttgattgatgtggttactgggagtgaataagatatcaacagaaattcaattttggtaatggaagcaatttttggagtgagggctgatgttcgagagaactccagctggttgattgaacatgtggtattcaatgcaaaatgaaatggaggatccacttctagcatgatcaatggcatttttcatacataagcctttttgaataagagaagcgaagtaccaagtcgtgaattgcaatgaagaatgagtaaagtgcagtgctgagaagaataattttcatgtatcttgtgtactcaataatgataaactttatatgactgagaaggaaactgtcgcaaattgtcaaagtgattattcaatagattagggctaacccaacaggttagctatatagtgttttac

SEQ ID NO: 80057 - DNA, 1449 bp, Zea Mays
cacattaccattataactacatcttccttcccaatggtatctttggactgatggaatattaccggttctattcgtacttggaaaactacatcatctcggttgaacgaatcaagcagtatatgcacctcccagtggagccacctgccattataccagatagtagacctccaacttcgtggccgcaggagggaaggatagacctgcaagatttgaagataagataccgtccaaatgcgccgcttgtcctcaaaggaatcacttgcacttttgctgctgggaacaagattggggttgtagggaggacaggaagtggaaaatcaacacttatcagctcattgttccgtctcgttgatccggcgggtgggaggatacttattgacaagttggatatttgctccattggccttaaggatctaagaactaaactaagtattatccctcaagaacctacacttttcaggggaaccgtgcgcaacaatttggatccccttggccagcattctgatgaagagatatgggaggccttggagaagtgtcaactgaagacagcaatcagcaccacctctgctcttctggatacagttgtgagtgatgatggcgataactggagtgctggacagcgtcagctcttctgtcttggcagagttctcctacgcaggaacaaaattctagttctagacgaggcaacagcatccatcgactctgcaacagatgcaatcctgcagaaagtaatcaggcagcagttctcaagttgcacggttataaccatagctcacagggtaccaactgtgacagacagtgacaaggtcatggtcctgtcctacgggaagcttctagaatatgaaacaccagccaagctgttggaagacaaacaatcagcatttgctaaacttgtggctgagtattgggctaataccaagagaaattcaacatgatctaccattattgcaggacatgataaaagatatgatcattttaatcaagatatcgaaagattcaagggttctcaaattgaatctttaacaagacaaggaatgccatcatgattatttgattgatgtggttactgggagtgaataagatatcaacagaaattcaattttggtaatggaagcaatttttggagtgagggctgatgttcgagagaactccagctggttgattgaacatgtggtattcaatgcaaaatgaaatggaggatccacttctagcatgatcaatggcatttttcatacataagcctttttgaataagagaagcgaagtaccaagtcgtgaattgcaatgaagaatgagtaaagtgcagtgctgagaagaataattttcatgtatcttgtgtactcaataatgataaactttatatgactgagaaggaaactgtcgcaaattgtcaaagtgattattcaatagattagggctaacccaacaggttagctatatagtgttttac

SEQ ID NO: 80058 - DNA, 1846 bp, Zea Mays
gctggatcgtgctttgagcttctattttttattctgctcttgctgccaaaaagtccggcccatatttcagcatagactgtagtagtcggcccaaatagcctgccaagcccacctgcgacgtcaaacgaaaggactgccctaacctcgtgcagtcgtgcccgcttgtttcacttgctcgccttcacccctcgccgccgccgtcgccgccgtcgcaagcgacgatgctcgacatcaacttgttccgcactgacaagggcggcaacccggaccttattcacgagtcccagtgcagtcggttcgcctccgtcgagctcgtcgacgaggtcatcgccctcgacaaggcatggcgcgaaaggcagttcgagctggataagatccggcaggagctcaacgctaccagcaagaagatcgacaagctcaaagctagcaagcaagaagaggaagcaaagaagctcatggaaatttagttggcaaacaataaaattgtacgggcatttggagagaagagagtagaggataatttgaagaaccacgtggacctttgcaggatgcttgatattgtcgcattggaaaaggccattgtctcagatagataaccttctgcagacatcttatgatcaaggggacaaatgagatcatgccaactctactccatgtactgctggtgtcacaggattaatatacaatgaagatgttgattcttggagttgcacgaaataaccttgtgattgtgattagttacttcaaagcgttttttggtcttaatgcatggtaagtttattcaccttttatttcatcagacattatgacattccattttgagacaaggatctacaacaattatgtagaagcaatcctttaacaacatatgttacagttaatatattatgttttttctacatgtactcatttgaaacaagtaccagttcattcctcagctgatcttcttgaacaacttatttggttacctgtccttgctaattattattaaggggtgaaatgcagatctataccatgttatgatgtacatgttctttagcccaacaaatgatttttgtgagaactagttttttgtgagatctataccatgttagtccagaagacagtgcatgtctatattccttgttggtaagttctcttctgtgaagcagactgatctatcatgcctaaccactcgccttctctaacaccagcttattctacttctacttgctttagtgtttgtgccttggatgtagtaatactacattgttaaattatttttctttacaaacaaatatataaccttatgaatactagaaattgacgttgctaataatagagcaaagagacctacacatatctaaaacatagaaccccacagttctaaagtcgtatgacctatattctctatttcatacataattacttactaattccttggttattttcaataggatgggagagtgtcggatgcttcttcatatactatttcttggtccatcaaatctgcttgactcaaatgcaagttttgctcaaatgtggcaaaaataattgtctcaccaattgtcagcgcgcctgtttccagcaaagtttcagagaaggaaaagatggaatgtaactcaaattttggtggccgcacaagtgtggagacttgaattcatatatacttagttaggctcaatattagtgcaaacagttgataaccaagtttttcaattagtatttagttttggctttagagtacacttatgtatgagttatttgacaatatttatttatgagatattgaatggtacttatctatattatattagttacaatgttattaaatatatgtgtatgtatatttctctttcaaattatt

SEQ ID NO: 80059 - DNA, 1819 bp, Zea Mays
attttttattctgctcttgctgccaaaaagtccggcccatatttcagcatagactgtagtagtcggcccaaatagcctgccaagcccacctgcgacgtcaaacgaaaggactgccctaacctcgtgcagtcgtgcccgcttgtttcacttgctcgccttcacccctcgccgccgccgtcgccgccgtcgcaagcgacgatgctcgacatcaacttgttccgcactgacaagggcggcaacccggaccttattcacgagtcccagtgcagtcggttcgcctccgtcgagctcgtcgacgaggtcatcgccctcgacaaggcatggcgcgaaaggcagttcgagctggataagatccggcaggagctcaacgctaccagcaagaagatcgacaagctcaaagctagcaagcaagaagaggaagcaaagaagctcatggaaatttagcaaacaataaaattgtacgggcatttggagagaagagagtagaggataatttgaagaaccacgtggacctttgcaggatgcttgatattgtcgcattggaaaaggccattgtctcagatagataaccttctgcagacatcttatgatcaaggggacaaatgagatcatgccaactctactccatgtactgctggtgtcacaggattaatatacaatgaagatgttgattcttggagttgcacgaaataaccttgtgattgtgattagttacttcaaagcgttttttggtcttaatgcatggtaagtttattcaccttttatttcatcagacattatgacattccattttgagacaaggatctacaacaattatgtagaagcaatcctttaacaacatatgttacagttaatatattatgttttttctacatgtactcatttgaaacaagtaccagttcattcctcagctgatcttcttgaacaacttatttggttacctgtccttgctaattattattaaggggtgaaatgcagatctataccatgttatgatgtacatgttctttagcccaacaaatgatttttgtgagaactagttttttgtgagatctataccatgttagtccagaagacagtgcatgtctatattccttgttggtaagttctcttctgtgaagcagactgatctatcatgcctaaccactcgccttctctaacaccagcttattctacttctacttgctttagtgtttgtgccttggatgtagtaatactacattgttaaattatttttctttacaaacaaatatataaccttatgaatactagaaattgacgttgctaataatagagcaaagagacctacacatatctaaaacatagaaccccacagttctaaagtcgtatgacctatattctctatttcatacataattacttactaattccttggttattttcaataggatgggagagtgtcggatgcttcttcatatactatttcttggtccatcaaatctgcttgactcaaatgcaagttttgctcaaatgtggcaaaaataattgtctcaccaattgtcagcgcgcctgtttccagcaaagtttcagagaaggaaaagatggaatgtaactcaaattttggtggccgcacaagtgtggagacttgaattcatatatacttagttaggctcaatattagtgcaaacagttgataaccaagtttttcaattagtatttagttttggctttagagtacacttatgtatgagttatttgacaatatttatttatgagatattgaatggtacttatctatattatattagttacaatgttattaaatatatgtgtatgtatatttctctttcaaattatt

SEQ ID NO: 80060 - DNA, 1778 bp, Zea Mays
attttttattctgctcttgctgccaaaaagtccggcccatatttcagcatagactgtagtagtcggcccaaatagcctgccaagcccacctgcgacgtcaaacgaaaggactgccctaacctcgtgcagtcgtgcccgcttgtttcacttgctcgccttcacccctcgccgccgccgtcgccgccgtcgcaagcgacgatgctcgacatcaacttgttccgcactgacaagggcggcaacccggaccttattcacgagtcccagtgcagtcggttcgcctccgtcgagctcgtcgacgaggtcatcgccctcgacaaggcatggcgcgaaaggcagttcgagctggataagatccggcaggagctcaacgctaccagcaagaagatcgacaagctcaaagctgcaaacaataaaattgtacgggcatttggagagaagagagtagaggataatttgaagaaccacgtggacctttgcaggatgcttgatattgtcgcattggaaaaggccattgtctcagatagataaccttctgcagacatcttatgatcaaggggacaaatgagatcatgccaactctactccatgtactgctggtgtcacaggattaatatacaatgaagatgttgattcttggagttgcacgaaataaccttgtgattgtgattagttacttcaaagcgttttttggtcttaatgcatggtaagtttattcaccttttatttcatcagacattatgacattccattttgagacaaggatctacaacaattatgtagaagcaatcctttaacaacatatgttacagttaatatattatgttttttctacatgtactcatttgaaacaagtaccagttcattcctcagctgatcttcttgaacaacttatttggttacctgtccttgctaattattattaaggggtgaaatgcagatctataccatgttatgatgtacatgttctttagcccaacaaatgatttttgtgagaactagttttttgtgagatctataccatgttagtccagaagacagtgcatgtctatattccttgttggtaagttctcttctgtgaagcagactgatctatcatgcctaaccactcgccttctctaacaccagcttattctacttctacttgctttagtgtttgtgccttggatgtagtaatactacattgttaaattatttttctttacaaacaaatatataaccttatgaatactagaaattgacgttgctaataatagagcaaagagacctacacatatctaaaacatagaaccccacagttctaaagtcgtatgacctatattctctatttcatacataattacttactaattccttggttattttcaataggatgggagagtgtcggatgcttcttcatatactatttcttggtccatcaaatctgcttgactcaaatgcaagttttgctcaaatgtggcaaaaataattgtctcaccaattgtcagcgcgcctgtttccagcaaagtttcagagaaggaaaagatggaatgtaactcaaattttggtggccgcacaagtgtggagacttgaattcatatatacttagttaggctcaatattagtgcaaacagttgataaccaagtttttcaattagtatttagttttggctttagagtacacttatgtatgagttatttgacaatatttatttatgagatattgaatggtacttatctatattatattagttacaatgttattaaatatatgtgtatgtatatttctctttcaaattatt

SEQ ID NO: 80061 - DNA, 1515 bp, Zea Mays
attttttattctgctcttgctgccaaaaagtccggcccatatttcagcatagactgtagtagtcggcccaaatagcctgccaagcccacctgcgacgtcaaacgaaaggactgccctaacctcgtgcagtcgtgcccgcttgtttcacttgctcgccttcacccctcgccgccgccgtcgccgccgtcgcaagcgacgatgctcgacatcaacttgttccgcactgacaagggcggcaacccggaccttattcacgagtcccagtgcagtcggttcgcctccgtcgagctcgtcgacgaggtcatcgccctcgacaaggcatggcgcgaaaggcagttcgagctggataagatccggcaggagctcaacgctaccagcaagaagatcgacaagctcaaagctagcaagcaagaagaggaagcaaagaagctcatggaaatttagttggcaaacaataaaattgtacgggcatttggagagaagagagtagaggataatttgaagaaccacgtggacctttgcaggatgcttgatattgtcgcattggaaaaggccattgtctcagatagataaccttctgcagacatcttatgatcaaggggacaaatgagatcatgccaactctactccatgtactgctggtgtcacaggattaatatacaatgaagatgttgattcttggagttgcacgaaataaccttgtgattgtgattagttacttcaaagcgttttttggtcttaatgcatggtaagtttattcaccttttatttcatcagacattatgacattccattttgagacaaggatctacaacaattatgtagaagcaatcctttaacaacatatgttacagttaatatattatgttttttctacatgtactcatttgaaacaagtaccagttcattcctcagctgatcttcttgaacaacttatttggttacctgtccttgctaattattattaaggggtgaaatgcagatctataccatgttatgatgtacatgttctttagcccaacaaatgatttttgtgagaactagttttttgtgagatctataccatgttagtccagaagacagtgcatgtctatattccttgttggatgggagagtgtcggatgcttcttcatatactatttcttggtccatcaaatctgcttgactcaaatgcaagttttgctcaaatgtggcaaaaataattgtctcaccaattgtcagcgcgcctgtttccagcaaagtttcagagaaggaaaagatggaatgtaactcaaattttggtggccgcacaagtgtggagacttgaattcatatatacttagttaggctcaatattagtgcaaacagttgataaccaagtttttcaattagtatttagttttggctttagagtacacttatgtatgagttatttgacaatatttatttatgagatattgaatggtacttatctatattatattagttacaatgttattaaatatatgtgtatgtatatttctctttcaaattatt

SEQ ID NO: 80062 - DNA, 1764 bp, Zea Mays
gtccggcccatatttcagcatagactgtagtagtcggcccaaatagcctgccaagcccacctgcgacgtcaaacgaaaggactgccctaacctcgtgcagtcgtgcccgcttgtttcacttgctcgccttcacccctcgccgccgccgtcgccgccgtcgcaagcgacgatgctcgacatcaacttgttccgcactgacaagggcggcaacccggaccttattcacgagtcccagtgcagtcggttcgcctccgtcgagctcgtcgacgaggtcatcgccctcgacaaggcatggcgcgaaaggcagttcgagctggataagatccggcaggagctcaacgctaccagcaagaagatcgacaagctcaaagctagcaagcaagaagaggaagcaaagaagctcatggaaatttagttggcaaacaataaaattgtacgggcatttggagagaagagagtagaggataatttgaagaaccacgtggacctttgcaggatgcttgatattgtcgcattggaaaaggacatcttatgatcaaggggacaaatgagatcatgccaactctactccatgtactgctggtgtcacaggattaatatacaatgaagatgttgattcttggagttgcacgaaataaccttgtgattgtgattagttacttcaaagcgttttttggtcttaatgcatggtaagtttattcaccttttatttcatcagacattatgacattccattttgagacaaggatctacaacaattatgtagaagcaatcctttaacaacatatgttacagttaatatattatgttttttctacatgtactcatttgaaacaagtaccagttcattcctcagctgatcttcttgaacaacttatttggttacctgtccttgctaattattattaaggggtgaaatgcagatctataccatgttatgatgtacatgttctttagcccaacaaatgatttttgtgagaactagttttttgtgagatctataccatgttagtccagaagacagtgcatgtctatattccttgttggtaagttctcttctgtgaagcagactgatctatcatgcctaaccactcgccttctctaacaccagcttattctacttctacttgctttagtgtttgtgccttggatgtagtaatactacattgttaaattatttttctttacaaacaaatatataaccttatgaatactagaaattgacgttgctaataatagagcaaagagacctacacatatctaaaacatagaaccccacagttctaaagtcgtatgacctatattctctatttcatacataattacttactaattccttggttattttcaataggatgggagagtgtcggatgcttcttcatatactatttcttggtccatcaaatctgcttgactcaaatgcaagttttgctcaaatgtggcaaaaataattgtctcaccaattgtcagcgcgcctgtttccagcaaagtttcagagaaggaaaagatggaatgtaactcaaattttggtggccgcacaagtgtggagacttgaattcatatatacttagttaggctcaatattagtgcaaacagttgataaccaagtttttcaattagtatttagttttggctttagagtacacttatgtatgagttatttgacaatatttatttatgagatattgaatggtacttatctatattatattagttacaatgttattaaatatatgtgtatgtatatttctctttcaaattatt

SEQ ID NO: 80063 - DNA, 1826 bp, Zea Mays
cccatatttcagcatagactgtagtagtcggcccaaatagcctgccaagcccacctgcgacgtcaaacgaaaggactgccctaacctcgtgcagtcgtgcccgcttgtttcacttgctcgccttcacccctcgccgccgccgtcgccgccgtcgcaagcgacgatgctcgacatcaacttgttccgcactgacaagggcggcaacccggaccttattcacgagtcccagtgcagtcggttcgcctccgtcgagctcgtcgacgaggtcatcgccctcgacaaggcatggcgcgaaaggcagttcgagctggataagatccggcaggagctcaacgctaccagcaagaagatcgacaagctcaaagctagcaagcaagaagaggaagcaaagaagctcatggaaatttagttggtgtttgttctggctatttgctttccactgaagtaaccgttagactgtagtgtgacatcctaaatattagctccactgtcaactccaaccctgattctcacactcacaatttgattgttggaattctaattgtgctttagggttctatgtgaagatacaaaaaaatattgcattcctattctggtcccgtattgaaattgccagtggtccctctgaattttgatccaattgttataaatttcagatgaactgaataaaactactacttgtaggcaaacaataaaattgtacgggcatttggagagaagagagtagaggataatttgaagaaccacgtggacctttgcaggatgcttgatattgtcgcattggaaaaggccattgtctcagatagataaccttctgcagacatcttatgatcaaggggacaaatgagatcatgccaactctactccatgtactgctggtgtcacaggattaatatacaatgaagatgttgattcttggagttgcacgaaataaccttgtgattgtgattagttacttcaaagcgttttttggtcttaatgcatgatctataccatgttatgatgtacatgttctttagcccaacaaatgatttttgtgagaactagttttttgtgagatctataccatgttagtccagaagacagtgcatgtctatattccttgttggtaagttctcttctgtgaagcagactgatctatcatgcctaaccactcgccttctctaacaccagcttattctacttctacttgctttagtgtttgtgccttggatgtagtaatactacattgttaaattatttttctttacaaacaaatatataaccttatgaatactagaaattgacgttgctaataatagagcaaagagacctacacatatctaaaacatagaaccccacagttctaaagtcgtatgacctatattctctatttcatacataattacttactaattccttggttattttcaataggatgggagagtgtcggatgcttcttcatatactatttcttggtccatcaaatctgcttgactcaaatgcaagttttgctcaaatgtggcaaaaataattgtctcaccaattgtcagcgcgcctgtttccagcaaagtttcagagaaggaaaagatggaatgtaactcaaattttggtggccgcacaagtgtggagacttgaattcatatatacttagttaggctcaatattagtgcaaacagttgataaccaagtttttcaattagtatttagttttggctttagagtacacttatgtatgagttatttgacaatatttatttatgagatattgaatggtacttatctatattatattagttacaatgttattaaatatatgtgtatgtatatttctctttcaaattatt

SEQ ID NO: 80064 - DNA, 1971 bp, Zea Mays
cccatatttcagcatagactgtagtagtcggcccaaatagcctgccaagcccacctgcgacgtcaaacgaaaggactgccctaacctcgtgcagtcgtgcccgcttgtttcacttgctcgccttcacccctcgccgccgccgtcgccgccgtcgcaagcgacgatgctcgacatcaacttgttccgcactgacaagggcggcaacccggaccttattcacgagtcccagtgcagtcggttcgcctccgtcgagctcgtcgacgaggtcatcgccctcgacaaggcatggcgcgaaaggcagttcgagctggataagatccggcaggagctcaacgctaccagcaagaagatcgacaagctcaaagctagcaagcaagaagaggaagcaaagaagctcatggaaatttagttggtgtttgttctggctatttgctttccactgaagtaaccgttagactgtagtgtgacatcctaaatattagctccactgtcaactccaaccctgattctcacactcacaatttgattgttggaattctaattgtgctttagggttctatgtgaagatacaaaaaaatattgcattcctattctggcaaacaataaaattgtacgggcatttggagagaagagagtagaggataatttgaagaaccacgtggacctttgcaggatgcttgatattgtcgcattggaaaaggccattgtctcagatagataaccttctgcagacatcttatgatcaaggggacaaatgagatcatgccaactctactccatgtactgctggtgtcacaggattaatatacaatgaagatgttgattcttggagttgcacgaaataaccttgtgattgtgattagttacttcaaagcgttttttggtcttaatgcatggtaagtttattcaccttttatttcatcagacattatgacattccattttgagacaaggatctacaacaattatgtagaagcaatcctttaacaacatatgttacagttaatatattatgttttttctacatgtactcatttgaaacaagtaccagttcattcctcagctgatcttcttgaacaacttatttggttacctgtccttgctaattattattaaggggtgaaatgcagatctataccatgttatgatgtacatgttctttagcccaacaaatgatttttgtgagaactagttttttgtgagatctataccatgttagtccagaagacagtgcatgtctatattccttgttggtaagttctcttctgtgaagcagactgatctatcatgcctaaccactcgccttctctaacaccagcttattctacttctacttgctttagtgtttgtgccttggatgtagtaatactacattgttaaattatttttctttacaaacaaatatataaccttatgaatactagaaattgacgttgctaataatagagcaaagagacctacacatatctaaaacatagaaccccacagttctaaagtcgtatgacctatattctctatttcatacataattacttactaattccttggttattttcaataggatgggagagtgtcggatgcttcttcatatactatttcttggtccatcaaatctgcttgactcaaatgcaagttttgctcaaatgtggcaaaaataattgtctcaccaattgtcagcgcgcctgtttccagcaaagtttcagagaaggaaaagatggaatgtaactcaaattttggtggccgcacaagtgtggagacttgaattcatatatacttagttaggctcaatattagtgcaaacagttgataaccaagtttttcaattagtatttagttttggctttagagtacacttatgtatgagttatttgacaatatttatttatgagatattgaatggtacttatctatattatattagttacaatgttattaaatatatgtgtatgtatatttctctttcaaattatt

SEQ ID NO: 80065 - DNA, 1334 bp, Zea Mays
cccaaatagcctgccaagcccacctgcgacgtcaaacgaaaggactgccctaacctcgtgcagtcgtgcccgcttgtttcacttgctcgccttcacccctcgccgccgccgtcgccgccgtcgcaagcgacgatgctcgacatcaacttgttccgcactgacaagggcggcaacccggaccttattcacgagtcccagtgcagtcggttcgcctccgtcgagctcgtcgacgaggtcatcgccctcgacaaggcatggcgcgaaaggcagttcgagctggataagatccggcaggagctcaacgctaccagcaagaagatcgacaagctcaaagctagcaagcaagaagaggaagcaaagaagctcatggaaatttagttggtgtttgttctggctatttgctttccactgaagtaaccgttagactgtagtgtgacatcctaaatattagctccactgtcaactccaaccctgattctcacactcacaatttgattgttggaattctaattgtgctttagggttctatgtgaagatacaaaaaaatattgcattcctattctggtcccgtattgaaattgccagtggtccctctgaattttgatccaattgttataaatttcagatgaactgaataaaactactacttgtaggcaaacaataaaattgtacgggcatttggagagaagagagtagaggataatttgaagaaccacgtggacctttgcaggatgcttgatattgtcgcattggaaaaggacatcttatgatcaaggggacaaatgagatcatgccaactctactccatgtactgctggtgtcacaggattaatatacaatgaagatgttgattcttggagttgcacgaaataaccttgtgattgtgattagttacttcaaagcgttttttggtcttaatgcatggatgggagagtgtcggatgcttcttcatatactatttcttggtccatcaaatctgcttgactcaaatgcaagttttgctcaaatgtggcaaaaataattgtctcaccaattgtcagcgcgcctgtttccagcaaagtttcagagaaggaaaagatggaatgtaactcaaattttggtggccgcacaagtgtggagacttgaattcatatatacttagttaggctcaatattagtgcaaacagttgataaccaagtttttcaattagtatttagttttggctttagagtacacttatgtatgagttatttgacaatatttatttatgagatattgaatggtacttatctatattatattagttacaatgttattaaatatatgtgtatgtatatttctctttcaaattatt

SEQ ID NO: 80066 - DNA, 1092 bp, Zea Mays
cccaaatagcctgccaagcccacctgcgacgtcaaacgaaaggactgccctaacctcgtgcagtcgtgcccgcttgtttcacttgctcgccttcacccctcgccgccgccgtcgccgccgtcgcaagcgacgatgctcgacatcaacttgttccgcactgacaagggcggcaacccggaccttattcacgagtcccagtgcagtcggttcgcctccgtcgagctcgtcgacgaggtcatcgccctcgacaaggcatggcgcgaaaggcagttcgagctggataagatccggcaggagctcaacgctaccagcaagaagatcgacaagctcaaagctagcaagcaagaagaggaagcaaagaagctcatggaaatttagttggcaaacaataaaattgtacgggcatttggagagaagagagtagaggataatttgaagaaccacgtggacctttgcaggatgcttgatattgtcgcattggaaaaggccattgtctcagatagataaccttctgcagacatcttatgatcaaggggacaaatgagatcatgccaactctactccatgtactgctggtgtcacaggattaatatacaatgaagatgttgattcttggagttgcacgaaataaccttgtgattgtgattagttacttcaaagcgttttttggtcttaatgcatggatgggagagtgtcggatgcttcttcatatactatttcttggtccatcaaatctgcttgactcaaatgcaagttttgctcaaatgtggcaaaaataattgtctcaccaattgtcagcgcgcctgtttccagcaaagtttcagagaaggaaaagatggaatgtaactcaaattttggtggccgcacaagtgtggagacttgaattcatatatacttagttaggctcaatattagtgcaaacagttgataaccaagtttttcaattagtatttagttttggctttagagtacacttatgtatgagttatttgacaatatttatttatgagatattgaatggtacttatctatattatattagttacaatgttattaaatatatgtgtatgtatatttctctttcaaattatt

SEQ ID NO: 80067 - DNA, 1054 bp, Zea Mays
gcctgccaagcccacctgcgacgtcaaacgaaaggactgccctaacctcgtgcagtcgtgcccgcttgtttcacttgctcgccttcacccctcgccgccgccgtcgccgccgtcgcaagcgacgatgctcgacatcaacttgttccgcactgacaagggcggcaacccggaccttattcacgagtcccagtgcagtcggttcgcctccgtcgagctcgtcgacgaggtcatcgccctcgacaaggcatggcgcgaaaggcagttcgagctggataagatccggcaggagctcaacgctaccagcaagaagatcgacaagctcaaagctagcaagcaagaagaggaagcaaagaagctcatggaaatttagttggcaaacaataaaattgtacgggcatttggagagaagagagtagaggataatttgaagaaccacgtggacctttgcaggatgcttgatattgtcgcattggaaaaggacatcttatgatcaaggggacaaatgagatcatgccaactctactccatgtactgctggtgtcacaggattaatatacaatgaagatgttgattcttggagttgcacgaaataaccttgtgattgtgattagttacttcaaagcgttttttggtcttaatgcatggatgggagagtgtcggatgcttcttcatatactatttcttggtccatcaaatctgcttgactcaaatgcaagttttgctcaaatgtggcaaaaataattgtctcaccaattgtcagcgcgcctgtttccagcaaagtttcagagaaggaaaagatggaatgtaactcaaattttggtggccgcacaagtgtggagacttgaattcatatatacttagttaggctcaatattagtgcaaacagttgataaccaagtttttcaattagtatttagttttggctttagagtacacttatgtatgagttatttgacaatatttatttatgagatattgaatggtacttatctatattatattagttacaatgttattaaatatatgtgtatgtatatttctctttcaaattatt

SEQ ID NO: 80068 - DNA, 1185 bp, Zea Mays
gtcaaacgaaaggactgccctaacctcgtgcagtcgtgcccgcttgtttcacttgctcgccttcacccctcgccgccgccgtcgccgccgtcgcaagcgacgatgctcgacatcaacttgttccgcactgacaagggcggcaacccggaccttattcacgagtcccagtgcagtcggttcgcctccgtcgagctcgtcgacgaggtcatcgccctcgacaaggcatggcgcgaaaggcagttcgagctggataagatccggcaggagctcaacgctaccagcaagaagatcgacaagctcaaagctagcaagcaagaagaggaagcaaagaagctcatggaaatttagttggcaaacaataaaattgtacgggcatttggagagaagagagtagaggataatttgaagaaccacgtggacctttgcaggatgcttgatattgtcgcattggaaaaggccattgtctcagatagataaccttctgcagacatcttatgatcaaggggacaaatgagatcatgccaactctactccatgtactgctggtgtcacaggattaatatacaatgaagatgttgattcttggagttgcacgaaataaccttgtgattgtgattagttacttcaaagcgttttttggtcttaatgcatgatctataccatgttatgatgtacatgttctttagcccaacaaatgatttttgtgagaactagttttttgtgagatctataccatgttagtccagaagacagtgcatgtctatattccttgttggatgggagagtgtcggatgcttcttcatatactatttcttggtccatcaaatctgcttgactcaaatgcaagttttgctcaaatgtggcaaaaataattgtctcaccaattgtcagcgcgcctgtttccagcaaagtttcagagaaggaaaagatggaatgtaactcaaattttggtggccgcacaagtgtggagacttgaattcatatatacttagttaggctcaatattagtgcaaacagttgataaccaagtttttcaattagtatttagttttggctttagagtacacttatgtatgagttatttgacaatatttatttatgagatattgaatggtacttatctatattatattagttacaatgttattaaatatatgtgtatgtatatttctctttcaaattatt

SEQ ID NO: 80069 - DNA, 965 bp, Zea Mays
gtcaaacgaaaggactgccctaacctcgtgcagtcgtgcccgcttgtttcacttgctcgccttcacccctcgccgccgccgtcgccgccgtcgcaagcgacgatgctcgacatcaacttgttccgcactgacaagggcggcaacccggaccttattcacgagtcccagtgcagtcggttcgcctccgtcgagctcgtcgacgaggtcatcgccctcgacaaggcatggcgcgaaaggcagttcgagctggataagatccggcaggagctcaacgctaccagcaagaagatcgacaagctcaaagctagcaagcaagaagaggaagcaaagaagctcatggaaatttagttggcaaacaataaaattgtacgggcatttggagagaagagagtagaggataatttgaagaaccacgtggacctttgcaggatgcttgatattgtcgcattggaaaagggattaatatacaatgaagatgttgattcttggagttgcacgaaataaccttgtgattgtgattagttacttcaaagcgttttttggtcttaatgcatggatgggagagtgtcggatgcttcttcatatactatttcttggtccatcaaatctgcttgactcaaatgcaagttttgctcaaatgtggcaaaaataattgtctcaccaattgtcagcgcgcctgtttccagcaaagtttcagagaaggaaaagatggaatgtaactcaaattttggtggccgcacaagtgtggagacttgaattcatatatacttagttaggctcaatattagtgcaaacagttgataaccaagtttttcaattagtatttagttttggctttagagtacacttatgtatgagttatttgacaatatttatttatgagatattgaatggtacttatctatattatattagttacaatgttattaaatatatgtgtatgtatatttctctttcaaattatt

SEQ ID NO: 80070 - DNA, 1969 bp, Zea Mays
gtcaaacgaaaggactgccctaacctcgtgcagtcgtgcccgcttgtttcacttgctcgccttcacccctcgccgccgccgtcgccgccgtcgcaagcgacgatgctcgacatcaacttgttccgcactgacaagggcggcaacccggaccttattcacgagtcccagtgcagtcggttcgcctccgtcgagctcgtcgacgaggtcatcgccctcgacaaggcatggcgcgaaaggcagttcgagctggataagatccggcaggagctcaacgctaccagcaagaagatcgacaagctcaaagctagcaagcaagaagaggaagcaaagaagctcatggaaatttagttggtgtttgttctggctatttgctttccactgaagtaaccgttagactgtagtgtgacatcctaaatattagctccactgtcaactccaaccctgattctcacactcacaatttgattgttggaattctaattgtgctttagggttctatgtgaagatacaaaaaaatattgcattcctattctggtcccgtattgaaattgccagtggtccctctgaattttgatccaattgttataaatttcagatgaactgaataaaactactacttgtaggcaaacaataaaattgtacgggcatttggagagaagagagtagaggataatttgaagaaccacgtggacctttgcaggatgcttgatattgtcgcattggaaaaggacatcttatgatcaaggggacaaatgagatcatgccaactctactccatgtactgctggtgtcacaggattaatatacaatgaagatgttgattcttggagttgcacgaaataaccttgtgattgtgattagttacttcaaagcgttttttggtcttaatgcatggtaagtttattcaccttttatttcatcagacattatgacattccattttgagacaaggatctacaacaattatgtagaagcaatcctttaacaacatatgttacagttaatatattatgttttttctacatgtactcatttgaaacaagtaccagttcattcctcagctgatcttcttgaacaacttatttggttacctgtccttgctaattattattaaggggtgaaatgcagatctataccatgttatgatgtacatgttctttagcccaacaaatgatttttgtgagaactagttttttgtgagatctataccatgttagtccagaagacagtgcatgtctatattccttgttggtaagttctcttctgtgaagcagactgatctatcatgcctaaccactcgccttctctaacaccagcttattctacttctacttgctttagtgtttgtgccttggatgtagtaatactacattgttaaattatttttctttacaaacaaatatataaccttatgaatactagaaattgacgttgctaataatagagcaaagagacctacacatatctaaaacatagaaccccacagttctaaagtcgtatgacctatattctctatttcatacataattacttactaattccttggttattttcaataggatgggagagtgtcggatgcttcttcatatactatttcttggtccatcaaatctgcttgactcaaatgcaagttttgctcaaatgtggcaaaaataattgtctcaccaattgtcagcgcgcctgtttccagcaaagtttcagagaaggaaaagatggaatgtaactcaaattttggtggccgcacaagtgtggagacttgaattcatatatacttagttaggctcaatattagtgcaaacagttgataaccaagtttttcaattagtatttagttttggctttagagtacacttatgtatgagttatttgacaatatttatttatgagatattgaatggtacttatctatattatattagttacaatgttattaaatatatgtgtatgtatatttctctttcaaattatt

SEQ ID NO: 80071 - DNA, 1443 bp, Zea Mays
acgaaaggactgccctaacctcgtgcagtcgtgcccgcttgtttcacttgctcgccttcacccctcgccgccgccgtcgccgccgtcgcaagcgacgatgctcgacatcaacttgttccgcactgacaagggcggcaacccggaccttattcacgagtcccagtgcagtcggttcgcctccgtcgagctcgtcgacgaggtcatcgccctcgacaaggcatggcgcgaaaggcagttcgagctggataagatccggcaggagctcaacgctaccagcaagaagatcgacaagctcaaagctgcaaacaataaaattgtacgggcatttggagagaagagagtagaggataatttgaagaaccacgtggacctttgcaggatgcttgatattgtcgcattggaaaaggccattgtctcagatagataaccttctgcagacatcttatgatcaaggggacaaatgagatcatgccaactctactccatgtactgctggtgtcacaggattaatatacaatgaagatgttgattcttggagttgcacgaaataaccttgtgattgtgattagttacttcaaagcgttttttggtcttaatgcatgatctataccatgttatgatgtacatgttctttagcccaacaaatgatttttgtgagaactagttttttgtgagatctataccatgttagtccagaagacagtgcatgtctatattccttgttggtaagttctcttctgtgaagcagactgatctatcatgcctaaccactcgccttctctaacaccagcttattctacttctacttgctttagtgtttgtgccttggatgtagtaatactacattgttaaattatttttctttacaaacaaatatataaccttatgaatactagaaattgacgttgctaataatagagcaaagagacctacacatatctaaaacatagaaccccacagttctaaagtcgtatgacctatattctctatttcatacataattacttactaattccttggttattttcaataggatgggagagtgtcggatgcttcttcatatactatttcttggtccatcaaatctgcttgactcaaatgcaagttttgctcaaatgtggcaaaaataattgtctcaccaattgtcagcgcgcctgtttccagcaaagtttcagagaaggaaaagatggaatgtaactcaaattttggtggccgcacaagtgtggagacttgaattcatatatacttagttaggctcaatattagtgcaaacagttgataaccaagtttttcaattagtatttagttttggctttagagtacacttatgtatgagttatttgacaatatttatttatgagatattgaatggtacttatctatattatattagttacaatgttattaaatatatgtgtatgtatatttctctttcaaattatt

SEQ ID NO: 80072 - DNA, 1728 bp, Zea Mays
gaaaggactgccctaacctcgtgcagtcgtgcccgcttgtttcacttgctcgccttcacccctcgccgccgccgtcgccgccgtcgcaagcgacgatgctcgacatcaacttgttccgcactgacaagggcggcaacccggaccttattcacgagtcccagtgcagtcggttcgcctccgtcgagctcgtcgacgaggtcatcgccctcgacaaggcatggcgcgaaaggcagttcgagctggataagatccggcaggagctcaacgctaccagcaagaagatcgacaagctcaaagctagcaagcaagaagaggaagcaaagaagctcatggaaatttagttggtgtttgttctggctatttgctttccactgaagtaaccgttagactgtagtgtgacatcctaaatattagctccactgtcaactccaaccctgattctcacactcacaatttgattgttggaattctaattgtgctttagggttctatgtgaagatacaaaaaaatattgcattcctattctggtcccgtattgaaattgccagtggtccctctgaattttgatccaattgttataaatttcagatgaactgaataaaactactacttgtaggcaaacaataaaattgtacgggcatttggagagaagagagtagaggataatttgaagaaccacgtggacctttgcaggatgcttgatattgtcgcattggaaaaggacatcttatgatcaaggggacaaatgagatcatgccaactctactccatgtactgctggtgtcacaggattaatatacaatgaagatgttgattcttggagttgcacgaaataaccttgtgattgtgattagttacttcaaagcgttttttggtcttaatgcatgatctataccatgttatgatgtacatgttctttagcccaacaaatgatttttgtgagaactagttttttgtgagatctataccatgttagtccagaagacagtgcatgtctatattccttgttggtaagttctcttctgtgaagcagactgatctatcatgcctaaccactcgccttctctaacaccagcttattctacttctacttgctttagtgtttgtgccttggatgtagtaatactacattgttaaattatttttctttacaaacaaatatataaccttatgaatactagaaattgacgttgctaataatagagcaaagagacctacacatatctaaaacatagaaccccacagttctaaagtcgtatgacctatattctctatttcatacataattacttactaattccttggttattttcaataggatgggagagtgtcggatgcttcttcatatactatttcttggtccatcaaatctgcttgactcaaatgcaagttttgctcaaatgtggcaaaaataattgtctcaccaattgtcagcgcgcctgtttccagcaaagtttcagagaaggaaaagatggaatgtaactcaaattttggtggccgcacaagtgtggagacttgaattcatatatacttagttaggctcaatattagtgcaaacagttgataaccaagtttttcaattagtatttagttttggctttagagtacacttatgtatgagttatttgacaatatttatttatgagatattgaatggtacttatctatattatattagttacaatgttattaaatatatgtgtatgtatatttctctttcaaattatt

SEQ ID NO: 80073 - DNA, 1486 bp, Zea Mays
gaaaggactgccctaacctcgtgcagtcgtgcccgcttgtttcacttgctcgccttcacccctcgccgccgccgtcgccgccgtcgcaagcgacgatgctcgacatcaacttgttccgcactgacaagggcggcaacccggaccttattcacgagtcccagtgcagtcggttcgcctccgtcgagctcgtcgacgaggtcatcgccctcgacaaggcatggcgcgaaaggcagttcgagctggataagatccggcaggagctcaacgctaccagcaagaagatcgacaagctcaaagctagcaagcaagaagaggaagcaaagaagctcatggaaatttagttggcaaacaataaaattgtacgggcatttggagagaagagagtagaggataatttgaagaaccacgtggacctttgcaggatgcttgatattgtcgcattggaaaaggccattgtctcagatagataaccttctgcagacatcttatgatcaaggggacaaatgagatcatgccaactctactccatgtactgctggtgtcacaggattaatatacaatgaagatgttgattcttggagttgcacgaaataaccttgtgattgtgattagttacttcaaagcgttttttggtcttaatgcatgatctataccatgttatgatgtacatgttctttagcccaacaaatgatttttgtgagaactagttttttgtgagatctataccatgttagtccagaagacagtgcatgtctatattccttgttggtaagttctcttctgtgaagcagactgatctatcatgcctaaccactcgccttctctaacaccagcttattctacttctacttgctttagtgtttgtgccttggatgtagtaatactacattgttaaattatttttctttacaaacaaatatataaccttatgaatactagaaattgacgttgctaataatagagcaaagagacctacacatatctaaaacatagaaccccacagttctaaagtcgtatgacctatattctctatttcatacataattacttactaattccttggttattttcaataggatgggagagtgtcggatgcttcttcatatactatttcttggtccatcaaatctgcttgactcaaatgcaagttttgctcaaatgtggcaaaaataattgtctcaccaattgtcagcgcgcctgtttccagcaaagtttcagagaaggaaaagatggaatgtaactcaaattttggtggccgcacaagtgtggagacttgaattcatatatacttagttaggctcaatattagtgcaaacagttgataaccaagtttttcaattagtatttagttttggctttagagtacacttatgtatgagttatttgacaatatttatttatgagatattgaatggtacttatctatattatattagttacaatgttattaaatatatgtgtatgtatatttctctttcaaattatt

SEQ ID NO: 80074 - DNA, 1488 bp, Zea Mays
gaaaggactgccctaacctcgtgcagtcgtgcccgcttgtttcacttgctcgccttcacccctcgccgccgccgtcgccgccgtcgcaagcgacgatgctcgacatcaacttgttccgcactgacaagggcggcaacccggaccttattcacgagtcccagtgcagtcggttcgcctccgtcgagctcgtcgacgaggtcatcgccctcgacaaggcatggcgcgaaaggcagttcgagctggataagatccggcaggagctcaacgctaccagcaagaagatcgacaagctcaaagctagcaagcaagaagaggaagcaaagaagctcatggaaatttagttggtgcaaacaataaaattgtacgggcatttggagagaagagagtagaggataatttgaagaaccacgtggacctttgcaggatgcttgatattgtcgcattggaaaaggccattgtctcagatagataaccttctgcagacatcttatgatcaaggggacaaatgagatcatgccaactctactccatgtactgctggtgtcacaggattaatatacaatgaagatgttgattcttggagttgcacgaaataaccttgtgattgtgattagttacttcaaagcgttttttggtcttaatgcatgatctataccatgttatgatgtacatgttctttagcccaacaaatgatttttgtgagaactagttttttgtgagatctataccatgttagtccagaagacagtgcatgtctatattccttgttggtaagttctcttctgtgaagcagactgatctatcatgcctaaccactcgccttctctaacaccagcttattctacttctacttgctttagtgtttgtgccttggatgtagtaatactacattgttaaattatttttctttacaaacaaatatataaccttatgaatactagaaattgacgttgctaataatagagcaaagagacctacacatatctaaaacatagaaccccacagttctaaagtcgtatgacctatattctctatttcatacataattacttactaattccttggttattttcaataggatgggagagtgtcggatgcttcttcatatactatttcttggtccatcaaatctgcttgactcaaatgcaagttttgctcaaatgtggcaaaaataattgtctcaccaattgtcagcgcgcctgtttccagcaaagtttcagagaaggaaaagatggaatgtaactcaaattttggtggccgcacaagtgtggagacttgaattcatatatacttagttaggctcaatattagtgcaaacagttgataaccaagtttttcaattagtatttagttttggctttagagtacacttatgtatgagttatttgacaatatttatttatgagatattgaatggtacttatctatattatattagttacaatgttattaaatatatgtgtatgtatatttctctttcaaattatt

SEQ ID NO: 80075 - DNA, 1722 bp, Zea Mays
gaaaggactgccctaacctcgtgcagtcgtgcccgcttgtttcacttgctcgccttcacccctcgccgccgccgtcgccgccgtcgcaagcgacgatgctcgacatcaacttgttccgcactgacaagggcggcaacccggaccttattcacgagtcccagtgcagtcggttcgcctccgtcgagctcgtcgacgaggtcatcgccctcgacaaggcatggcgcgaaaggcagttcgagctggataagatccggcaggagctcaacgctaccagcaagaagatcgacaagctcaaagctagcaagcaagaagaggaagcaaagaagctcatggaaatttagttggtgcaaacaataaaattgtacgggcatttggagagaagagagtagaggataatttgaagaaccacgtggacctttgcaggatgcttgatattgtcgcattggaaaaggccattgtctcagatagataaccttctgcagacatcttatgatcaaggggacaaatgagatcatgccaactctactccatgtactgctggtgtcacaggattaatatacaatgaagatgttgattcttggagttgcacgaaataaccttgtgattgtgattagttacttcaaagcgttttttggtcttaatgcatggtaagtttattcaccttttatttcatcagacattatgacattccattttgagacaaggatctacaacaattatgtagaagcaatcctttaacaacatatgttacagttaatatattatgttttttctacatgtactcatttgaaacaagtaccagttcattcctcagctgatcttcttgaacaacttatttggttacctgtccttgctaattattattaaggggtgaaatgcagatctataccatgttatgatgtacatgttctttagcccaacaaatgatttttgtgagaactagttttttgtgagatctataccatgttagtccagaagacagtgcatgtctatattccttgttggtaagttctcttctgtgaagcagactgatctatcatgcctaaccactcgccttctctaacaccagcttattctacttctacttgctttagtgtttgtgccttggatgtagtaatactacattgttaaattatttttctttacaaacaaatatataaccttatgaatactagaaattgacgttgctaataatagagcaaagagacctacacatatctaaaacatagaaccccacagttctaaagtcgtatgacctatattctctatttcatacataattacttactaattccttggttattttcaataggatgggagagtgtcggatgcttcttcatatactatttcttggtccatcaaatctgcttgactcaaatgcaagttttgctcaaatgtggcaaaaataattgtctcaccaattgtcagcgcgcctgtttccagcaaagtttcagagaaggaaaagatggaatgtaactcaaattttggtggccgcacaagtgtggagacttgaattcatatatacttagttaggctcaatattagtgcaaacagttgataaccaagtttttcaattagtatttagttttggctttagagtacacttatgtatgagttatttgacaatatttatttatgagatattgaatggtacttatctatattatattagttacaatgttattaaatatatgtgtatgtatatttctctttcaaattatt

SEQ ID NO: 80076 - DNA, 1895 bp, Zea Mays
gaaaggactgccctaacctcgtgcagtcgtgcccgcttgtttcacttgctcgccttcacccctcgccgccgccgtcgccgccgtcgcaagcgacgatgctcgacatcaacttgttccgcactgacaagggcggcaacccggaccttattcacgagtcccagtgcagtcggttcgcctccgtcgagctcgtcgacgaggtcatcgccctcgacaaggcatggcgcgaaaggcagttcgagctggataagatccggcaggagctcaacgctaccagcaagaagatcgacaagctcaaagctagcaagcaagaagaggaagcaaagaagctcatggaaatttagttggtgtttgttctggctatttgctttccactgaagtaaccgttagactgtagtgtgacatcctaaatattagctccactgtcaactccaaccctgattctcacactcacaatttgattgttggaattctaattgtgctttagggttctatgtgaagatacaaaaaaatattgcattcctattctggtcccgtattgaaattgccagtggtccctctgaattttgatccaattgttataaatttcagatgaactgaataaaactactacttgtaggcaaacaataaaattgtacgggcatttggagagaagagagtagaggataatttgaagaaccacgtggacctttgcaggatgcttgatattgtcgcattggaaaagggattaatatacaatgaagatgttgattcttggagttgcacgaaataaccttgtgattgtgattagttacttcaaagcgttttttggtcttaatgcatggtaagtttattcaccttttatttcatcagacattatgacattccattttgagacaaggatctacaacaattatgtagaagcaatcctttaacaacatatgttacagttaatatattatgttttttctacatgtactcatttgaaacaagtaccagttcattcctcagctgatcttcttgaacaacttatttggttacctgtccttgctaattattattaaggggtgaaatgcagatctataccatgttatgatgtacatgttctttagcccaacaaatgatttttgtgagaactagttttttgtgagatctataccatgttagtccagaagacagtgcatgtctatattccttgttggtaagttctcttctgtgaagcagactgatctatcatgcctaaccactcgccttctctaacaccagcttattctacttctacttgctttagtgtttgtgccttggatgtagtaatactacattgttaaattatttttctttacaaacaaatatataaccttatgaatactagaaattgacgttgctaataatagagcaaagagacctacacatatctaaaacatagaaccccacagttctaaagtcgtatgacctatattctctatttcatacataattacttactaattccttggttattttcaataggatgggagagtgtcggatgcttcttcatatactatttcttggtccatcaaatctgcttgactcaaatgcaagttttgctcaaatgtggcaaaaataattgtctcaccaattgtcagcgcgcctgtttccagcaaagtttcagagaaggaaaagatggaatgtaactcaaattttggtggccgcacaagtgtggagacttgaattcatatatacttagttaggctcaatattagtgcaaacagttgataaccaagtttttcaattagtatttagttttggctttagagtacacttatgtatgagttatttgacaatatttatttatgagatattgaatggtacttatctatattatattagttacaatgttattaaatatatgtgtatgtatatttctctttcaaattatt

SEQ ID NO: 80077 - DNA, 1010 bp, Zea Mays
gaaaggactgccctaacctcgtgcagtcgtgcccgcttgtttcacttgctcgccttcacccctcgccgccgccgtcgccgccgtcgcaagcgacgatgctcgacatcaacttgttccgcactgacaagggcggcaacccggaccttattcacgagtcccagtgcagtcggttcgcctccgtcgagctcgtcgacgaggtcatcgccctcgacaaggcatggcgcgaaaggcagttcgagctggataagatccggcaggagctcaacgctaccagcaagaagatcgacaagctcaaagctgcaaacaataaaattgtacgggcatttggagagaagagagtagaggataatttgaagaaccacgtggacctttgcaggatgcttgatattgtcgcattggaaaaggccattgtctcagatagataaccttctgcagacatcttatgatcaaggggacaaatgagatcatgccaactctactccatgtactgctggtgtcacaggattaatatacaatgaagatgttgattcttggagttgcacgaaataaccttgtgattgtgattagttacttcaaagcgttttttggtcttaatgcatggatgggagagtgtcggatgcttcttcatatactatttcttggtccatcaaatctgcttgactcaaatgcaagttttgctcaaatgtggcaaaaataattgtctcaccaattgtcagcgcgcctgtttccagcaaagtttcagagaaggaaaagatggaatgtaactcaaattttggtggccgcacaagtgtggagacttgaattcatatatacttagttaggctcaatattagtgcaaacagttgataaccaagtttttcaattagtatttagttttggctttagagtacacttatgtatgagttatttgacaatatttatttatgagatattgaatggtacttatctatattatattagttacaatgttattaaatatatgtgtatgtatatttctctttcaaattatt

SEQ ID NO: 80078 - DNA, 1230 bp, Zea Mays
gaaaggactgccctaacctcgtgcagtcgtgcccgcttgtttcacttgctcgccttcacccctcgccgccgccgtcgccgccgtcgcaagcgacgatgctcgacatcaacttgttccgcactgacaagggcggcaacccggaccttattcacgagtcccagtgcagtcggttcgcctccgtcgagctcgtcgacgaggtcatcgccctcgacaaggcatggcgcgaaaggcagttcgagctggataagatccggcaggagctcaacgctaccagcaagaagatcgacaagctcaaagctagcaagcaagaagaggaagcaaagaagctcatggaaatttagttggtgtttgttctggctatttgctttccactgaagtaaccgttagactgtagtgtgacatcctaaatattagctccactgtcaactccaaccctgattctcacactcacaatttgattgttggaattctaattgtgctttagggttctatgtgaagatacaaaaaaatattgcattcctattctggtcccgtattgaaattgccagtggtccctctgaattttgatccaattgttataaatttcagatgaactgaataaaactactacttgtaggcaaacaataaaattgtacgggcatttggagagaagagagtagaggataatttgaagaaccacgtggacctttgcaggatgcttgatattgtcgcattggaaaagggattaatatacaatgaagatgttgattcttggagttgcacgaaataaccttgtgattgtgattagttacttcaaagcgttttttggtcttaatgcatggatgggagagtgtcggatgcttcttcatatactatttcttggtccatcaaatctgcttgactcaaatgcaagttttgctcaaatgtggcaaaaataattgtctcaccaattgtcagcgcgcctgtttccagcaaagtttcagagaaggaaaagatggaatgtaactcaaattttggtggccgcacaagtgtggagacttgaattcatatatacttagttaggctcaatattagtgcaaacagttgataaccaagtttttcaattagtatttagttttggctttagagtacacttatgtatgagttatttgacaatatttatttatgagatattgaatggtacttatctatattatattagttacaatgttattaaatatatgtgtatgtatatttctctttcaaattatt

SEQ ID NO: 80079 - DNA, 1378 bp, Zea Mays
gaaaggactgccctaacctcgtgcagtcgtgcccgcttgtttcacttgctcgccttcacccctcgccgccgccgtcgccgccgtcgcaagcgacgatgctcgacatcaacttgttccgcactgacaagggcggcaacccggaccttattcacgagtcccagtgcagtcggttcgcctccgtcgagctcgtcgacgaggtcatcgccctcgacaaggcatggcgcgaaaggcagttcgagctggataagatccggcaggagctcaacgctaccagcaagaagatcgacaagctcaaagctagcaagcaagaagaggaagcaaagaagctcatggaaatttagcaaacaataaaattgtacgggcatttggagagaagagagtagaggataatttgaagaaccacgtggacctttgcaggatgcttgatattgtcgcattggaaaaggacatcttatgatcaaggggacaaatgagatcatgccaactctactccatgtactgctggtgtcacaggattaatatacaatgaagatgttgattcttggagttgcacgaaataaccttgtgattgtgattagttacttcaaagcgttttttggtcttaatgcatggtaagtttattcaccttttatttcatcagacattatgacattccattttgagacaaggatctacaacaattatgtagaagcaatcctttaacaacatatgttacagttaatatattatgttttttctacatgtactcatttgaaacaagtaccagttcattcctcagctgatcttcttgaacaacttatttggttacctgtccttgctaattattattaaggggtgaaatgcagatctataccatgttatgatgtacatgttctttagcccaacaaatgatttttgtgagaactagttttttgtgagatctataccatgttagtccagaagacagtgcatgtctatattccttgttggatgggagagtgtcggatgcttcttcatatactatttcttggtccatcaaatctgcttgactcaaatgcaagttttgctcaaatgtggcaaaaataattgtctcaccaattgtcagcgcgcctgtttccagcaaagtttcagagaaggaaaagatggaatgtaactcaaattttggtggccgcacaagtgtggagacttgaattcatatatacttagttaggctcaatattagtgcaaacagttgataaccaagtttttcaattagtatttagttttggctttagagtacacttatgtatgagttatttgacaatatttatttatgagatattgaatggtacttatctatattatattagttacaatgttattaaatatatgtgtatgtatatttctctttcaaattatt

SEQ ID NO: 80080 - DNA, 4219 bp, Zea Mays
ccccgtaccaggtaccaccacccacccaagcgtcgccggccgccgcgggcgaatccccgcgctggaatcgacaccccgcctgttcgctggactcgctgcctcggcccttctcttcgcacctctctcagcctcgccacccgggtccaattcgccccgcggtataggaatcccatcctagattccatcgaggggctgcaatgccggcacctgcctagctggaaatcgggcgctaacggacaccgggcgccgagatgggccgttccggccgccgcaggcgggaccgcatgcggtggagcaatctctacaccttctcctgctttcgcgcccagcacgagcacgccggcgatgcgggcccctcctccgacggggctggcgccgtcggcgggccgggcttctcgcgcgtcgtgtactgcaacaacgccgccctgcagaagccgctcaagtacatcaccaactacatcaccaccaccaagtacaacgtcgtcaccttcttccccaaggccatcttcgagcagttccgacgcgttgccaacctctacttcctcctcaccgccatcctctctctcaccccggtgtgccccttctctgccgtcagcatgattgctccgctggcatttgtcgttggcctcagcatgatgaaggaggggttggaggactggcgccgcttcatgcaggacatgaaggtgaacaaccgcaatgtcagcgtgcacaagagtgatggcgaattcgactaccggcactgggaggacctttgcgtaggcgatgtggtcagggttgagaaggaccagttcttccctgctgatttactgctactgtcctcaagctatgaggatggcatttgctatgtcgagacaatgaacctcgatggcgagacaaaccttaaggtgaagaggtcacttgaggttacgctgccgttggaagaagacgagtcctttaaagatttccaggcagtgatacgctgtgaggatcccaacccgagcttgtacacattcactggtaactttgagtatgagaggcaggtttacgcccttgatccgtctcagatacttctgcgggactcaaaactaaggaatacagcctttgtctatggagtggtcatttttaccggtcatgacagtaaagtcatgcagaactcaactgagtcgccatccaagaggagcaggattgagaggaagatggatttgatcatatacatcctgtttactgtgctcgtgttgatatcactcattagttcaattggatttgctgtgaggatcaagttagatttgccccgctggtggtacttgcagccacagaaaagcaataagttagatgatccatcacgccctgctctttctgggatattccatctaatcacggctctcattctttatgggtatctgattccaatctcgttgtatgtctcgattgaactggtgaaggtattgcaagcacatttcattaaccaggatattcatatgtttgacgaggagactggcaataccgctcaggcgcgtacatcaaacttgaatgaggaacttggccaagttcatacaatcttgtctgataaaactggtacactgacctgcaatcagatggatttcctgaagtgttcaattgctggagtatcatacggcgtgggttcaagtgaagttgaacttgctgctgcaaagcagatggcgtcaggtgctgatgaccaggatatccctatacaagatatatgggaagagaacaatgaggatcaaatcgagttggtagaaggagttacctttagtgttggcaacaaccgaaagccctccataaaaggcttcagttttgaggatgaccgtctcatgcaagggaactggaccaaggaaccaaattcttccacaattctactcttcttcaggatacttgctctgtgtcacacagcgataccagagataaatgaagcaactggttctattgcctatgaagcagaatcacctgatgagggggcttttctcgtggcagccagggaatttggatttgaatttttcaaacgaacacaatcaagtgtctttgtcagggagaaacacacttcttcgaaaggcacaattgagagggagttcaagattctcaatctattggaattcaatagcaaaagaaaacgaatgactgtaattctgcaggatgaagatggtcaaattcttcttttgtgcaaaggagcagacagcatcatatttgatagattggcaaaaaatggaaggatgtatgaagttgatacaactaagcacctgaatgaatatggtgaggcaggcttgcgaacattggcactatcgtacagggtgcttgatgaatcagaatattcttcttggaatgctgagtttcttaaagcaaagacctctattgggcctgatagagagttgcaacttgaacgtgtctctgagttgattgaaagagagctgatccttgttggtgcaactgctgtagaggacaaattacaaaaaggggttcctcagtgcatagatcgtttggcgcaagcaggtctcaaaatctgggttctgacaggtgacaagatggaaactgcaattaacatcgggtatgcatgcagtttactgaggcaaggcatgaaacaaatatgtttgtccatacccactggtgagcaggtagcccaggatgcaaagaaggctgcaaaggagagtctcctgtcgcaaatcgccaatgggtcacaaatggtcaaactcgagaaggatccagatgcagcattcgctctagttattgatggaaaagctctagcatttgctttggaggatgacatgaagcatatgttcttgaacctggcaatcgagtgtgcttctgttatatgttgccgtgtgtcaccgaagcagaaagcactggtgactcgtctcgtcaaagaaggtataggacaaaccactttagcagtaggtgatggtgcaaatgatgtgggcatgattcaagaagctgatattggagttggtataagtggggtagagggaatgcaggcagtgatggctagtgatttttccatttctcaatttcggtttcttgagagacttcttgtcgtccatggacattggtgctacaagagaatcgcccaaatgatttgctacttcttttacaagaatattgcctttggacttacaatattttactttgaagcattcgctgggttttctgggcaatctgtatacgatgattggtttatgctgcttttcaatgttgttcttacctcgcttcctgttatatcactcggagtttttgagcaagatgtttcgtccgaaatctgcttacagttcccagcattataccagcaagggccaaagaaccttttctttgattggtaccggatccttggatggatggggaacggcctcttctcctctctagctatattcttcctcaatctctgcatattctacgaccaggcaatccgtgctggagggcagactgcggacatggctgcggtgggaactaccatgttcacctgcatcatctgggctgtcaacatctctttgtatggggcagcataacaacttggtatatcttcatcctcgcctacgggatgacattgaggtccggcgacaactaccagatcctgttagaagtccttgggccagctcccatatactgggcagggacgcttctggtgactgctgcttgcaacatcccctacctgatacacatatcctaccagagatcgtgcaatccacttgatcaccatgtgattcaagagatcaagtatctaaagaaagatgtcgaagaccagacaatgtggaagagggagcggtccaaggccaggcagaaaacaaagattggtttcactgcgcgggttgatgcaaagatcaagcagattaagggaaaattgcataagaaaggcccatctttaacaatccaaacggtatcttaggaatctcggtggcctgacaggctcgtcaacagtagttgccactttgttgtttgcttctgcaaggcagtggttttagcttctcagggcaatatagcaaaattcttttcttttttttccttatttctttattccccccgggagtcttttttttatcttcatttgtgtaagaaatgttggggtgtaatcggtggtgttcatcctagtagaagcttcatagccagccgtgtaaaaaatatagctcatttcagttggaaaaacaagctattgatatagctgacaacatatgtatatctgcaattttgattgttccctatcgatatttacggcggtgttggtaatggtagctgtttt

SEQ ID NO: 80081 - DNA, 4251 bp, Zea Mays
ccaccacccacccaagcgtcgccggccgccgcgggcgaatccccgcgctggaatcgacaccccgcctgttcgctggactcgctgcctcggcccttctcttcgcacctctctcagcctcgccacccgggtccaattcgccccgcggtataggaatcccatcctagattccatcgaggggctgcaatgccggcacctgcctagctggaaatcgggcgctaacggacaccgggcgccgagatgggccgttccggccgccgcaggcgggaccgcatgcggtggagcaatctctacaccttctcctgctttcgcgcccagcacgagcacgccggcgatgcgggcccctcctccgacggggctggcgccgtcggcgggccgggcttctcgcgcgtcgtgtactgcaacaacgccgccctgcagaagccgctcaagtacatcaccaactacatcaccaccaccaagtacaacgtcgtcaccttcttccccaaggccatcttcgagcagttccgacgcgttgccaacctctacttcctcctcaccgccatcctctctctcaccccggtgtgccccttctctgccgtcagcatgattgctccgctggcatttgtcgttggcctcagcatgatgaaggaggggttggaggactggcgccgcttcatgcaggacatgaaggtgaacaaccgcaatgtcagcgtgcacaagagtgatggcgaattcgactaccggcactgggaggacctttgcgtaggcgatgtggtcagggttgagaaggaccagttcttccctgctgatttactgctactgtcctcaagctatgaggatggcatttgctatgtcgagacaatgaacctcgatggcgagacaaaccttaaggtgaagaggtcacttgaggttacgctgccgttggaagaagacgagtcctttaaagatttccaggcagtgatacgctgtgaggatcccaacccgagcttgtacacattcactggtaactttgagtatgagaggcaggtttacgcccttgatccgtctcagatacttctgcgggactcaaaactaaggaatacagcctttgtctatggagtggtcatttttaccggtcatgacagtaaagtcatgcagaactcaactgagtcgccatccaagaggagcaggattgagaggaagatggatttgatcatatacatcctgtttactgtgctcgtgttgatatcactcattagttcaattggatttgctgtgaggatcaagttagatttgccccgctggtggtacttgcagccacagaaaagcaataagttagatgatccatcacgccctgctctttctgggatattccatctaatcacggctctcattctttatgggtatctgattccaatctcgttgtatgtctcgattgaactggtgaaggtattgcaagcacatttcattaaccaggatattcatatgtttgacgaggagactggcaataccgctcaggcgcgtacatcaaacttgaatgaggaacttggccaagttcatacaatcttgtctgataaaactggtacactgacctgcaatcagatggatttcctgaagtgttcaattgctggagtatcatacggcgtgggttcaagtgaagttgaacttgctgctgcaaagcagatggcgtcaggtgctgatgaccaggatatccctatacaagatatatgggaagagaacaatgaggatcaaatcgagttggtagaaggagttacctttagtgttggcaacaaccgaaagccctccataaaaggcttcagttttgaggatgaccgtctcatgcaagggaactggaccaaggaaccaaattcttccacaattctactcttcttcaggatacttgctctgtgtcacacagcgataccagagataaatgaagcaactggttctattgcctatgaagcagaatcacctgatgagggggcttttctcgtggcagccagggaatttggatttgaatttttcaaacgaacacaatcaagtgtctttgtcagggagaaacacacttcttcgaaaggcacaattgagagggagttcaagattctcaatctattggaattcaatagcaaaagaaaacgaatgactgtaattctgcaggatgaagatggtcaaattcttcttttgtgcaaaggagcagacagcagcatcatatttgatagattggcaaaaaatggaaggatgtatgaagttgatacaactaagcacctgaatgaatatggtgaggcaggcttgcgaacattggcactatcgtacagggtgcttgatgaatcagaatattcttcttggaatgctgagtttcttaaagcaaagacctctattgggcctgatagagagttgcaacttgaacgtgtctctgagttgattgaaagagagctgatccttgttggtgcaactgctgtagaggacaaattacaaaaaggggttcctcagtgcatagatcgtttggcgcaagcaggtctcaaaatctgggttctgacaggtgacaagatggaaactgcaattaacatcgggtatgcatgcagtttactgaggcaaggcatgaaacaaatatgtttgtccatacccactggtgagcaggtagcccaggatgcaaagaaggctgcaaaggagagtctcctgtcgcaaatcgccaatgggtcacaaatggtcaaactcgagaaggatccagatgcagcattcgctctagttattgatggaaaagctctagcatttgctttggaggatgacatgaagcatatgttcttgaacctggcaatcgagtgtgcttctgttatatgttgccgtgtgtcaccgaagcagaaagcactggtgactcgtctcgtcaaagaaggtataggacaaaccactttagcagtaggtgatggtgcaaatgatgtgggcatgattcaagaagctgatattggagttggtataagtggggtagagggaatgcaggcagtgatggctagtgatttttccatttctcaatttcggtttcttgagagacttcttgtcgtccatggacattggtgctacaagagaatcgcccaaatgatttgctacttcttttacaagaatattgcctttggacttacaatattttactttgaagcattcgctgggttttctgggcaatctgtatacgatgattggtttatgctgcttttcaatgttgttcttacctcgcttcctgttatatcactcggagtttttgagcaagatgtttcgtccgaaatctgcttacagttcccagcattataccagcaagggccaaagaaccttttctttgattggtaccggatccttggatggatggggaacggcctcttctcctctctagctatattcttcctcaatctctgcatattctacgaccaggcaatccgtgctggagggcagactgcggacatggctgcggtgggaactaccatgttcacctgcatcatctgggctgtcaacatacagattgccctaacaatgagccatttcacatggattcaacatctctttgtatggggcagcataacaacttggtatatcttcatcctcgcctacgggatgacattgaggtccggcgacaactaccagatcctgttagaagtccttgggccagctcccatatactgggcagggacgcttctggtgactgctgcttgcaacatcccctacctgatacacatatcctaccagagatcgtgcaatccacttgatcaccatgtgattcaagagatcaagtatctaaagaaagatgtcgaagaccagacaatgtggaagagggagcggtccaaggccaggcagaaaacaaagattggtttcactgcgcgggttgatgcaaagatcaagcagattaagggaaaattgcataagaaaggcccatctttaacaatccaaacggtatcttaggaatctcggtggcctgacaggctcgtcaacagtagttgccactttgttgtttgcttctgcaaggcagtggttttagcttctcagggcaatatagcaaaattcttttcttttttttccttatttctttattccccccgggagtcttttttttatcttcatttgtgtaagaaatgttggggtgtaatcggtggtgttcatcctagtagaagcttcatagccagccgtgtaaaaaatatagctcatttcagttggaaaaacaagctattgatatagctgacaacatatgtatatctgcaattttgattgttccctatcgatatttacggcggtgttggtaatggtagctgtttt

SEQ ID NO: 80082 - DNA, 4266 bp, Zea Mays
caagcgtcgccggccgccgcgggcgaatccccgcgctggaatcgacaccccgcctgttcgctggactcgctgcctcggcccttctcttcgcacctctctcagcctcgccacccgggtccaattcgccccgcggtataggaatcccatcctagattccatcgaggggctgcaatgccggcacctgcctagctggaaatcgggcgctaacggacaccgggcgccgagatgggccgttccggccgccgcaggcgggaccgcatgcggtggagcaatctctacaccttctcctgctttcgcgcccagcacgagcacgccggcgatgcgggcccctcctccgacggggctggcgccgtcggcgggccgggcttctcgcgcgtcgtgtactgcaacaacgccgccctgcagaagccgctcaagtacatcaccaactacatcaccaccaccaagtacaacgtcgtcaccttcttccccaaggccatcttcgagcagttccgacgcgttgccaacctctacttcctcctcaccgccatcctctctctcaccccggtgtgccccttctctgccgtcagcatgattgctccgctggcatttgtcgttggcctcagcatgatgaaggaggggttggaggactggcgccgcttcatgcaggacatgaaggtgaacaaccgcaatgtcagcgtgcacaagagtgatggcgaattcgactaccggcactgggaggacctttgcgtaggcgatgtggtcagggttgagaaggaccagttcttccctgctgatttactgctactgtcctcaagctatgaggatggcatttgctatgtcgagacaatgaacctcgatggcgagacaaaccttaaggtgaagaggtcacttgaggttacgctgccgttggaagaagacgagtcctttaaagatttccaggcagtgatacgctgtgaggatcccaacccgagcttgtacacattcactggtaactttgagtatgagaggcaggtttacgcccttgatccgtctcagatacttctgcgggactcaaaactaaggaatacagcctttgtctatggagtggtcatttttaccggtcatgacagtaaagtcatgcagaactcaactgagtcgccatccaagaggagcaggattgagaggaagatggatttgatcatatacatcctgtttactgtgctcgtgttgatatcactcattagttcaattggatttgctgtgaggatcaagttagatttgccccgctggtggtacttgcagccacagaaaagcaataagttagatgatccatcacgccctgctctttctgggatattccatctaatcacggctctcattctttatgggtatctgattccaatctcgttgtatgtctcgattgaactggtgaaggtattgcaagcacatttcattaaccaggatattcatatgtttgacgaggagactggcaataccgctcaggcgcgtacatcaaacttgaatgaggaacttggccaagttcatacaatcttgtctgataaaactggtacactgacctgcaatcagatggatttcctgaagtgttcaattgctggagtatcatacggcgtgggttcaagtgaagttgaacttgctgctgcaaagcagatggcgtcaggtgctgatgaccaggatatccctatacaagatatatgggaagagaacaatgaggatcaaatcgagttggtagaaggagttacctttagtgttggcaacaaccgaaagccctccataaaaggcttcagttttgaggatgaccgtctcatgcaagggaactggaccaaggaaccaaattcttccacaattctactcttcttcaggatacttgctctgtgtcacacagcgataccagagataaatgaagcaactggttctattgcctatgaagcagaatcacctgatgagggggcttttctcgtggcagccagggaatttggatttgaatttttcaaacgaacacaatcaagtgtctttgtcagggagaaacacacttcttcgaaaggcacaattgagagggagttcaagattctcaatctattggaattcaatagcaaaagaaaacgaatgactgtaattctgcaggatgaagatggtcaaattcttcttttgtgcaaaggagcagacagcatcatatttgatagattggcaaaaaatggaaggatgtatgaagttgatacaactaagcacctgaatgaatatggtgaggcaggcttgcgaacattggcactatcgtacagggtgcttgatgaatcagaatattcttcttggaatgctgagtttcttaaagcaaagacctctattgggcctgatagagagttgcaacttgaacgtgtctctgagttgattgaaagagagctgatccttgttggtgcaactgctgtagaggacaaattacaaaaaggggttcctcagtgcatagatcgtttggcgcaagcaggtctcaaaatctgggttctgacaggtgacaagatggaaactgcaattaacatcgggtatgcatgcagtttactgaggcaaggcatgaaacaaatatgtttgtccatacccactggtgagcaggtagcccaggatgcaaagaaggctttactttcatctttgacaactgagcaggctgcaaaggagagtctcctgtcgcaaatcgccaatgggtcacaaatggtcaaactcgagaaggatccagatgcagcattcgctctagttattgatggaaaagctctagcatttgctttggaggatgacatgaagcatatgttcttgaacctggcaatcgagtgtgcttctgttatatgttgccgtgtgtcaccgaagcagaaagcactggtgactcgtctcgtcaaagaaggtataggacaaaccactttagcagtaggtgatggtgcaaatgatgtgggcatgattcaagaagctgatattggagttggtataagtggggtagagggaatgcaggcagtgatggctagtgatttttccatttctcaatttcggtttcttgagagacttcttgtcgtccatggacattggtgctacaagagaatcgcccaaatgatttgctacttcttttacaagaatattgcctttggacttacaatattttactttgaagcattcgctgggttttctgggcaatctgtatacgatgattggtttatgctgcttttcaatgttgttcttacctcgcttcctgttatatcactcggagtttttgagcaagatgtttcgtccgaaatctgcttacagttcccagcattataccagcaagggccaaagaaccttttctttgattggtaccggatccttggatggatggggaacggcctcttctcctctctagctatattcttcctcaatctctgcatattctacgaccaggcaatccgtgctggagggcagactgcggacatggctgcggtgggaactaccatgttcacctgcatcatctgggctgtcaacatacagattgccctaacaatgagccatttcacatggattcaacatctctttgtatggggcagcataacaacttggtatatcttcatcctcgcctacgggatgacattgaggtccggcgacaactaccagatcctgttagaagtccttgggccagctcccatatactgggcagggacgcttctggtgactgctgcttgcaacatcccctacctgatacacatatcctaccagagatcgtgcaatccacttgatcaccatgtgattcaagagatcaagtatctaaagaaagatgtcgaagaccagacaatgtggaagagggagcggtccaaggccaggcagaaaacaaagattggtttcactgcgcgggttgatgcaaagatcaagcagattaagggaaaattgcataagaaaggcccatctttaacaatccaaacggtatcttaggaatctcggtggcctgacaggctcgtcaacagtagttgccactttgttgtttgcttctgcaaggcagtggttttagcttctcagggcaatatagcaaaattcttttcttttttttccttatttctttattccccccgggagtcttttttttatcttcatttgtgtaagaaatgttggggtgtaatcggtggtgttcatcctagtagaagcttcatagccagccgtgtaaaaaatatagctcatttcagttggaaaaacaagctattgatatagctgacaacatatgtatatctgcaattttgattgttccctatcgatatttacggcggtgttggtaatggtagctgtttt

SEQ ID NO: 80083 - DNA, 4096 bp, Zea Mays
aggaatcccatcctagattccatcgaggggctgcaatgccggcacctgcctagctggaaatcgggcgctaacggacaccgggcgccgagatgggccgttccggccgccgcaggcgggaccgcatgcggtggagcaatctctacaccttctcctgctttcgcgcccagcacgagcacgccggcgatgcgggcccctcctccgacggggctggcgccgtcggcgggccgggcttctcgcgcgtcgtgtactgcaacaacgccgccctgcagaagccgctcaagtacatcaccaactacatcaccaccaccaagtacaacgtcgtcaccttcttccccaaggccatcttcgagcagttccgacgcgttgccaacctctacttcctcctcaccgccatcctctctctcaccccggtgtgccccttctctgccgtcagcatgattgctccgctggcatttgtcgttggcctcagcatgatgaaggaggggttggaggactggcgccgcttcatgcaggacatgaaggtgaacaaccgcaatgtcagcgtgcacaagagtgatggcgaattcgactaccggcactgggaggacctttgcgtaggcgatgtggtcagggttgagaaggaccagttcttccctgctgatttactgctactgtcctcaagctatgaggatggcatttgctatgtcgagacaatgaacctcgatggcgagacaaaccttaaggtgaagaggtcacttgaggttacgctgccgttggaagaagacgagtcctttaaagatttccaggcagtgatacgctgtgaggatcccaacccgagcttgtacacattcactggtaactttgagtatgagaggcaggtttacgcccttgatccgtctcagatacttctgcgggactcaaaactaaggaatacagcctttgtctatggagtggtcatttttaccggtcatgacagtaaagtcatgcagaactcaactgagtcgccatccaagaggagcaggattgagaggaagatggatttgatcatatacatcctgtttactgtgctcgtgttgatatcactcattagttcaattggatttgctgtgaggatcaagttagatttgccccgctggtggtacttgcagccacagaaaagcaataagttagatgatccatcacgccctgctctttctgggatattccatctaatcacggctctcattctttatgggtatctgattccaatctcgttgtatgtctcgattgaactggtgaaggtattgcaagcacatttcattaaccaggatattcatatgtttgacgaggagactggcaataccgctcaggcgcgtacatcaaacttgaatgaggaacttggccaagttcatacaatcttgtctgataaaactggtacactgacctgcaatcagatggatttcctgaagtgttcaattgctggagtatcatacggcgtgggttcaagtgaagttgaacttgctgctgcaaagcagatggcgtcaggtgctgatgaccaggatatccctatacaagatatatgggaagagaacaatgaggatcaaatcgagttggtagaaggagttacctttagtgttggcaacaaccgaaagccctccataaaaggcttcagttttgaggatgaccgtctcatgcaagggaactggaccaaggaaccaaattcttccacaattctactcttcttcaggatacttgctctgtgtcacacagcgataccagagataaatgaagcaactggttctattgcctatgaagcagaatcacctgatgagggggcttttctcgtggcagccagggaatttggatttgaatttttcaaacgaacacaatcaagtgtctttgtcagggagaaacacacttcttcgaaaggcacaattgagagggagttcaagattctcaatctattggaattcaatagcaaaagaaaacgaatgactgtaattctgcaggatgaagatggtcaaattcttcttttgtgcaaaggagcagacagcatcatatttgatagattggcaaaaaatggaaggatgtatgaagttgatacaactaagcacctgaatgaatatggtgaggcaggcttgcgaacattggcactatcgtacagggtgcttgatgaatcagaatattcttcttggaatgctgagtttcttaaagcaaagacctctattgggcctgatagagagttgcaacttgaacgtgtctctgagttgattgaaagagagctgatccttgttggtgcaactgctgtagaggacaaattacaaaaaggggttcctcagtgcatagatcgtttggcgcaagcaggtctcaaaatctgggttctgacaggtgacaagatggaaactgcaattaacatcgggtatgcatgcagtttactgaggcaaggcatgaaacaaatatgtttgtccatacccactggtgagcaggtagcccaggatgcaaagaaggctgcaaaggagagtctcctgtcgcaaatcgccaatgggtcacaaatggtcaaactcgagaaggatccagatgcagcattcgctctagttattgatggaaaagctctagcatttgctttggaggatgacatgaagcatatgttcttgaacctggcaatcgagtgtgcttctgttatatgttgccgtgtgtcaccgaagcagaaagcactggtgactcgtctcgtcaaagaaggtataggacaaaccactttagcagtaggtgatggtgcaaatgatgtgggcatgattcaagaagctgatattggagttggtataagtggggtagagggaatgcagtgatggctagtgatttttccatttctcaatttcggtttcttgagagacttcttgtcgtccatggacattggtgctacaagagaatcgcccaaatgatttgctacttcttttacaagaatattgcctttggacttacaatattttactttgaagcattcgctgggttttctgggcaatctgtatacgatgattggtttatgctgcttttcaatgttgttcttacctcgcttcctgttatatcactcggagtttttgagcaagatgtttcgtccgaaatctgcttacagttcccagcattataccagcaagggccaaagaaccttttctttgattggtaccggatccttggatggatggggaacggcctcttctcctctctagctatattcttcctcaatctctgcatattctacgaccaggcaatccgtgctggagggcagactgcggacatggctgcggtgggaactaccatgttcacctgcatcatctgggctgtcaacatacagattgccctaacaatgagccatttcacatggattcaacatctctttgtatggggcagcataacaacttggtatatcttcatcctcgcctacgggatgacattgaggtccggcgacaactaccagatcctgttagaagtccttgggccagctcccatatactgggcagggacgcttctggtgactgctgcttgcaacatcccctacctgatacacatatcctaccagagatcgtgcaatccacttgatcaccatgtgattcaagagatcaagtatctaaagaaagatgtcgaagaccagacaatgtggaagagggagcggtccaaggccaggcagaaaacaaagattggtttcactgcgcgggttgatgcaaagatcaagcagattaagggaaaattgcataagaaaggcccatctttaacaatccaaacggtatcttaggaatctcggtggcctgacaggctcgtcaacagtagttgccactttgttgtttgcttctgcaaggcagtggttttagcttctcagggcaatatagcaaaattcttttcttttttttccttatttctttattccccccgggagtcttttttttatcttcatttgtgtaagaaatgttggggtgtaatcggtggtgttcatcctagtagaagcttcatagccagccgtgtaaaaaatatagctcatttcagttggaaaaacaagctattgatatagctgacaacatatgtatatctgcaattttgattgttccctatcgatatttacggcggtgttggtaatggtagctgtttt

SEQ ID NO: 80084 - DNA, 1065 bp, Zea Mays
ctcaactcttgcaggaacaagattttggtttcatctccctgcaggccatacacacagttcccagcattataccagcaagggccaaagaaccttttctttgattggtaccggatccttggatggatggggaacggcctcttctcctctctagctatattcttcctcaatctctgcatattctacgaccaggcaatccgtgctggagggcagactgcggacatggctgcggtgggaactaccatgttcacctgcatcatctgggctgtcaacatacagattgccctaacaatgagccatttcacatggattcaacatctctttgtatggggcagcataacaacttggtatatcttcatcctcgcctacgggatgacattgaggtccggcgacaactaccagatcctgttagaagtccttgggccagctcccatatactgggcagggacgcttctggtgactgctgcttgcaacatcccctacctgatacacatatcctaccagagatcgtgcaatccacttgatcaccatgtgattcaagagatcaagtatctaaagaaagatgtcgaagaccagacaatgtggaagagggagcggtccaaggccaggcagaaaacaaagattggtttcactgcgcgggttgatgcaaagatcaagcagattaagggaaaattgcataagaaaggcccatctttaacaatccaaacggtatcttaggaatctcggtggcctgacaggctcgtcaacagtagttgccactttgttgtttgcttctgcaaggcagtggttttagcttctcagggcaatatagcaaaattcttttcttttttttccttatttctttattccccccgggagtcttttttttatcttcatttgtgtaagaaatgttggggtgtaatcggtggtgttcatcctagtagaagcttcatagccagccgtgtaaaaaatatagctcatttcagttggaaaaacaagctattgatatagctgacaacatatgtatatctgcaattttgattgttccctatcgatatttacggcggtgttggtaatggtagctgtttt

SEQ ID NO: 80085 - DNA, 1045 bp, Zea Mays
gttgataaaaagagggggagaggcctcacagcccaagttcccagcattataccagcaagggccaaagaaccttttctttgattggtaccggatccttggatggatggggaacggcctcttctcctctctagctatattcttcctcaatctctgcatattctacgaccaggcaatccgtgctggagggcagactgcggacatggctgcggtgggaactaccatgttcacctgcatcatctgggctgtcaacatacagattgccctaacaatgagccatttcacatggattcaacatctctttgtatggggcagcataacaacttggtatatcttcatcctcgcctacgggatgacattgaggtccggcgacaactaccagatcctgttagaagtccttgggccagctcccatatactgggcagggacgcttctggtgactgctgcttgcaacatcccctacctgatacacatatcctaccagagatcgtgcaatccacttgatcaccatgtgattcaagagatcaagtatctaaagaaagatgtcgaagaccagacaatgtggaagagggagcggtccaaggccaggcagaaaacaaagattggtttcactgcgcgggttgatgcaaagatcaagcagattaagggaaaattgcataagaaaggcccatctttaacaatccaaacggtatcttaggaatctcggtggcctgacaggctcgtcaacagtagttgccactttgttgtttgcttctgcaaggcagtggttttagcttctcagggcaatatagcaaaattcttttcttttttttccttatttctttattccccccgggagtcttttttttatcttcatttgtgtaagaaatgttggggtgtaatcggtggtgttcatcctagtagaagcttcatagccagccgtgtaaaaaatatagctcatttcagttggaaaaacaagctattgatatagctgacaacatatgtatatctgcaattttgattgttccctatcgatatttacggcggtgttggtaatggtagctgtttt

SEQ ID NO: 80086 - DNA, 1008 bp, Zea Mays
ggcgctgaggagaaacggtggtgctcgcggaggagaggaagaggtctgggcgtgcggccagcactgccatcacccgacacgtgacagagcatgcgccatgtctctaggtccacggcgagcccttggaggaccaatgttgctgaggttgaaattaagaaagctgaaccaaagaaacctggcgctggtgattcaagctcaaacggaagacacagccgtggtggtggtcatcgtgattcataccgtggtagtggtgtttctgtgaacagcggtggcggctatggatatggtggtggttaccgatcagctgctgcagcatattatggcagcacagcatatggtgcctatggcagagggtatggatatggtgctacttctggctatggctcaggttatggctctgcatatggtggctccatgtatggaggtccatatggtgcctacgggtcatatggtggtgcctatggaggtggtgcgtatggtgctccaggagggtatggtgggggaggatatggcagctacggtggtgctggaggcatgggtgggggtggcagcgctggtggtcggggctccagcagataccacccttatgggaaatgatcatccattctgtgtttctctaggatctgataataaagccatacctttcctcgtttctgctactgagaaaatggaacattccattcgtcttgttgaatcagcggcatctggacatttttttccttggaacttgcattgcacatcaacgattctatagtctatagtcgctgaaccctgaaccgcccccaccccgagctttctgtagaagctgcagctgaaattctcgtagtctggcatgagccttagaatgcccttgaaactattatctttgtggtagtaacattatggtgtaatggaacagatgtacgttgttgtaacattcactcactgatcagagacttgctatctctacatatgtggagagaagctttgcaaatgattgactgatactattaaattgtgtgggttgct

SEQ ID NO: 80087 - DNA, 453 bp, Zea Mays
tacaattccgcataggctttgggtctctgttcgtgcttcttgcaagtggtgtttatgtctgatgactggctatgggccgtgtgtgcttgtgttctgcatcccgagttgtagacttggttatgacagatcctcaaagctgttgtcctaacgaatatagagcatttgaacttattctagaacgatgtatgggagcaaccgagttaaagcaacgtttccttccaggtctgcattatatatcatcaatctaaatccctgttccctatgtttctgcttattccaggtctgcttatttattactccctccgtttcgttttagttgtcgctgaatagtgtaaaattgaactatctaacgacaattaaaaagaaacggagggagtatgtattaccaacatattttgctgttttatggcgtgcattgtgagtgaaggatgatctggttgggcacatgatgtt

SEQ ID NO: 80088 - DNA, 2458 bp, Zea Mays
cccggcggccaagctgtccatgaatgaactagtcacaactcacaagtacgggagagaaaaagaagaagaagaaaaatacacaaggaataattcaacagctaggtactagtgtagtagtagtactacgtaccaaaacgaggtcgttgccgtgttgcgtggcctgaggttgtcctcaacgcaaaggcaaagccaaccagagccagccagccagccagcggctccatcccctcctgccgtgctgccaggagcttggcatctgcggctatgcaatctcggccgtcctgatcgagcagcgcggggccgagagatggagggtgtttcgtcgtctgccgccggaggttcttcttcggcagcagcggtgcagggcggccggggccgggagcccgggcccgggagggtgggcgcgaccaacatcggcaggctgcggcaggggaagcagcagcacgccacgaggcccggcgtcggggccattagcgtcacgtcctggcacctccgggtgttcgcggccgtcgtcgccctcatgggctgcctcctgctcgccgcctccctcgccatgtccgcgctccaccaggtacagttcaggaacgccgccatctccaggaacttcaggggcctccaggagcttaagcaaagcatcgtgaggagggaaccagtggagcagatcatgcatgcaaggcttctgcaaatggccacttcagctctcacaaagaacggctctgaatccgaggatttcgcgctatgggaagagccctacaagcaagcgcggaaatggaagccctgcgctgcgaagcatagcttggctgacgaagaccctgatgatgagaccaacaacggtttcgtgctggtcagcgcaaacggtggcctgaaccagcagcgtgtcgctgtgtgcaatgctgttgtcgtcgccgctctgctcaatgccacgctagtagtcccacggttcctctacagcagcgtgtggaaggacacaagtcagtttggcgacatctaccaggaagactacttcgtgaagtacatgaagaacgatgtccgaatcgtgaaagaactgccagcccgccttcggtcgctggacctcgaagcaatcggcagccagatcactgacatggagatctcgaaagaggccgatccatctgagttcgtcaaatcgatcctcccaatccttgagcaaaacggcgtcgttcacttcctcgggttcggaaaccggctgggcttcgactcggtacctgttcatctgcagaggctgaggtgcagatgcaacttccacgctctcaagttcgtcccagagctccagcgagcaggctccgtgctggtccagcggctgcgccaggtgggtgggatgcagaccgagatggacaagcagctgttcggcaacaacatgctcgaccaggccttcgccgagaaggacgacggcgccgacaccggcaccggcaccgccacgcccaacaggtacctcgccctccatatgaggttcgaggaggacatggtggcctactcgctgtgcgaattcggcggcggcgaggaggagaggagggaactgcaggcctacagggagacccacttccccacactcgcgctgcgctcccggaacaccacggtttcgccggaggagcagcgtagcctggggaggtgcccgctgacgccggaggaagcgggtctcgtcctctccgcgctcggctacgaccgccggacgtttatctacgtggccgggtcgcagatatacggcggcacgccacggctgcggcccctgacgcggctgtacccgaatctggtcaccaaggaggataccctcaccgccgacgagctggccccgttcaagaatttctcttcacggcttgcggccttggacttcatcgcgtgcgcctcggcggacgtgttcgcggtgacggactccggcagccagctgtcgtcgctggtgtccgggtaccgcatctaccacggcaggggccgcgcgccgacgctgcacccgaaccggaagcgctacgcgcaggtgctttccgaggaagggagcattgcgtggggcgggttccagaagagggtgaggcagatggtggacgagtacaagcgggtgagcccgcgcccgaggggccggagcgtctacaggcagccgaggacgccggggtgcatgtgcagggccggcggcgacggcagcgtccacttctgacgcacgcgtttgcagcagcgtcggtttcttggggatcaagcggccggctgctctgttccattaattctttcctacacgtttttttttttgcatagattttatgctccttaactttggtgggtccttttagcagctcaggatacgtggcgggataggtgacaaattttgagtcctacggcatggttcttacttcttagaggttctaaacacagctatacgcctttaccgacaggtttggtgtacatagggaaataagtacaaaatgttgagccgcaaaacaggcggccggacggtccg

SEQ ID NO: 80089 - DNA, 1347 bp, Zea Mays
cactatacgacggttgatctttagcgacccttattagggacagacggttggtcgctaaaagttatgtaccgacagttggtcgctaaatgcatttgtagcgacgggccatcggtcgctaaaagtctagaaatttaactactcaaggttggtcgctatagagacaggtggacatccggcggttggttgctattgattgacatgtgactgttggtggctaaaaaaatttggcccgaacaggcccaactcagcaactcgtccaaatcaaaatcacttctattgaaaaaagcaaaccctaccccctcttctccccttctctcgacggcgccaccatgccgcctccgccctcaaccctagccgccagggcaacaacagtagcaccgcagggcgtaggtggcagagcagggacgcggattccgactgacacttcgtcgtcaagctctcgccatttgtaactccttgctccgccgacctcgacgcaaactacaacttctcgctcgcgcctatccaggatccgctctcgccatggttgcagggacggacccaaataggggaccaagcattcccttagagtttgcacgcttgctgatgcagtgcaagcctgcaacatgcagaggtgcgctagtgccaggtgcggcgagtcagcagatcaaggaaaccgcccgcggccgccccaggggtccaggtctcctcacggcgacgggagagcgcgagccaatgtggagcgaatgttgcatttgacaaatgactactctcaggcctgcaaactgcacattacaacgtgaagttggttattgaaagggcgcccatagctgcaaacatagctgtgaccacatgatgatgacgatttactacagcaggcacttgcaatgtcaatggagggtggtgcttcaggatctgcagctgtgactgactctgctatggcagaagctagtgcagttgaccctgacttagcgttggcttcctggtgttgatcccaatgatccatctgttaaagatttgttggcatcattgcacaaccagggagagcaagagaagaaggaagacaagtaagacaaaacagaagacgagaagaactgcttcaagctggagtgatgtcgctgtggtgcttttgtgactgatcatctctggagcttttgtgaatgatctagctagctatttgtaaatgatctagttgtgaatgatattataattgtgatacttttgtgaatatataattgtggtgcttttgtgtttatgtgatggatttatgactgtggtatactgattaactgtgtatgtctttatgatttgtgtataaaaatctgtgatttgtggtgcttaattaaatgtatattttttattaataac

SEQ ID NO: 80090 - DNA, 1608 bp, Zea Mays
cgacggttgatctttagcgacccttattagggacagacggttggtcgctaaaagttatgtaccgacagttggtcgctaaatgcatttgtagcgacgggccatcggtcgctaaaagtctagaaatttaactactcaaggttggtcgctatagagacaggtggacatccggcggttggttgctattgattgacatgtgactgttggtggctaaaaaaatttggcccgaacaggcccaactcagcaactcgtccaaatcaaaatcacttctattgaaaaaagcaaaccctaccccctcttctccccttctctcgacggcgccaccatgccgcctccgccctcaaccctagccgccagggcaacaacagtagcaccgcagggcgtaggtggcagagcagggacgcggattccgactgacacttcgtcgtcaagctctcgccatttgtaactccttgctccgccgacctcgacgcaaactacaacttctcgctcgcgcctatccaggatccgctctcgccatgtgcaagcctgcaacatgcagaggtgcgctagtgccaggtgcggcgagtcagcagatcaaggaaaccgcccgcggccgccccaggggtccaggtctcctcacggcgacgggagagcgcgagccaatgtggagcggttagttggtcgctgctgccaattgttctgcgcttataaaatttcaaggttgttacatttgaattgttattggaaatttcaagtgctccagtatatttattgccagagataaaagcatatgccttggtaactttggtcttgccaatgtattgacatcagatgatcttgtgtcttctataagtatacttgaaaaatttttagtcttgcatttatttgctggtgtttcttgttaccgtattttctccaacaaaggtggtagtaacaccgagttatatgtgcctagaacttcttgctgatataccatatggtactaaatccaatatttggtctctagaatgttgcatttgacaaatgactactctcaggcctgcaaactgcacattacaacgtgaagttggttattgaaagggcgcccatagctgcaaacatagctgtgaccacatgatgatgacgatttactacagcaggcacttgcaatgtcaatggagggtggtgcttcaggatctgcagctgtgactgactctgctatggcagaagctagtgcagttgaccctgacttagcgttggcttcctggtgttgatcccaatgatccatctgttaaagatttgttggcatcattgcacaaccagggagagcaagagaagaaggaagacaagtaagacaaaacagaagacgagaagaactgcttcaagctggagtgatgtcgctgtggtgcttttgtgactgatcatctctggagcttttgtgaatgatctagctagctatttgtaaatgatctagttgtgaatgatattataattgtgatacttttgtgaatatataattgtggtgcttttgtgtttatgtgatggatttatgactgtggtatactgattaactgtgtatgtctttatgatttgtgtataaaaatctgtgatttgtggtgcttaattaaatgtatattttttattaataac

SEQ ID NO: 80091 - DNA, 996 bp, Zea Mays
ggtggctaaaaaaatttggcccgaacaggcccaactcagcaactcgtccaaatcaaaatcacttctattgaaaaaagcaaaccctaccccctcttctccccttctctcgacggcgccaccatgccgcctccgccctcaaccctagccgccagggcaacaacagtagcaccgcagggcgtaggtggcagagcagggacgcggattccgactgacacttcgtcgtcaagctctcgccatttgtaactccttgctccgccgacctcgacgcaaactacaacttctcgctcgcgcctatccaggatccgctctcgccatggttgcagggacggacccaaataggggaccaagcattcccttagagtttgcacgcttgctgatgcagtgcaagcctgcaacatgcagaggtgcgctagtgccaggtgcggcgagtcagcagatcaaggaaaccgcccgcggccgccccaggggtccaggtctcctcacggcgacgggagagcgcgagccaatgtggtagtaacaccgagttatatgtgcctagaacttcttgctgatataccatatggtactaaatccaatatttggtctctaggtgtgtaccacttcagtgtcataaactatgtttctgcacctagatagaatgagcttgcgatctaatacttgaattttacagaatgttgcatttgacaaatgactactctcaggcctgcaaactgcacattacaacgtgaagttggttattgaaagggcgcccatagctgcaaacatagctgtgaccacatgatgatgacgatttactacagcaggcacttgcaatgtcaatggagggtggtgcttcaggatctgcagctgtgactgactctgctatggcagaagctagtgcagttgaccctgacttagcgttggcttcctggtgttgatcccaatgatccatctgttaaagatttgttggcatcattgcacaaccagggagagcatatggagttctttatgttccac

SEQ ID NO: 80092 - DNA, 1274 bp, Zea Mays
cccaactcagcaactcgtccaaatcaaaatcacttctattgaaaaaagcaaaccctaccccctcttctccccttctctcgacggcgccaccatgccgcctccgccctcaaccctagccgccagggcaacaacagtagcaccgcagggcgtaggtggcagagcagggacgcggattccgactgacacttcgtcgtcaagctctcgccatttgtaactccttgctccgccgacctcgacgcaaactacaacttctcgctcgcgcctatccaggatccgctctcgccatgaggtgcgctagtgccaggtgcggcgagtcagcagatcaaggaaaccgcccgcggccgccccaggggtccaggtctcctcacggcgacgggagagcgcgagccaatgtggagcgtgctccagtatatttattgccagagataaaagcatatgccttggtaactttggtcttgccaatgtattgacatcagatgatcttgtgtcttctataagtatacttgaaaaatttttagtcttgcatttatttgctggtgtttcttgttaccgtattttctccaacaaaggtggtagtaacaccgagttatatgtgcctagaacttcttgctgatataccatatggtactaaatccaatatttggtctctagaatgttgcatttgacaaatgactactctcaggcctgcaaactgcacattacaacgtgaagttggttattgaaagggcgcccatagctgcaaacatagctgtgaccacatgatgatgacgatttactacagcaggcacttgcaatgtcaatggagggtggtgcttcaggatctgcagctgtgactgactctgctatggcagaagctagtgcagttgaccctgacttagcgttggcttcctggtgttgatcccaatgatccatctgttaaagatttgttggcatcattgcacaaccagggagagcaagagaagaaggaagacaagtaagacaaaacagaagacgagaagaactgcttcaagctggagtgatgtcgctgtggtgcttttgtgactgatcatctctggagcttttgtgaatgatctagctagctatttgtaaatgatctagttgtgaatgatattataattgtgatacttttgtgaatatataattgtggtgcttttgtgtttatgtgatggatttatgactgtggtatactgattaactgtgtatgtctttatgatttgtgtataaaaatctgtgatttgtggtgcttaattaaatgtatattttttattaataac

SEQ ID NO: 80093 - DNA, 1450 bp, Zea Mays
cccaactcagcaactcgtccaaatcaaaatcacttctattgaaaaaagcaaaccctaccccctcttctccccttctctcgacggcgccaccatgccgcctccgccctcaaccctagccgccagggcaacaacagtagcaccgcagggcgtaggtggcagagcagggacgcggattccgactgacacttcgtcgtcaagctctcgccatttgtaactccttgctccgccgacctcgacgcaaactacaacttctcgctcgcgcctatccaggatccgctctcgccatggttgcagggacggacccaaataggggaccaagcattcccttagagtttgcacgcttgctgatgcagtgcaagcctgcaacatgcagaggtgcgctagtgccaggtgcggcgagtcagcagatcaaggaaaccgcccgcggccgccccaggggtccaggtctcctcacggcgacgggagagcgcgagccaatgtggagcgcagtgctcgattgatttcaagtacatggtatttcccctccgtcctaaggcatgtaattagccccaattgaaacttcttggtttatttcagtgctccagtatatttattgccagagataaaagcatatgccttggtaactttggtcttgccaatgtattgacatcagatgatcttgtgtcttctataagtatacttgaaaaatttttagtcttgcatttatttgctggtgtttcttgttaccgtattttctccaacaaaggtggtagtaacaccgagttatatgtgcctagaacttcttgctgatataccatatggtactaaatccaatatttggtctctagaatgttgcatttgacaaatgactactctcaggcctgcaaactgcacattacaacgtgaagttggttattgaaagggcgcccatagctgcaaacatagctgtgaccacatgatgatgacgatttactacagcaggcacttgcaatgtcaatggagggtggtgcttcaggatctgcagctgtgactgactctgctatggcagaagctagtgcagttgaccctgacttagcgttggcttcctggtgttgatcccaatgatccatctgttaaagatttgttggcatcattgcacaaccagggagagcaagagaagaaggaagacaagtaagacaaaacagaagacgagaagaactgcttcaagctggagtgatgtcgctgtggtgcttttgtgactgatcatctctggagcttttgtgaatgatctagctagctatttgtaaatgatctagttgtgaatgatattataattgtgatacttttgtgaatatataattgtggtgcttttgtgtttatgtgatggatttatgactgtggtatactgattaactgtgtatgtctttatgatttgtgtataaaaatctgtgatttgtggtgcttaattaaatgtatattttttattaataac

SEQ ID NO: 80094 - DNA, 1152 bp, Zea Mays
ctcagcaactcgtccaaatcaaaatcacttctattgaaaaaagcaaaccctaccccctcttctccccttctctcgacggcgccaccatgccgcctccgccctcaaccctagccgccagggcaacaacagtagcaccgcagggcgtaggtggcagagcagggacgcggattccgactgacacttcgtcgtcaagctctcgccatttgtaactccttgctccgccgacctcgacgcaaactacaacttctcgctcgcgcctatccaggatccgctctcgccatggttgcagggacggacccaaataggggaccaagcattcccttagagtttgcacgcttgctgatgcagtgcaagcctgcaacatgcagaggtgcgctagtgccaggtgcggcgagtcagcagatcaaggaaaccgcccgcggccgccccaggggtccaggtctcctcacggcgacgggagagcgcgagccaatgtggagcggttagttggtcgctgctgccaattgttctgcgcttataaaatttcaagaatgttgcatttgacaaatgactactctcaggcctgcaaactgcacattacaacgtgaagttggttattgaaagggcgcccatagctgcaaacatagctgtgaccacatgatgatgacgatttactacagcaggcacttgcaatgtcaatggagggtggtgcttcaggatctgcagctgtgactgactctgctatggcagaagctagtgcagttgaccctgacttagcgttggcttcctggtgttgatcccaatgatccatctgttaaagatttgttggcatcattgcacaaccagggagagcaagagaagaaggaagacaagtaagacaaaacagaagacgagaagaactgcttcaagctggagtgatgtcgctgtggtgcttttgtgactgatcatctctggagcttttgtgaatgatctagctagctatttgtaaatgatctagttgtgaatgatattataattgtgatacttttgtgaatatataattgtggtgcttttgtgtttatgtgatggatttatgactgtggtatactgattaactgtgtatgtctttatgatttgtgtataaaaatctgtgatttgtggtgcttaattaaatgtatattttttattaataac

SEQ ID NO: 80095 - DNA, 1015 bp, Zea Mays
agcaactcgtccaaatcaaaatcacttctattgaaaaaagcaaaccctaccccctcttctccccttctctcgacggcgccaccatgccgcctccgccctcaaccctagccgccagggcaacaacagtagcaccgcagggcgtaggtggcagagcagggacgcggattccgactgacacttcgtcgtcaagctctcgccatttgtaactccttgctccgccgacctcgacgcaaactacaacttctcgctcgcgcctatccaggatccgctctcgccatgaggtgcgctagtgccaggtgcggcgagtcagcagatcaaggaaaccgcccgcggccgccccaggggtccaggtctcctcacggcgacgggagagcgcgagccaatgtggagcgaatgttgcatttgacaaatgactactctcaggcctgcaaactgcacattacaacgtgaagttggttattgaaagggcgcccatagctgcaaacatagctgtgaccacatgatgatgacgatttactacagcaggcacttgcaatgtcaatggagggtggtgcttcaggatctgcagctgtgactgactctgctatggcagaagctagtgcagttgaccctgacttagcgttggcttcctggtgttgatcccaatgatccatctgttaaagatttgttggcatcattgcacaaccagggagagcaagagaagaaggaagacaagtaagacaaaacagaagacgagaagaactgcttcaagctggagtgatgtcgctgtggtgcttttgtgactgatcatctctggagcttttgtgaatgatctagctagctatttgtaaatgatctagttgtgaatgatattataattgtgatacttttgtgaatatataattgtggtgcttttgtgtttatgtgatggatttatgactgtggtatactgattaactgtgtatgtctttatgatttgtgtataaaaatctgtgatttgtggtgcttaattaaatgtatattttttattaataac

SEQ ID NO: 80096 - DNA, 1099 bp, Zea Mays
aactcgtccaaatcaaaatcacttctattgaaaaaagcaaaccctaccccctcttctccccttctctcgacggcgccaccatgccgcctccgccctcaaccctagccgccagggcaacaacagtagcaccgcagggcgtaggtggcagagcagggacgcggattccgactgacacttcgtcgtcaagctctcgccatttgtaactccttgctccgccgacctcgacgcaaactacaacttctcgctcgcgcctatccaggatccgctctcgccatggttgcagggacggacccaaataggggaccaagcattcccttagagtttgcacgcttgctgatgcagtgcaagcctgcaacatgcagaggtgcgctagtgccaggtgcggcgagtcagcagatcaaggaaaccgcccgcggccgccccaggggtccaggtctcctcacggcgacgggagagcgcgagccaatgtggagcggaatgttgcatttgacaaatgactactctcaggcctgcaaactgcacattacaacgtgaagttggttattgaaagggcgcccatagctgcaaacatagctgtgaccacatgatgatgacgatttactacagcaggcacttgcaatgtcaatggagggtggtgcttcaggatctgcagctgtgactgactctgctatggcagaagctagtgcagttgaccctgacttagcgttggcttcctggtgttgatcccaatgatccatctgttaaagatttgttggcatcattgcacaaccagggagagcaagagaagaaggaagacaagtaagacaaaacagaagacgagaagaactgcttcaagctggagtgatgtcgctgtggtgcttttgtgactgatcatctctggagcttttgtgaatgatctagctagctatttgtaaatgatctagttgtgaatgatattataattgtgatacttttgtgaatatataattgtggtgcttttgtgtttatgtgatggatttatgactgtggtatactgattaactgtgtatgtctttatgatttgtgtataaaaatctgtgatttgtggtgcttaattaaatgtatattttttattaataac

SEQ ID NO: 80097 - DNA, 1022 bp, Zea Mays
ccaaatcaaaatcacttctattgaaaaaagcaaaccctaccccctcttctccccttctctcgacggcgccaccatgccgcctccgccctcaaccctagccgccagggcaacaacagtagcaccgcagggcgtaggtggcagagcagggacgcggattccgactgacacttcgtcgtcaagctctcgccatttgtaactccttgctccgccgacctcgacgcaaactacaacttctcgctcgcgcctatccaggatccgctctcgccatggttgcagggacggacccaaataggggaccaagcattcccttagagtttgcacgcttgctgatgcagtgcaagcctgcaacatgcagaggtgcgctagtgccaggtgcggcgagtcagcagatcaaggaaaccgcccgcggccgccccaggggtccaggtctcctcacggcgacgggagagcgcgagccaatgtggagcgaatgttgcatttgacaaatgactactctcaggcctgcaaactgcacattacaacgtgaagttggttattgaaagggcgcccatagctgcaaacatagctgtgaccacatgatgatgacgatttactacagcaggcacttgcaatgtcaatggagggtggtgcttcaggatctgcagctgtgactgactctgctatggcagaagctagtgcagttgaccctgacttagcgttggcaagagaagaaggaagacaagtaagacaaaacagaagacgagaagaactgcttcaagctggagtgatgtcgctgtggtgcttttgtgactgatcatctctggagcttttgtgaatgatctagctagctatttgtaaatgatctagttgtgaatgatattataattgtgatacttttgtgaatatataattgtggtgcttttgtgtttatgtgatggatttatgactgtggtatactgattaactgtgtatgtctttatgatttgtgtataaaaatctgtgatttgtggtgcttaattaaatgtatattttttattaataac

SEQ ID NO: 80098 - DNA, 1232 bp, Zea Mays
ccaaatcaaaatcacttctattgaaaaaagcaaaccctaccccctcttctccccttctctcgacggcgccaccatgccgcctccgccctcaaccctagccgccagggcaacaacagtagcaccgcagggcgtaggtggcagagcagggacgcggattccgactgacacttcgtcgtcaagctctcgccatttgtaactccttgctccgccgacctcgacgcaaactacaacttctcgctcgcgcctatccaggatccgctctcgccatggttgcagggacggacccaaataggggaccaagcattcccttagagtttgcacgcttgctgatgcagtgcaagcctgcaacatgcagaggtgcgctagtgccaggtgcggcgagtcagcagatcaaggaaaccgcccgcggccgccccaggggtccaggtctcctcacggcgacgggagagcgcgagccaatgtggagcggtcagtagcagtgctcgattgatttcaagtacatggtatttcccctccgtcctaaggcatgtaattagccccaattgaaacttcttggtttatttcagtgctccagtatatttattgccagagataaaagcatatgccttgaatgttgcatttgacaaatgactactctcaggcctgcaaactgcacattacaacgtgaagttggttattgaaagggcgcccatagctgcaaacatagctgtgaccacatgatgatgacgatttactacagcaggcacttgcaatgtcaatggagggtggtgcttcaggatctgcagctgtgactgactctgctatggcagaagctagtgcagttgaccctgacttagcgttggcttcctggtgttgatcccaatgatccatctgttaaagatttgttggcatcattgcacaaccagggagagcaagagaagaaggaagacaagtaagacaaaacagaagacgagaagaactgcttcaagctggagtgatgtcgctgtggtgcttttgtgactgatcatctctggagcttttgtgaatgatctagctagctatttgtaaatgatctagttgtgaatgatattataattgtgatacttttgtgaatatataattgtggtgcttttgtgtttatgtgatggatttatgactgtggtatactgattaactgtgtatgtctttatgatttgtgtataaaaatctgtgatttgtggtgcttaattaaatgtatattttttattaataac

SEQ ID NO: 80099 - DNA, 1234 bp, Zea Mays
ccaaatcaaaatcacttctattgaaaaaagcaaaccctaccccctcttctccccttctctcgacggcgccaccatgccgcctccgccctcaaccctagccgccagggcaacaacagtagcaccgcagggcgtaggtggcagagcagggacgcggattccgactgacacttcgtcgtcaagctctcgccatttgtaactccttgctccgccgacctcgacgcaaactacaacttctcgctcgcgcctatccaggatccgctctcgccatggttgcagggacggacccaaataggggaccaagcattcccttagagtttgcacgcttgctgatgcagtgcaagcctgcaacatgcagaggtgcgctagtgccaggtgcggcgagtcagcagatcaaggaaaccgcccgcggccgccccaggggtccaggtctcctcacggcgacgggagagcgcgagccaatgtggagcggttagttggtcgctgctgccaattgttctgcgcttataaaatttcaaggttgttacatttgaattgttattggaaatttcaaggtcagtagcagtgctcgattgatttcaagtacatggtatttcccctccgtcctaagacagaatgttgcatttgacaaatgactactctcaggcctgcaaactgcacattacaacgtgaagttggttattgaaagggcgcccatagctgcaaacatagctgtgaccacatgatgatgacgatttactacagcaggcacttgcaatgtcaatggagggtggtgcttcaggatctgcagctgtgactgactctgctatggcagaagctagtgcagttgaccctgacttagcgttggcttcctggtgttgatcccaatgatccatctgttaaagatttgttggcatcattgcacaaccagggagagcaagagaagaaggaagacaagtaagacaaaacagaagacgagaagaactgcttcaagctggagtgatgtcgctgtggtgcttttgtgactgatcatctctggagcttttgtgaatgatctagctagctatttgtaaatgatctagttgtgaatgatattataattgtgatacttttgtgaatatataattgtggtgcttttgtgtttatgtgatggatttatgactgtggtatactgattaactgtgtatgtctttatgatttgtgtataaaaatctgtgatttgtggtgcttaattaaatgtatattttttattaataac

SEQ ID NO: 80100 - DNA, 1147 bp, Zea Mays
ccaaatcaaaatcacttctattgaaaaaagcaaaccctaccccctcttctccccttctctcgacggcgccaccatgccgcctccgccctcaaccctagccgccagggcaacaacagtagcaccgcagggcgtaggtggcagagcagggacgcggattccgactgacacttcgtcgtcaagctctcgccatttgtaactccttgctccgccgacctcgacgcaaactacaacttctcgctcgcgcctatccaggatccgctctcgccatggttgcagggacggacccaaataggggaccaagcattcccttagagtttgcacgcttgctgatgcagtgcaagcctgcaacatgcagaggtgcgctagtgccaggtgcggcgagtcagcagatcaaggaaaccgcccgcggccgccccaggggtccaggtctcctcacggcgacgggagagcgcgagccaatgtggagcggtcagtagcagtgctcgattgatttcaagtacatggtatttcccctccgtcctaagaatgttgcatttgacaaatgactactctcaggcctgcaaactgcacattacaacgtgaagttggttattgaaagggcgcccatagctgcaaacatagctgtgaccacatgatgatgacgatttactacagcaggcacttgcaatgtcaatggagggtggtgcttcaggatctgcagctgtgactgactctgctatggcagaagctagtgcagttgaccctgacttagcgttggcttcctggtgttgatcccaatgatccatctgttaaagatttgttggcatcattgcacaaccagggagagcaagagaagaaggaagacaagtaagacaaaacagaagacgagaagaactgcttcaagctggagtgatgtcgctgtggtgcttttgtgactgatcatctctggagcttttgtgaatgatctagctagctatttgtaaatgatctagttgtgaatgatattataattgtgatacttttgtgaatatataattgtggtgcttttgtgtttatgtgatggatttatgactgtggtatactgattaactgtgtatgtctttatgatttgtgtataaaaatctgtgatttgtggtgcttaattaaatgtatattttttattaataac

SEQ ID NO: 80101 - DNA, 1336 bp, Zea Mays
ccaaatcaaaatcacttctattgaaaaaagcaaaccctaccccctcttctccccttctctcgacggcgccaccatgccgcctccgccctcaaccctagccgccagggcaacaacagtagcaccgcagggcgtaggtggcagagcagggacgcggattccgactgacacttcgtcgtcaagctctcgccatttgtaactccttgctccgccgacctcgacgcaaactacaacttctcgctcgcgcctatccaggatccgctctcgccatggttgcagggacggacccaaataggggaccaagcattcccttagagtttgcacgcttgctgatgcagtgcaagcctgcaacatgcagaggtgcgctagtgccaggtgcggcgagtcagcagatcaaggaaaccgcccgcggccgccccaggggtccaggtctcctcacggcgacgggagagcgcgagccaatgtggagcggttagttggtcgctgctgccaattgttctgcgcttataaaatttcaaggttgttacatttgaattgttattggaaatttcaaggtcagtagcagtgctcgattgatttcaagtacatggtatttcccctccgtcctaaggcatgtaattagccccaattgaaacttcttggtttatttcagtgctccagtatatttattgccagagataaaagcatatgccttggtcagtgacttaagcttagaaaaagtacaatactttatgtatgaattcagaaatcccaatgatattcattctgaatatgtgcaaatgcagaatgttgcatttgacaaatgactactctcaggcctgcaaactgcacattacaacgtgaagttggttattgaaagggcgcccatagctgcaaacatagctgtgaccacatgatgatgacgatttactacagcaggcacttgcaatgtcaatggagggtggtgcttcaggatctgcagctgtgactgactctgctatggcagaagctagtgcagttgaccctgacttagcgttggcaagagaagaaggaagacaagtaagacaaaacagaagacgagaagaactgcttcaagctggagtgatgtcgctgtggtgcttttgtgactgatcatctctggagcttttgtgaatgatctagctagctatttgtaaatgatctagttgtgaatgatattataattgtgatacttttgtgaatatataattgtggtgcttttgtgtttatgtgatggatttatgactgtggtatactgattaactgtgtatgtctttatgatttgtgtataaaaatctgtgatttgtggtgcttaattaaatgtatattttttattaataac

SEQ ID NO: 80102 - DNA, 1209 bp, Zea Mays
ccaaatcaaaatcacttctattgaaaaaagcaaaccctaccccctcttctccccttctctcgacggcgccaccatgccgcctccgccctcaaccctagccgccagggcaacaacagtagcaccgcagggcgtaggtggcagagcagggacgcggattccgactgacacttcgtcgtcaagctctcgccatttgtaactccttgctccgccgacctcgacgcaaactacaacttctcgctcgcgcctatccaggatccgctctcgccatggttgcagggacggacccaaataggggaccaagcattcccttagagtttgcacgcttgctgatgcagtgcaagcctgcaacatgcagaggtgcgctagtgccaggtgcggcgagtcagcagatcaaggaaaccgcccgcggccgccccaggggtccaggtctcctcacggcgacgggagagcgcgagccaatgtggagcggttagttggtcgctgctgccaattgttctgcgcttataaaatttcaaggttgttacatttgaattgttattggaaatttcaaggtcagtagcagtgctcgattgatttcaagtacatgaatgttgcatttgacaaatgactactctcaggcctgcaaactgcacattacaacgtgaagttggttattgaaagggcgcccatagctgcaaacatagctgtgaccacatgatgatgacgatttactacagcaggcacttgcaatgtcaatggagggtggtgcttcaggatctgcagctgtgactgactctgctatggcagaagctagtgcagttgaccctgacttagcgttggcttcctggtgttgatcccaatgatccatctgttaaagatttgttggcatcattgcacaaccagggagagcaagagaagaaggaagacaagtaagacaaaacagaagacgagaagaactgcttcaagctggagtgatgtcgctgtggtgcttttgtgactgatcatctctggagcttttgtgaatgatctagctagctatttgtaaatgatctagttgtgaatgatattataattgtgatacttttgtgaatatataattgtggtgcttttgtgtttatgtgatggatttatgactgtggtatactgattaactgtgtatgtctttatgatttgtgtataaaaatctgtgatttgtggtgcttaattaaatgtatattttttattaataac

SEQ ID NO: 80103 - DNA, 1742 bp, Zea Mays
catccttatctcctctccttcctgtacctttctccctcccacgccaccgcttcccctcgcggcttgcggtcgtcgctggcattccctgctccaagccttccaggctccacgatgggccatcgtgatgttcaagaacctattgaggcacattcgacaacctgtagagcaagctgttcctagctgacttcacgcttgcaggagatttggcattcaagagtaattcagttctggaagcatatgaagtctgagatacagaaggattcctttcgaaacatttatggatatgagtgctaaccttgacagatttgcagcatctttgaagaaaaaggatggttgggttatgaatatattcccttttacagaataaggaagctaaatattatatatgatcatggtttaatggggactgcccatgattggtaagattctcctggcaatcacaaaactaggctaacctcgacacatggtaagcaccaattgcaaaactgcatttttacaaagttgttttgtagcactaaattttctgtaccttttcatctcagagctactattaatttcataacaatcccattgtgctctcatgttgcagaactattctcctggcaatttgtataacgaactatgttttttttcatcattctatgtctcaagctccactttgtaatgtgtaggtttgtgaaatgggatgatgacataagtttaggttttgatacaaattctttaagaggtctattttctgatttaaaatgacaatggacgtagtttacataattcaaaatatagttgtgatacagaagagcaaacgaacattgtatttttgtgaaataagtttccaaatgtgttggccatattttttacattatagaatagttctgtaaaaaatactcgcttgttttcacctaatgcctttttgtggttctactttttttttcttttgcacactgatcagtttatttatgtagtttaattcacagaattcctatatatcttcccaagtgaatcttgggcttggagttcaaggatcaagtattacctcatctacaacaccataattttgagtccccagttctgcagaaatataaatgatggcttatttaattactttcagatggcaaaagaaattgcattgcttgaggtattttatcacatatagttgtttttcgtgcattgagaatttacacctatatgtgcagatgatatatgggcatataaatgtgaagaacaacaaattttggctgaagatgttggtgtcgaatcttttatgacaacaggagaaaataaacaagcaagtgaagatgacccaaagattctatattcgttggtattgtccttctgggctactctttttgctactgaggtgcaaagtgaatccaagtggaagcaattaggggagttagctatgtcaaatggaaaggttaggaaactggaggcgtacatcatcagttattggtacaagaaagggcacagaccaatagagcatcctttgctcccagatgcaagaagaatagtgaagtttgacctatatgatgactcagtttcaaccagaatataatgtaatgatgtatcttgcacctgctcatcagagagtgagatctgttgtttgtagcttagtagaagattacaagggagaaacatatgatgtgtagagatttgctgtctctctctttcactctcgtagaatgcaatttttcagggaaacttaaatttatatccttttctagcccgtggatatcccatctgtg

SEQ ID NO: 80104 - DNA, 1723 bp, Zea Mays
tccttatctcctctccttcctgtacctttctccctcccacgccaccgcttcccctcgcggcttgcggtcgtcgctggcattccctgctccaagccttccaggctccacgatgggccatcgtgatgttcaagaacctattgaggcacattcgacaacctgtagagcaagctgttcctagctgacttcacgcttgcaggagatttggcattcaagagtaattcagttctggaagcatatgaagtctgagatacagaaggattcctttcgaaacatttatggatatgagtgctaaccttgacagatttgcagcatctttgaagaaaaaggatggttgggttatgaatatattcccttttacagaataaggaagctaaatattatatatgatcatggtttaatggggactgcccatgattggtaagattctcctggcaatcacaaaactaggctaacctcgacacatggtaagcaccaattgcaaaactgcatttttacaaagttgttttgtagcactaaattttctgtaccttttcatctcagagctactattaatttcataacaatcccattgtgctctcatgttgcagaactattctcctggcaatttgtataacgaactatgttttttttcatcattctatgtctcaagctccactttgtaatgtgtaggtttgtgaaatgggatgatgacataagtttaggttttgatacaaattctttaagaggtctattttctgatttaaaatgacaatggacgtagtttacataattcaaaatatagttgtgatacagaagagcaaacgaacattgtatttttgtgaaataagtttccaaatgtgttggccatattttttacattatagaatagttctgtaaaaaatactcgcttgttttcacctaatgcctttttgtggttctactttttttttcttttgcacactgatcagtttatttatgtagtttaattcacagaattcctatatatcttcccaagtgaatcttgggcttggagttcaaggatcaagtattacctcatctacaacaccataattttgagtccccagttctgcagaaatataaatgatggcttatttaattactttcagatggcaaaagaaattgcattgcttgaggtattttatcacatatagttgtttttcgtgcattgagaatttacacctatatgtgcagatgatatatgggcatataaatgtgaagaacaacaaattttggctgaagatgttggtgtcgaatcttttatgacaacaggagaaaataaacaagcaagtgaagatgacccaaagattctatattcggtatatcaagcctttgcactgtatagaaaaaaattgtacatgccctccgactttttttgcacatgcctgctcatgaaatcggtttaggttgtgtgctcagtttgtttttttctaaacacgtcaggtcagatgtttgagtttggctaattagaaaatcaaacaaacatgcaaggctgaagttaccaagcagttatagaattagttcgattgttactttgttaggaattctactcgaattctttttgaaatttgggagtaggggtaattatagttacaattttgcgacagtctgacttgtccttaaaatagcctaaagtttctcagttcagtcaataatgcttataaggtgtatattattgaaaggaaagtgtgtgagaaactataaatacataaaccatcaaggcaca

SEQ ID NO: 80105 - DNA, 1769 bp, Zea Mays
tccttatctcctctccttcctgtacctttctccctcccacgccaccgcttcccctcgcggcttgcggtcgtcgctggcattccctgctccaagccttccaggctccacgatgggccatcgtgatgttcaagaacctattgaggcacattcgacaacctgtagagcaagctgttcctagctgacttcacgcttgcaggagatttggcattcaagagtaattcagttctggaagcatatgaagtctgagatacagaaggattcctttcgaaacatttatggatatgagtgctaaccttgacagatttgcagcatctttgaagaaaaaggatggttgggttatgaatatattcccttttacagaataaggaagctaaatattatatatgatcatggtttaatggggactgcccatgattggtaagattctcctggcaatcacaaaactaggctaacctcgacacatggtaagcaccaattgcaaaactgcatttttacaaagttgttttgtagcactaaattttctgtaccttttcatctcagagctactattaatttcataacaatcccattgtgctctcatgttgcagaactattctcctggcaatttgtataacgaactatgttttttttcatcattctatgtctcaagctccactttgtaatgtgtaggtttgtgaaatgggatgatgacataagtttaggttttgatacaaattctttaagaggtctattttctgatttaaaatgacaatggacgtagtttacataattcaaaatatagttgtgatacagaagagcaaacgaacattgtatttttgtgaaataagtttccaaatgtgttggccatattttttacattatagaatagttctgtaaaaaatactcgcttgttttcacctaatgcctttttgtggttctactttttttttcttttgcacactgatcagtttatttatgtagtttaattcacagaattcctatatatcttcccaagtgaatcttgggcttggagttcaaggatcaagtattacctcatctacaacaccataattttgagtccccagttctgcagaaatataaatgatggcttatttaattactttcagatggcaaaagaaattgcattgcttgaggtattttatcacatatagttgtttttcgtgcattgagaatttacacctatatgtgcagatgatatatgggcatataaatgtgaagaacaacaaattttggctgaagatgttggtgtcgaatcttttatgacaacaggagaaaataaacaagcaagtgaagatgacccaaagattctatattcgaattttttgggggagggaaaaagctaccctagcagggtctggccggtttccttttcagttgggggggtcttcaggctcggagataaatagtttacatatttggtttgctgcttagtcatttgaaggttaggaaactggaggcgtacatcatcagttattggtacaagaaagggcacagaccaatagagcatcctttgctcccagatgcaagaagaatagtgaagtttgacctatatgatgactcagtttcaaccagaatataatgtaatgatgtatcttgcacctgctcatcagagagtgagatctgttgtttgtagcttagtagaagattacaagggagaaacatatgatgtgtagagatttgctgtctctctctttcactctcgtagaatgcaatttttcagggaaacttaaatttatatccttttctagcccgtggatatcccatctgtg

SEQ ID NO: 80106 - DNA, 1642 bp, Zea Mays
cttatctcctctccttcctgtacctttctccctcccacgccaccgcttcccctcgcggcttgcggtcgtcgctggcattccctgctccaagccttccaggctccacgatgggccatcgtgatgttcaagaacctattgaggcacattcgacaacctgtagagcaagctgttcctagctgacttcacgcttgcaggagatttggcattcaagagtaattcagttctggaagcatatgaagtctgagatacagaaggattcctttcgaaacatttatggatatgagtgctaaccttgacagatttgcagcatctttgaagaaaaaggatggttgggttatgaatatattcccttttacagaataaggaagctaaatattatatatgatcatggtttaatggggactgcccatgattggtaagattctcctggcaatcacaaaactaggctaacctcgacacatggtaagcaccaattgcaaaactgcatttttacaaagttgttttgtagcactaaattttctgtaccttttcatctcagagctactattaatttcataacaatcccattgtgctctcatgttgcagaactattctcctggcaatttgtataacgaactatgttttttttcatcattctatgtctcaagctccactttgtaatgtgtaggtttgtgaaatgggatgatgacataagtttaggttttgatacaaattctttaagaggtctattttctgatttaaaatgacaatggacgtagtttacataattcaaaatatagttgtgatacagaagagcaaacgaacattgtatttttgtgaaataagtttccaaatgtgttggccatattttttacattatagaatagttctgtaaaaaatactcgcttgttttcacctaatgcctttttgtggttctactttttttttcttttgcacactgatcagtttatttatgtagtttaattcacagaattcctatatatcttcccaagtgaatcttgggcttggagttcaaggatcaagtattacctcatctacaacaccataattttgagtccccagttctgcagaaatataaatgatggcttatttaattactttcagatggcaaaagaaattgcattgcttgaggtattttatcacatatagttgtttttcgtgcattgagaatttacacctatatgtgcagatgatatatgggcatataaatgtgaagaacaacaaattttggctgaagatgttggtgtcgaatcttttatgacaacaggagaaaataaacaagcaagtgaagatgacccaaagattctatattcggttaggaaactggaggcgtacatcatcagttattggtacaagaaagggcacagaccaatagagcatcctttgctcccagatgcaagaagaatagtgaagtttgacctatatgatgactcagtttcaaccagaatataatgtaatgatgtatcttgcacctgctcatcagagagtgagatctgttgtttgtagcttagtagaagattacaagggagaaacatatgatgtgtagagatttgctgtctctctctttcactctcgtagaatgcaatttttcagggaaacttaaatttatatccttttctagcccgtggatatcccatctgtg

SEQ ID NO: 80107 - DNA, 2116 bp, Zea Mays
cttatctcctctccttcctgtacctttctccctcccacgccaccgcttcccctcgcggcttgcggtcgtcgctggcattccctgctccaagccttccaggctccacgatgggccatcgtgatgttcaagaacctattgaggcacattcgacaacctgtagagcaagctgttcctagctgacttcacgcttgcaggagatttggcattcaagagtaattcagttctggaagcatatgaagtctgagatacagaaggattcctttcgaaacatttatggatatgagtgctaaccttgacagatttgcagcatctttgaagaaaaaggatggttgggttatgaatatattcccttttacagaataaggaagctaaatattatatatgatcatggtttaatggggactgcccatgattggtaagattctcctggcaatcacaaaactaggctaacctcgacacatggtaagcaccaattgcaaaactgcatttttacaaagttgttttgtagcactaaattttctgtaccttttcatctcagagctactattaatttcataacaatcccattgtgctctcatgttgcagaactattctcctggcaatttgtataacgaactatgttttttttcatcattctatgtctcaagctccactttgtaatgtgtaggtttgtgaaatgggatgatgacataagtttaggttttgatacaaattctttaagaggtctattttctgatttaaaatgacaatggacgtagtttacataattcaaaatatagttgtgatacagaagagcaaacgaacattgtatttttgtgaaataagtttccaaatgtgttggccatattttttacattatagaatagttctgtaaaaaatactcgcttgttttcacctaatgcctttttgtggttctactttttttttcttttgcacactgatcagtttatttatgtagtttaattcacagaattcctatatatcttcccaagtgaatcttgggcttggagttcaaggatcaagtattacctcatctacaacaccataattttgagtccccagttctgcagaaatataaatgatggcttatttaattactttcagatggcaaaagaaattgcattgcttgaggtattttatcacatatagttgtttttcgtgcattgagaatttacacctatatgtgcagatgatatatgggcatataaatgtgaagaacaacaaattttggctgaagatgttggtgtcgaatcttttatgacaacaggagaaaataaacaagcaagtgaagatgacccaaagattctatattcgttggtattgtccttctgggctactctttttgctactgaggtgcaaagtgaatccaagtggaagcaattaggggagttagctatgtcaaatggaaaggtacagctatcgggtctatcatttatcttgcatgcacaatgccacagtctgcattgtcatatgttgatgtccagttattttttataaaagatgtttgttttcaatgaactaacaaatatagtttcaatgttccattattattttcgaataaagagatattttgttttcgttagttattacatgacactgtagacgtcatgtttattgtatcaacccgcttttacattttgtgggtcattgtgtcgaggagcagaattttttgggggagggaaaaagctaccctagcagggtctggccggtttccttttcagttgggggggtcttcaggctcggagataaatagtttacatatttggtttgctgcttagtcatttgaaggttaggaaactggaggcgtacatcatcagttattggtacaagaaagggcacagaccaatagagcatcctttgctcccagatgcaagaagaatagtgaagtttgacctatatgatgactcagtttcaaccagaatataatgtaatgatgtatcttgcacctgctcatcagagagtgagatctgttgtttgtagcttagtagaagattacaagggagaaacatatgatgtgtagagatttgctgtctctctctttcactctcgtagaatgcaatttttcagggaaacttaaatttatatccttttctagcccgtggatatcccatctgtg

SEQ ID NO: 80108 - DNA, 1863 bp, Zea Mays
cttatctcctctccttcctgtacctttctccctcccacgccaccgcttcccctcgcggcttgcggtcgtcgctggcattccctgctccaagccttccaggctccacgatgggccatcgtgatgttcaagaacctattgaggcacattcgacaacctgtagagcaagctgttcctagctgacttcacgcttgcaggagatttggcattcaagagtaattcagttctggaagcatatgaagtctgagatacagaaggattcctttcgaaacatttatggatatgagtgctaaccttgacagatttgcagcatctttgaagaaaaaggatggttgggttatgaatatattcccttttacagaataaggaagctaaatattatatatgatcatggtttaatggggactgcccatgattggtaagattctcctggcaatcacaaaactaggctaacctcgacacatggtaagcaccaattgcaaaactgcatttttacaaagttgttttgtagcactaaattttctgtaccttttcatctcagagctactattaatttcataacaatcccattgtgctctcatgttgcagaactattctcctggcaatttgtataacgaactatgttttttttcatcattctatgtctcaagctccactttgtaatgtgtaggtttgtgaaatgggatgatgacataagtttaggttttgatacaaattctttaagaggtctattttctgatttaaaatgacaatggacgtagtttacataattcaaaatatagttgtgatacagaagagcaaacgaacattgtatttttgtgaaataagtttccaaatgtgttggccatattttttacattatagaatagttctgtaaaaaatactcgcttgttttcacctaatgcctttttgtggttctactttttttttcttttgcacactgatcagtttatttatgtagtttaattcacagaattcctatatatcttcccaagtgaatcttgggcttggagttcaaggatcaagtattacctcatctacaacaccataattttgagtccccagttctgcagaaatataaatgatggcttatttaattactttcagatggcaaaagaaattgcattgcttgaggtattttatcacatatagttgtttttcgtgcattgagaatttacacctatatgtgcagatgatatatgggcatataaatgtgaagaacaacaaattttggctgaagatgttggtgtcgaatcttttatgacaacaggagaaaataaacaagcaagtgaagatgacccaaagattctatattcgttggtattgtccttctgggctactctttttgctactgaggtgcaaagtgaatccaagtggaagcaattaggggagttagctatgtcaaatggaaagaattttttgggggagggaaaaagctaccctagcagggtctggccggtttccttttcagttgggggggtcttcaggctcggagataaatagtttacatatttggtttgctgcttagtcatttgaaggttaggaaactggaggcgtacatcatcagttattggtacaagaaagggcacagaccaatagagcatcctttgctcccagatgcaagaagaatagtgaagtttgacctatatgatgactcagtttcaaccagaatataatgtaatgatgtatcttgcacctgctcatcagagagtgagatctgttgtttgtagcttagtagaagattacaagggagaaacatatgatgtgtagagatttgctgtctctctctttcactctcgtagaatgcaatttttcagggaaacttaaatttatatccttttctagcccgtggatatcccatctgtg

SEQ ID NO: 80109 - DNA, 1814 bp, Zea Mays
cctctccttcctgtacctttctccctcccacgccaccgcttcccctcgcggcttgcggtcgtcgctggcattccctgctccaagccttccaggctccacgatgggccatcgtgatgttcaagctccgtcacctccgccaagctggctcatgtcctctcctttgccactttctggggcgccgccctctagccaaccttcattagcgccatcataatgttcaggaacctattgaggcacattcgacaacctgtagagcaagctgttcctagctgacttcacgcttgcaggagatttggcattcaagagtaattcagttctggaagcatatgaagtctgagatacagaaggattcctttcgaaacatttatggatatgagtgctaaccttgacagatttgcagcatctttgaagaaaaaggatggttgggttatgaatatattcccttttacagaataaggaagctaaatattatatatgatcatggtttaatggggactgcccatgattggtaagattctcctggcaatcacaaaactaggctaacctcgacacatggtaagcaccaattgcaaaactgcatttttacaaagttgttttgtagcactaaattttctgtaccttttcatctcagagctactattaatttcataacaatcccattgtgctctcatgttgcagaactattctcctggcaatttgtataacgaactatgttttttttcatcattctatgtctcaagctccactttgtaatgtgtaggtttgtgaaatgggatgatgacataagtttaggttttgatacaaattctttaagaggtctattttctgatttaaaatgacaatggacgtagtttacataattcaaaatatagttgtgatacagaagagcaaacgaacattgtatttttgtgaaataagtttccaaatgtgttggccatattttttacattatagaatagttctgtaaaaaatactcgcttgttttcacctaatgcctttttgtggttctactttttttttcttttgcacactgatcagtttatttatgtagtttaattcacagaattcctatatatcttcccaagtgaatcttgggcttggagttcaaggatcaagtattacctcatctacaacaccataattttgagtccccagttctgcagaaatataaatgatggcttatttaattactttcagatggcaaaagaaattgcattgcttgaggtattttatcacatatagttgtttttcgtgcattgagaatttacacctatatgtgcagatgatatatgggcatataaatgtgaagaacaacaaattttggctgaagatgttggtgtcgaatcttttatgacaacaggagaaaataaacaagcaagtgaagatgacccaaagattctatattcggtatatcaagcctttgcactgtatagaaaaaaattgtacatgccctccgactttttttgcacatgcctgctcatgaaatcggtttaggttgtgtgctcagtttgtttttttctaaacacgtcaggtcagatgtttgagtttggctaattagaaaatcaaacaaacatgcaaggctgaagttaccaagcagttatagaattagttcgattgttactttgttaggaattctactcgaattctttttgaaatttgggagtaggggtaattatagttacaattttgcgacagtctgacttgtccttaaaatagcctaaagtttctcagttcagtcaataatgcttataaggtgtatattattgaaaggaaagtgtgtgagaaactataaatacataaaccatcaaggcaca

SEQ ID NO: 80110 - DNA, 1951 bp, Zea Mays
ccttcctgtacctttctccctcccacgccaccgcttcccctcgcggcttgcggtcgtcgctggcattccctgctccaagccttccaggctccacgatgggccatcgtgatgttcaagctccgtcacctccgccaagctggctcatgtcctctcctttgccactttctggggcgccgccctctagccaaccttcattagcgccatcataatgttcaggaacctattgaggcacattcgacaacctgtagagcaagctgttcctagctgacttcacgcttgcaggagatttggcattcaagagtaattcagttctggaagcatatgaagtctgagatacagaaggattcctttcgaaacatttatggatatgagtgctaaccttgacagatttgcagcatctttgaagaaaaaggatggttgggttatgaatatattcccttttacagaataaggaagctaaatattatatatgatcatggtttaatggggactgcccatgattggtaagattctcctggcaatcacaaaactaggctaacctcgacacatggtaagcaccaattgcaaaactgcatttttacaaagttgttttgtagcactaaattttctgtaccttttcatctcagagctactattaatttcataacaatcccattgtgctctcatgttgcagaactattctcctggcaatttgtataacgaactatgttttttttcatcattctatgtctcaagctccactttgtaatgtgtaggtttgtgaaatgggatgatgacataagtttaggttttgatacaaattctttaagaggtctattttctgatttaaaatgacaatggacgtagtttacataattcaaaatatagttgtgatacagaagagcaaacgaacattgtatttttgtgaaataagtttccaaatgtgttggccatattttttacattatagaatagttctgtaaaaaatactcgcttgttttcacctaatgcctttttgtggttctactttttttttcttttgcacactgatcagtttatttatgtagtttaattcacagaattcctatatatcttcccaagtgaatcttgggcttggagttcaaggatcaagtattacctcatctacaacaccataattttgagtccccagttctgcagaaatataaatgatggcttatttaattactttcagatggcaaaagaaattgcattgcttgaggtattttatcacatatagttgtttttcgtgcattgagaatttacacctatatgtgcagatgatatatgggcatataaatgtgaagaacaacaaattttggctgaagatgttggtgtcgaatcttttatgacaacaggagaaaataaacaagcaagtgaagatgacccaaagattctatattcgttggtattgtccttctgggctactctttttgctactgaggtgcaaagtgaatccaagtggaagcaattaggggagttagctatgtcaaatggaaagaattttttgggggagggaaaaagctaccctagcagggtctggccggtttccttttcagttgggggggtcttcaggctcggagataaatagtttacatatttggtttgctgcttagtcatttgaaggttaggaaactggaggcgtacatcatcagttattggtacaagaaagggcacagaccaatagagcatcctttgctcccagatgcaagaagaatagtgaagtttgacctatatgatgactcagtttcaaccagaatataatgtaatgatgtatcttgcacctgctcatcagagagtgagatctgttgtttgtagcttagtagaagattacaagggagaaacatatgatgtgtagagatttgctgtctctctctttcactctcgtagaatgcaatttttcagggaaacttaaatttatatccttttctagcccgtggatatcccatctgtg

SEQ ID NO: 80111 - DNA, 1826 bp, Zea Mays
ccttcctgtacctttctccctcccacgccaccgcttcccctcgcggcttgcggtcgtcgctggcattccctgctccaagccttccaggctccacgatgggccatcgtgatgttcaagctccgtcacctccgccaagctggctcatgtcctctcctttgccactttctggggcgccgccctctagccaaccttcattagcgccatcataatgttcaggaacctattgaggcacattcgacaacctgtagagcaagctgttcctagctgacttcacgcttgcaggagatttggcattcaagagtaattcagttctggaagcatatgaagtctgagatacagaaggattcctttcgaaacatttatggatatgagtgctaaccttgacagatttgcagcatctttgaagaaaaaggatggttgggttatgaatatattcccttttacagaataaggaagctaaatattatatatgatcatggtttaatggggactgcccatgattggtaagattctcctggcaatcacaaaactaggctaacctcgacacatggtaagcaccaattgcaaaactgcatttttacaaagttgttttgtagcactaaattttctgtaccttttcatctcagagctactattaatttcataacaatcccattgtgctctcatgttgcagaactattctcctggcaatttgtataacgaactatgttttttttcatcattctatgtctcaagctccactttgtaatgtgtaggtttgtgaaatgggatgatgacataagtttaggttttgatacaaattctttaagaggtctattttctgatttaaaatgacaatggacgtagtttacataattcaaaatatagttgtgatacagaagagcaaacgaacattgtatttttgtgaaataagtttccaaatgtgttggccatattttttacattatagaatagttctgtaaaaaatactcgcttgttttcacctaatgcctttttgtggttctactttttttttcttttgcacactgatcagtttatttatgtagtttaattcacagaattcctatatatcttcccaagtgaatcttgggcttggagttcaaggatcaagtattacctcatctacaacaccataattttgagtccccagttctgcagaaatataaatgatggcttatttaattactttcagatggcaaaagaaattgcattgcttgaggtattttatcacatatagttgtttttcgtgcattgagaatttacacctatatgtgcagatgatatatgggcatataaatgtgaagaacaacaaattttggctgaagatgttggtgtcgaatcttttatgacaacaggagaaaataaacaagcaagtgaagatgacccaaagattctatattcgttggtattgtccttctgggctactctttttgctactgaggtgcaaagtgaatccaagtggaagcaattaggggagttagctatgtcaaatggaaaggttaggaaactggaggcgtacatcatcagttattggtacaagaaagggcacagaccaatagagcatcctttgctcccagatgcaagaagaatagtgaagtttgacctatatgatgactcagtttcaaccagaatataatgtaatgatgtatcttgcacctgctcatcagagagtgagatctgttgtttgtagcttagtagaagattacaagggagaaacatatgatgtgtagagatttgctgtctctctctttcactctcgtagaatgcaatttttcagggaaacttaaatttatatccttttctagcccgtggatatcccatctgtg

SEQ ID NO: 80112 - DNA, 1758 bp, Zea Mays
ctgctccaagccttccaggctccacgatgggccatcgtgatgttcaaggctccgtcacctccgccaagctggctcatgtcctctcctttgccactttctggggcgccgccctctagccaaccttcattagcgccatcataatgttcaggaacctattgaggcacattcgacaacctgtagagcaagctgttcctagctgacttcacgcttgcaggagatttggcattcaagagtaattcagttctggaagcatatgaagtctgagatacagaaggattcctttcgaaacatttatggatatgagtgctaaccttgacagatttgcagcatctttgaagaaaaaggatggttgggttatgaatatattcccttttacagaataaggaagctaaatattatatatgatcatggtttaatggggactgcccatgattggtaagattctcctggcaatcacaaaactaggctaacctcgacacatggtaagcaccaattgcaaaactgcatttttacaaagttgttttgtagcactaaattttctgtaccttttcatctcagagctactattaatttcataacaatcccattgtgctctcatgttgcagaactattctcctggcaatttgtataacgaactatgttttttttcatcattctatgtctcaagctccactttgtaatgtgtaggtttgtgaaatgggatgatgacataagtttaggttttgatacaaattctttaagaggtctattttctgatttaaaatgacaatggacgtagtttacataattcaaaatatagttgtgatacagaagagcaaacgaacattgtatttttgtgaaataagtttccaaatgtgttggccatattttttacattatagaatagttctgtaaaaaatactcgcttgttttcacctaatgcctttttgtggttctactttttttttcttttgcacactgatcagtttatttatgtagtttaattcacagaattcctatatatcttcccaagtgaatcttgggcttggagttcaaggatcaagtattacctcatctacaacaccataattttgagtccccagttctgcagaaatataaatgatggcttatttaattactttcagatggcaaaagaaattgcattgcttgaggtattttatcacatatagttgtttttcgtgcattgagaatttacacctatatgtgcagatgatatatgggcatataaatgtgaagaacaacaaattttggctgaagatgttggtgtcgaatcttttatgacaacaggagaaaataaacaagcaagtgaagatgacccaaagattctatattcgttggtattgtccttctgggctactctttttgctactgaggtgcaaagtgaatccaagtggaagcaattaggggagttagctatgtcaaatggaaaggttaggaaactggaggcgtacatcatcagttattggtacaagaaagggcacagaccaatagagcatcctttgctcccagatgcaagaagaatagtgaagtttgacctatatgatgactcagtttcaaccagaatataatgtaatgatgtatcttgcacctgctcatcagagagtgagatctgttgtttgtagcttagtagaagattacaagggagaaacatatgatgtgtagagatttgctgtctctctctttcactctcgtagaatgcaatttttcagggaaacttaaatttatatccttttctagcccgtggatatcccatctgtg

SEQ ID NO: 80113 - DNA, 2404 bp, Zea Mays
ctcagctctaaaacccccatctttctcccccgtcctcttgtcccaatctaagaagcaaaaaacctaggggggaaatctggtccaaaaattccatagattcgagcgatggggtgggcaacatggttcctagcggcggtgtgcttctttgctgcgagccaactcttcgtctctgatgctcttgattcccccttcggcgtaggctccgtcacctccgccaagctggctcatgtcctctcctttgccactttctggggcgccgccctctagccaaccttcattagcgccatcataatgttcaggaacctattgaggcacattcgacaacctgtagagcaagctgttcctagctgacttcacgcttgcaggagatttggcattcaagagtaattcagttctggaagcatatgaagtctgagatacagaaggattcctttcgaaacatttatggatatgagtgctaaccttgacagatttgcagcatctttgaagaaaaaggatggttgggttatgaatatattcccttttacagaataaggaagctaaatattatatatgatcatggtttaatggggactgcccatgattggtaagattctcctggcaatcacaaaactaggctaacctcgacacatggtaagcaccaattgcaaaactgcatttttacaaagttgttttgtagcactaaattttctgtaccttttcatctcagagctactattaatttcataacaatcccattgtgctctcatgttgcagaactattctcctggcaatttgtataacgaactatgttttttttcatcattctatgtctcaagctccactttgtaatgtgtaggtttgtgaaatgggatgatgacataagtttaggttttgatacaaattctttaagaggtctattttctgatttaaaatgacaatggacgtagtttacataattcaaaatatagttgtgatacagaagagcaaacgaacattgtatttttgtgaaataagtttccaaatgtgttggccatattttttacattatagaatagttctgtaaaaaatactcgcttgttttcacctaatgcctttttgtggttctactttttttttcttttgcacactgatcagtttatttatgtagtttaattcacagaattcctatatatcttcccaagtgaatcttgggcttggagttcaaggatcaagtattacctcatctacaacaccataattttgagtccccagttctgcagaaatataaatgatggcttatttaattactttcagatggcaaaagaaattgcattgcttgaggtattttatcacatatagttgtttttcgtgcattgagaatttacacctatatgtgcagatgatatatgggcatataaatgtgaagaacaacaaattttggctgaagatgttggtgtcgaatcttttatgacaacaggagaaaataaacaagcaagtgaagatgacccaaagattctatattcgttggtattgtccttctgggctactctttttgctactgaggtgcaaagtgaatccaagtggaagcaattaggggagttagctatgtcaaatggaaaggtacagctatcgggtctatcatttatcttgcatgcacaatgccacagtctgcattgtcatatgttgatgtccagttattttttataaaagatgtttgttttcaatgaactaacaaatatagtttcaatgttccattattattttcgaataaagagatattttgttttcgttagttattacatgacactgtagacgtcatgtttattgtatcaacccgcttttacattttgtgggtcattgtgtcgaggagcagaattttttgggggagggaaaaagctaccctagcagggtctggccggtttccttttcagttgggggggtcttcaggctcggagataaatagcagtttacatatttggtttgctgcttagtcatttgaaggtaatgtttcaagcatatggcatatttctaagttctggccttgtttattatattattagtgcccttgtttattattgtttcttactggtttgggatgaatctgtgctttctcaggttaggaaactggaggcgtacatcatcagttattggtacaagaaagggcacagaccaatagagcatcctttgctcccagatgcaagaagaatagtgaagtttgacctatatgatgactcagtttcaaccagaatataatgtaatgatgtatcttgcacctgctcatcagagagtgagatctgttgtttgtagcttagtagaagattacaagggagaaacatatgatgtgtagagatttgctgtctctctctttcactctcgtagaatgcaatttttcagggaaacttaaatttatatccttttctagcccgtggatatcccatctgtg

SEQ ID NO: 80114 - DNA, 1109 bp, Zea Mays
aaaaaacctaggggggaaatctggtccaaaaattccatagattcgagcgatggggtgggcaacatggttcctagcggcggtgtgcttctttgctgcgagccaactcttcgtctctgatgctcttgattcccccttcggcgtaggctccgtcacctccgccaagctggctcatgtcctctcctttgccactttctggggcgccgccctctagccaaccttcattagcgccatcataatgttcaggaacctattgaggcacattcgacaacctgtagagcaagctgttcctagctgacttcacgcttgcaggagatttggcattcaagagtaattcagttctggaagcatatgaagtctgagatacagaaggattcctttcgaaacatttatggatatgagtgctaaccttgacagatttgcagcatctttgaagaaaaaggatggttgggttatgaatatattcccttttacagaataaggaagctaaatattatatatgatcatggtttaatggggactgcccatgattggtaagattctcctggcaatcacaaaactaggctaacctcgacacatgatgatatatgggcatataaatgtgaagaacaacaaattttggctgaagatgttggtgtcgaatcttttatgacaacaggagaaaataaacaagcaagtgaagatgacccaaagattctatattcggtatatcaagcctttgcactgtatagaaaaaaattgtacatgccctccgactttttttgcacatgcctgctcatgaaatcggtttaggttgtgtgctcagtttgtttttttctaaacacgtcaggtcagatgtttgagtttggctaattagaaaatcaaacaaacatgcaaggctgaagttaccaagcagttatagaattagttcgattgttactttgttaggaattctactcgaattctttttgaaatttgggagtaggggtaattatagttacaattttgcgacagtctgacttgtccttaaaatagcctaaagtttctcagttcagtcaataatgcttataaggtgtatattattgaaaggaaagtgtgtgagaaactataaatacataaaccatcaaggcaca

SEQ ID NO: 80115 - DNA, 1213 bp, Zea Mays
atcattaaactatataaatatatgatggttgttatccctatggtccaaacaaactgcttggactcactgtcacatactcttttgagtgaaaattccaagtgatctcagcatagtgaatgtttcgcttacctagaacatatataaatctgttttggacctgtgtgaacaactttgcaatttagttaccatgcccttttcattattctgacttctaagtataagggtataaaaattcagcattttcagcttatctggatgcaccttattttggtctttgtaaggattttttgtgcttttctcttggtagttggtattgtccttctgggctactctttttgctactgaggtgcaaagtgaatccaagtggaagcaattaggggagttagctatgtcaaatggaaaggtacagctatcgggtctatcatttatcttgcatgcacaatgccacagtctgcattgtcatatgttgatgtccagttattttttataaaagatgtttgttttcaatgaactaacaaatatagtttcaatgttccattattattttcgaataaagagatattttgttttcgttagttattacatgacactgtagacgtcatgtttattgtatcaacccgcttttacattttgtgggtcattgtgtcgaggagcagaattttttgggggagggaaaaagctaccctagcagggtctggccggtttccttttcagttgggggggtcttcaggctcggagataaataggtttgatcaaagcactccagtccattattcatattcgttcacacaagattaataggttgaccgttttttttgttaattccttgatgtttattttattttagcagtttacatatttggtttgctgcttagtcatttgaaggttaggaaactggaggcgtacatcatcagttattggtacaagaaagggcacagaccaatagagcatcctttgctcccagatgcaagaagaatagtgaagtttgacctatatgatgactcagtttcaaccagaatataatgtaatgatgtatcttgcacctgctcatcagagagtgagatctgttgtttgtagcttagtagaagattacaagggagaaacatatgatgtgtagagatttgctgtctctctctttcactctcgtagaatgcaatttttcagggaaacttaaatttatatccttttctagcccgtggatatcccatctgtg

SEQ ID NO: 80116 - DNA, 1417 bp, Zea Mays
gcgattgccgccagcagtagcagacacccctctccacatcccctccggccgctaacagcagcaagccaagccaaaaaggagcctcagccgcagccggttccgttgcggttaccgccgatcacatgcccaaggccgcgcctttccgaacgccgagggccgcccgttcccgtgcacagccacacacacacccgcccgccaacgactccccatccctatttgaacccacccgcgcactgcattgatcaccaatcgcatcgcagcagcacgagcagcacgccgtgccgctccaaccatctcgcttccgtgcttagcttcccgccgcgccatggcgtcgaccaaggctcccggccccggcgagaagcaccactccatcgacgcgcagctccgtcagctggtcccaggcaaggtctccgaggacgacaagctcatcgagtacgatgcgctgctcgtcgaccgcttcctcaacatcctccaggacctccacgggcccagccttcgcgaatttgtccaggagtgctacgaggtctcagccgactacgagggcaaaggagacacgacgaagctgggcgagctcggcgccaagctcacggggctggcccccgccgacgccatcctcgtggcgagctccatcctgcacatgctcaacctcgccaacctggccgaggaggtgcagatcgcgcaccgccgccgcaacagcaagctcaagaaaggtgggttcgccgacgagggctccgccaccaccgagtccgacatcgaggagacgctcaagcgcctcgtgtccgaggtcggcaagtcccccgaggaggtgttcgaggcgctcaagaaccagaccgtcgacctcgtcttcaccgcgcatcctacgcagtccgcccgccgctcgctcctgcaaaaaaatgccaggatccgaaattgtctgacccagctgaatgccaaggacatcactgacgacgacaagcaggagctcgatgaggctctgcagagagagatccaagcagccttcagaaccgatgaaatcaggagggcacaacccaccccgcaggacgaaatgcgctatgggatgagctacatccatgagactgtatggaagggtgtgcctaagttcttgcgccgtgtggatacagccctgaagaatatcggcatcaatgagcgccttccctacaatgtttctctcattcggttctcttcttggatgggtggtgaccgcgatggaaatccaagagttaccccggaggtgacaagagatgtatgcttgctggccagaatgatggctgcaaacttgtacatcgatcagattgaagagctgatgtttgagctctctatgtggcgctgcaacgatgagcttcgtgttcgtgccgaagagctccacagttcgtctggttccaaagttaccaagtattacatagtgtatttgctggcg

SEQ ID NO: 80117 - DNA, 1301 bp, Zea Mays
taccgccgatcacatgcccaaggccgcgcctttccgaacgccgagggccgcccgttcccgtgcacagccacacacacacccgcccgccaacgactccccatccctatttgaacccacccgcgcactgcattgatcaccaatcgcatcgcagcagcacgagcagcacgccgtgccgctccaaccatctcgcttccgtgcttagcttcccgccgcgccatggcgtcgaccaaggctcccggccccggcgagaagcaccactccatcgacgcgcagctccgtcagctggtcccaggcaaggtctccgaggacgacaagctcatcgagtacgatgcgctgctcgtcgaccgcttcctcaacatcctccaggacctccacgggcccagccttcgcgaatttgtccaggagtgctacgaggtctcagccgactacgagggcaaaggagacacgacgaagctgggcgagctcggcgccaagctcacggggctggcccccgccgacgccatcctcgtggcgagctccatcctgcacatgctcaacctcgccaacctggccgaggaggtgcagatcgcgcaccgccgccgcaacagcaagctcaagaaaggtgggttcgccgacgagggctccgccaccaccgagtccgacatcgaggagacgctcaagcgcctcgtgtccgaggtcggcaagtcccccgaggaggtgttcgaggcgctcaagaaccagaccgtcgacctcgtcttcaccgcgcatcctacgcagtccgcccgccgctcgctcctgcaaaaaaatgccaggatccgaaattgtctgacccagctgaatgccaaggacatcactgacgacgacaagcaggagctcgatgaggctctgcagagagagatccaagcagccttcagaaccgatgaaatcaggagggcacaacccaccccgcaggacgaaatgcgctatgggatgagctacatccatgagactgtatggaagggtgtgcctaagttcttgcgccgtgtggatacagccctgaagaatatcggcatcaatgagcgccttccctacaatgtttctctcattcggttctcttcttggatgggtggtgaccgcgatggaaatccaagagttaccccggaggtgacaagagatgtatgcttgctggccagaatgatggctgcaaacttgtacatcgatcagattgaagagctgatgtttgagctctatgtggcgctgcaacgatgagcttcgtgttcgtgccgaagagctccacagttcgtctggttccaaagttaccaagtattacatagattctggaa

SEQ ID NO: 80118 - DNA, 2107 bp, Zea Mays
ccaatcgcatcgcagcagcacgagcagcacgccgtgccgctccaaccatctcgcttccgtgcttagcttcccgccgcgccatggcgtcgaccaaggctcccggccccggcgagaagcaccactccatcgacgcgcagctccgtcagctggtcccaggcaaggtctccgaggacgacaagctcatcgagtacgatgcgctgctcgtcgaccgcttcctcaacatcctccaggacctccacgggcccagccttcgcgaatttgtccaggagtgctacgaggtctcagccgactacgagggcaaaggagacacgacgaagctgggcgagctcggcgccaagctcacggggctggcccccgccgacgccatcctcgtggcgagctccatcctgcacatgctcaacctcgccaacctggccgaggaggtgcagatcgcgcaccgccgccgcaacagcaagctcaagaaaggtgggttcgccgacgagggctccgccaccaccgagtccgacatcgaggagacgctcaagcgcctcgtgtccgaggtcggcaagtcccccgaggaggtgttcgaggcgctcaagaaccagaccgtcgacctcgtcttcaccgcgcatcctacgcagtccgcccgccgctcgctcctgcaaaaaaatgccaggatccgaaattgtctgacccagctgaatgccaaggacatcactgacgacgacaagcaggagctcgatgaggctctgcagagagagatccaagcagccttcagaaccgatgaaatcaggagggcacaacccaccccgcaggacgaaatgcgctatgggatgagctacatccatgagactgtatggaagggtgtgcctaagttcttgcgccgtgtggatacagccctgaagaatatcggcatcaatgagcgccttccctacaatgtttctctcattcggttctcttcttggatgggtggtgaccgcgatggaaatccaagagttaccccggaggtgacaagagatgtatgcttgctggccagaatgatggctgcaaacttgtacatcgatcagattgaagagctgatgtttgagctctctatgtggcgctgcaacgatgagcttcgtgttcgtgccgaagagctccacagttcgtctggttccaaagttaccaagtattacatagaattctggaagcaaattcctccaaacgagccctaccgggtgatactaggccatgtaagggacaagctgtacaacacacgcgagcgtgctcgccatctgctggcttctggagtttctgaaatttcagcggaatcgtcatttaccagtatcgaagagttccttgagccacttgagctgtgctacaaatcactgtgtgactgcggcgacaaggccatcgcggacgggagcctcctggacctcctgcgccaggtgttcacgttcgggctctccctggtgaagctggacatccggcaggagtcggagcggcacaccgacgtgatcgacgccatcaccacgcacctcggcatcgggtcgtaccgcgagtggcccgaggacaagaggcaggagtggctgctgtcggagctgcgaggcaagcgcccgctgctgcccccggaccttccccagaccgacgagatcgccgacgtcatcggcgcgttccacgtcctcgcggagctcccgcccgacagcttcggcccctacatcatctccatggcgacggccccctcggacgtgctcgccgtggagctcctgcagcgcgagtgcggcgtgcgccagccgctgcccggtggggggagggacgaatccgtgcgacgcggggctggatctcagtggatcgtggcagcaaggccactctgccacttacaatgccccgtcgcgttttaagtcgtctgcaaaggattcagcacgccgcccgttgggaagggagcttcgaggcggcccgccgcggcgcgtcggccgggcgggctgagccaatggcacgggcccttggggcgcgaacgccctaacgtgggtcggggcgggcggcgagcagaggcgccggttgctagcttggattctgacttagaggcgttcagtcataatccggcacacggtagcttcgcgccactggcttttcaaccaagcgcgatgac

SEQ ID NO: 80119 - DNA, 1005 bp, Zea Mays
ctgggacaagcacgctgccagcgacgtacgtcatggcaaatgagcgctgaggctacttgctagcgtacccgtgacctgatgttcctttaatataatgccttctccccgcgctgcatctccagtggtgattcctgtgtcctaggctcctagcaagtgaactccccagagtggtgattctcttggatttggtgcatcgacagttcaaggaggaaaccatgacgctttttgcagatcgtagagatgcatgtgagcatcgactgcgatggctgcgaggacaacgtcaggaaggccctggaaaagctcaaaggagtgcaccacgtaagcatcgacaggatgcacggcaaggtgactgtcactgggtcggtgagccagaggaaggcgctccgcgcggcgcggcgcacgggcaagctcgccgtgctgtggccgtccgcctacaacaacccgtcgtaccaccaagcccacgcgatgcgggcctactaccagtaccagtaccaggccaataagcccgcgcaagcgcagcagcaccagtactacagcagcgtccagcgcgccggcaagaacagcggcggcatctcggcggtggctacgaagccggcggggcatcagtacccccagtccaaggccagctcctacaactaccatgtccacgggtactatgactccgagctgtacgggtactaccacgaccacgagcagcccggcgacgtagtgccagccgccgtgcggtcctacttcagcgacgagaacccgagtgcttgctcgatcatgtagtcatcatcgatccttccatgaggtcggtacggtgtggtcgttcgggtgtatgatgattgatcatcggcctcgcttgtgtctgggtttatgtttccattcatcctgtatgtataaatgtacaatacaatactgccttgtttgtactgcgctgtacattagtgtaaatttgtgaccgggcaggcggttgctgttgaaaaattagacacttttcatattaaattccaaatataaatc

SEQ ID NO: 80120 - DNA, 620 bp, Zea Mays
gttcttacaccggtaactccactatctcccttgcccctttcgggtaaggtagtcctccactagctttcctaattagccagccaagggcgtcccattcctaccttgtggtagcactgttatctcaagttaagctcaatgttccaattaacaccatattcttgtcatgaacaataaataatctagtaacaatgataaagcatgatcatatgtcatatagcattacttcccaaaaaccaggtagagcatagccaatctacccaataattcatttgtttgaaaggtgtggggtaaacaaaactagggtaacctattaggtcccatcaaattaacctgagcatgtcacagtgattaacaggaacattattagataaataagagtgatcaagggcacaacttaccttatacttgagataaccttgtagttcagatgttgacccaaaggttggacttcaagttcatcgtcacctcgcatctactcgtagcaagacatacaatcaagcaaataatggatatgataacattacaccaaagcataagaacaaactatgtaagaatattctacgcgtcgctatgagatcgtaggttcgagaaccattacaatcagagttatggttaaaaag

SEQ ID NO: 80121 - DNA, 3282 bp, Zea Mays
ccgccgcggacctctccggcgcggacagccgcgtcgtcgctgtcccctccagcataggtctgcagatccccgcggtgctcggcgcaaccgccgccctgacgcttcctgctgctttcggcatcacccacacctcatccttggcgactcctcgctgcactgcgccgcagatctcatccttgccacgcagtcccatccccatcctgttgttgaccccctcaccagcagcctcgtgtctccctctccaccgcttggcccccggcccagcaatcgctccccgcgctgccctgcaacagtgatgcagcctctacctgtcgcagcagcgcgatctccgccctctcccttgccagcgtccctcaccagcgcgcatgcgccctcgactccacttccatggccgcgcctttgtttcctacgccagggagccttccctcgcacgtagcccctacggctcccagtttcctgaccccctttcccgctactcttccaccgtaagccaccgctcccgacacttcctacggtatcccaccacccttaggaggcaaggtgaccagattatcctagttcggctggtagttggagatgcgactttgaatgtgatcagtgtctatgcccctcaggtaggtcttagtgagagcacagagaggcaattttggggagatctggataacatgggtagcactgtgcctatcagtgagagaatcttcataggaggagacctcgtcggccatgtgggtgcgactaatgtagtttgcgagcgactgcacggggagggggtacggtagtaggaaccaagagggaaggatgtttaggacttcgcgttagcctatgacctgttgattgtgaataccttctttagaaagaaggaatcacatctagtgacctttcacaatggtcaacaatcgagctagatcgactttatccttgcaaggagagagaatagacgtgtttgcttagattgtaaggagatggggggctagggcttttcctagtgcatgaggctacactgttttattttctatgtattttgcctgttagggctttgtactttggtccatttcggacctttctctctttcaatataatgacgcgcagttctcctgcgtgttcgagaaaaaaaaaagattgtaaggagatacctaggaagtctgatgtccctcaacacaagcttgtggtggcgtacttttgttttcgagtctgtgtccaccgggacaaatatgccaagatcacgagaatgaagtggtggaagtttagaggggaagtggcacaaacgtttaacgacaggatgctagggaaggggcttgggaagaagatgcagacgacatgtggctaaagatggcaacatgtgttcggaaggtggcttcatatgtgtttggtgtgagtaggggaggcaaaccggaaacgaaagacacttggtggtggaatgactaggtgcatagggctattaaggaaaaggagtgtttcaagcgcctccaccttgataagagtgcaaccaacatcaagggctataaaatagcgaagagggttgtaaagcgagccgtgagtgtagcaaaggggcaggcgtatgatgacctttatcaacggcaaggcacaaaggagggagagaagaacatttataggatggctaggatccgtgagaggaagacaagggacattaactaaatcaaatgcatcaaggatgagacagatcgacttctggcgaaggataagaagatgaaggacagatcgcgagagtacttcgacaagttgtttaatggggagaatgaaagttctaaccttgtgttggatgactcttttgacgataccaatagatactttgaggagaattcagaacacagagatcatggaggctctgaagaggatgggggtaaagcgatgggccctgatggcaaccccatggaggtgtgcagatgcctaggtaccagagcgatagtatggttaactaagctttttagcctcatctttcaatcaaaccggatgcctaaagaatggagaagtatattagtaccaatctttaagaagggagatgttcaaagttatactaattaccatgcgattaagctgatgagccatatgatgaagctctggaagagggttatcgagcatcgcttaagaagagtgacatgtgtgacctaaaaccagtttgggttcatgcctggaaggtcgaccatggaggcaattttcctcatatggcaatttatggagagatatagagagcagaaggacttgcacatagtttttatttaacttgagaaggcatatgacaaagtaccgagaaatgtcatgttgtgggccttggagaagcacaaatcccaactaagtacattactctcatcaaggatatgtacaaggatgcaatgacatttgtccgaacatgtgatggcaaaactagtgactttccaattaaaataggactacatcaaggatcagcattaagtccttatttatttgctacggtgatggatgaggccacaagggacatacaaggggatatcccttggtgtatgctctttactgatgatgtggtgttagttgatgacttgatgagagtagggaagaggttaataggaagctagagttgtggaagccacattggagtcgaaaggtttggacttagtaggaccaagaccaagtgcatgatgtgtgttttcaacgcgactagacataagaatggagatgttaccctcgatgggcaactggtggctagtatagagtcttttcgatatttaggatcaacgctacattaggatggtgacattgatgaagatgttaactattaagcatagaattttagccgattggttgaaatggtttcatgcttctagcgtccttatgacaagagggtgccacaaaagcttaaaggtaagttctataggacaacgattcgtctggcgatattatatggtgctaaatgttggccgacaaaaaggcaacaaaggcaacaactaagtgtaaaaataggtaagggtcaacctaaaatgacttgggacgagacaattaagagagatcttaaggagtggaatatctccaaggaattagctaaggataggtgcgcttggagactagcaatcaacatgtccgaaccatgatctttgcctttttctgtttactcttaactataccgtctttcttttaccctttcggtgtctctttttcctacccttgtttcttgtgggtttcatctctagcctactccaacttgattgggacaaaaggctatgttgttgttgttgcctgcattcttgacaaaagtataccagaagcacaaacctgtccacaggttgaaaa

SEQ ID NO: 80122 - DNA, 203 bp, Zea Mays
cccggttcgccaacgtcagcgacgaccacagcgccacggcgctacacctcgccgccatatgcaaggccgccccgactacgtgcaggtgctgctggagaacgacgctattgtctccgctctcacaggctcctacaggttccccggcagcacatcattgcatctggccgctcgcagtggggacctagattgcatccggaaaatgc

SEQ ID NO: 80123 - DNA, 483 bp, Zea Mays
attaccggttccacattttggggaggggattagcttttgaccgcgtcgcggcgtcattctcgaagtgcgcttttgctgaaaagaatgaatgcatggttttgggtacctacaagacgattccttacgccgccgcgctagagcgcaaccacggggagtgtgcggtgctgctgaacccatcatcggtggagccagtggtgtggcctccccgctcaatttcatcagcgagctggacccggaggctaaggctctcctggaagtggcactgacggacgccaatagggagagggagaggagaagatcatcaagggcaccaagtattctcagccgtcgccaccttcccctcgcgagcacgaggacgatgccattaacgaagcgtcctcagaggccagtgacgcggagctgtgctgcatctgcttcgagcaagcgtgcacgatcgaggtgcaggactacgggcaccagatgtgtgcggcgtgcacgctggcg

SEQ ID NO: 80124 - DNA, 2195 bp, Zea Mays
aaaaactgctgctgaagtctgcaccggttggaccataggttgtcgttcctgtgaagctaccatttttcggagatgcactgcagggtccaaagtgaagtgtcaaaggtttagcagagacttgccatactacggaagatgcaatcgaaaaggaaagtcagttgtgcgtgttttgacatggagagaaaagcttgaacagcacaaggcagctccaatttattctgctttctcgaggaagcaaccccaatttccaagaactacagcagggaagtggtgagatactaaacttcctgaacaacctggcacactacaatttttacatccaacaaatatgctttggtaggttatggagcgtttttcaaagtttgaagaatttagggctgacttttgatatgtgcatactgtatcaaatctaaaggttgttccagaactatgataaatcatgttgcacagagcaccagattttgcttctggactccaagcacaacactgaaaaggttgtcatagaactgcaatccatttttgaggtctggttttatttcggaacaagtcatatacaaggttctaaaaggtgtctttctgcggcctgctctgtttcttttaagtggtttgaatctgatgcctcaaatctgaattgaatccctattattaattagtttgttagttgttagtctgaaaagtattctgtgttagttgtttagctgattccctgcatctatctttgattgcctgaatgtataggttagcagattgcctgaatgcctactgtagtggtaatattgtttttcacttgttagttgctcactgaactctgaatgactgaatgtaggatgtcgactatatagcatgaatctcctaaaatcgaaggagcaaatatcctgaaaagaaattcaggtgacgtgggatgggaatatggggttcttgctgatgcttagaacaaggacaaggtgaagtgcatgtttttgtgatcattagagccaaggagggattcatcggttgaagcaacatgtggccaatgttggaaaaaatgtgaagaaatgcagggagagcacacaggaggctaaagacaggtgcaataaattgttgagttgatctcaagcaagactcaaaatggtattgtttctactgtccgtagaaacaagacacattgctttgaagaatgatttgtacatccatcacatggacgttttcacttgacgattgcaagaaacgattggttacgttaacatgcatgattgagcacattgcatatcaacagaaatttggaatatcaaccaagacattaatatatgtgtggttgtttcaactctatgcttgaattatcacttcaagatggagtggcagctgatttgaaaaagggtgggtaaccattaagagtttaagactatttggacaaacgagacatattgactgatagaagatcctactcgtgcatcatccactcaatcgttaggttaaatcatggcaagataaggatacatatggtcaatataggttcggaactgcagatccgactgtattgtgttatgtttggaactatgatacaatcacatactttagcaattgtggagccgaactgccgaagttacaggacaatggaagacgcggaggaagatggggtaggagcaaccagccaggcagtactgagtaccgagtactactgaagctaggtaggaattgggtcgcatcaggctggtaacaggtgtttgaagcccttcaggttgtgtcagcagagcaactttaacctctgtgcgccacctcgtctcggccagctgaggtctaacttgcccttcaaagtttaaacagacacaagcatagccagtgtgctgcttatgacactacatgaaatacccagttcttgaatatcgaagatccaggattttagattttgcgtattgtaatggtatgcatatatactgtaaactgtaaagtagacaagaataccaaaaaggaggaaactggaaaggtcaacacaaatatggaggttaggagcaatgactaacctggaaggaaacacgcagctcccatgacctgcccaaacaattcgcagcaccgacgcaacaagattacacattcggtaggaataatccaacaaaaaaaacgagaactaaaaagaaaagttcgaatctgaagaatgctgctgattcaagatcattcaaagtgtgggcaagctattcggggttcttactggggttgag

SEQ ID NO: 80125 - DNA, 841 bp, Zea Mays
aaaacgcatagggtggtggcgcttgcacgccctggcgactgcttgcggcggcggtgtcctgcgcgcccgcgccaaccatcctccggggcaacggcgacgtctgctcgcctacgtgcctagacggtgaggcagcgacatcaggacgcccgtgcgcacgcgtgcctgcacggcggctgtgcgccctcacgccggcttgccgaacggcgtggcggtggtgccatcctgcggggcggcgtggtggtcgcatgcctattcgccgggcggcgtggcggtcgtgcccatgagtcggatccacgtggctgcgcgcacgcgctacggagctgcaaggcgatggcgcccgcacgcaactctggcttggtagtggctgccagcccacaacaccagagaggcggtggtctattcctgcttcgtcgtgcctagctcaagaccggctgcttgcctgctttctcttcatgcttgctttctctattatgcagagggacaactcctttacgcatgcacagtgtactacacaccacgtgtgggagagaggagcatggaggtgagtgctcatgttcatccgctcttcttttctctctttctttcggatgttaaatgtcttgtttacatttgattgatcgttgatcggtatataccgacaacaatcatggtaacaagattttcagatgcaataactaacaatagtagttagattcttaccttttcgtgttacttccgtgaactcctgcgtcgcgagagcattcgtgctgataacttgttaagaaccctttgctaccgaatgtagtccgaatgcttcttaactcataaacacatgagacacaaagatataggaggaactgag

SEQ ID NO: 80126 - DNA, 763 bp, Zea Mays
aaaacgcatagggtggtggcgcttgcacgccctggcgactgcttgcggcggcggtgtcctgcgcgcccgcgccaaccatcctccggggcaacggcgacgtctgctcgcctacgtgcctagacggtgaggcagcgacatcaggacgcccgtgcgcacgcgtgcctgcacggcggctgtgcgccctcacgccggcttgccgaacggcgtggcggtggtgccatcctgcggggcggcgtggtggtcgcatgcctattcgccgggcggcgtggcggtcgtgcccatgagtcggatccacgtggctgcgcgcacgcgctacggagctgcaaggcgatggcgcccgcacgcaactctggcttggtagtggctgccagcccacaacaccagagaggcggtggtctattcctgcttcgtcgtgcctagctcaagaccggctgcttgcctgctttctcttcatgcttgctttctctattatgcagagggacaactcctttacgcatgcacagtgtactacacaccacgtgtgggagagaggagcatggagtttgccctcagtgcaacccatgctcaagtgaagaagatgtcgaagcgagtctccaggagttccaagacttcgataagtttgaattctaggccagtgagtcccccaagtcatatgcttgtggagggtcgagttatcttagtttaaatagtttgcatcttttcatgagtatgatgagaaatggttgtgtttaaatattatggcttctatttgttgggaatgaat

SEQ ID NO: 80127 - DNA, 1149 bp, Zea Mays
ccctgttgtgctgtcaccttggaactcttcaccactaggatagctaaacctgaagacgtctgccttcctgccctttatttaagtgctggttcggtgaagatttccctctgccttggtgttctagccaaagcttgcagtggtgtgagggattcatgtgtattgcaagacagagctcctctcccactgccaccaagttggcactgtccagagctgtgtgcgctgtcttcctgtgtttgtgatgaccacagccaccaagttcaccacaccatagccagaacattctagggagttgttagcctgtatgaagcttgttccgtaatcatctcaggtcagtgaagctcacaccatttactacttgaactcaccactattggttgcctagaactaggtgtgaaatttgctcaaacataggctgtcaggtttttggatcccagacttagtacagaaggctgaaactagattctagtgtgttgagctccactttgtgactgaattttattcagttagctgaaataacagtttagtgtgggggtaactttggggtacaatagaatttgctctgaatgttttcaatcatggactgttataccaagttggtaaagctaaagttggagtataactttggctaagaacctttggtctgtaccatatgaaattgtgagataccaggggttttaacagggaggtgtgttgatggggtagcaggcctaaggtaattgagttcaggctttcatttgaaaactaacgaagatcactcctgctactctcacctgtgtatgtgaatagaagtgaggggcaacggagactgaatattggttgtggtgtctgttggggggctgcttcgtcgccgaaggtcttgagagaagaaacaccttcagaaggccataacacaataccgaagttaccagttagggagcttcgtagcgtatctctcgatgcaccgacttaaagatgaaatgaccaactggcccatgacaacctgtgttatgattgtaaccatttgtaaaggacatgaatgtaatttctcacaggctgcgtcctgtgcctataaatagatgaacagtactccgtactgttcacactttttcgcatcttactcttgccttggtctcctgttaagctcaaggtacaaatgtaatttgatattgt

SEQ ID NO: 80128 - DNA, 1673 bp, Zea Mays
cagtggctgccacacccacacctcatcctgagctgctgcagcacctgcaaagctctgcaagcatccagcacaggccacactggccacctctctctcactctcttcactcccacagccgcagtttatataaagcaaaagcggaggagagcaacgcgccacacaagcaaagaacttggccccgcctcccgtctcttaccgcacatgcgcgtcgggccgcgtcgacatagctgcttgccgccgacacccgcagccgcaatggccgtcgcccacgcgccgccgcgccggggcgtgctccccctcctgctcgtcgccgcgctcgtggcggcgttgccggccacctgcgccgcggccaggagcaagaagtcgtacacggccatcttcagcttcggggactcgctctccgacgccggcaacctcatcgtcaacggcacgcccaaggcgctcaccaccgcgcgccctccctacgggatgaccttcttccgcaagcccaccggccgctgctccaacggccgcctcgtcgtcgacttcctggccgagcatttcgggctgccactgccgccaccgtcgcaggccaagggcaaggacttcaagaagggcgccaacttcgccatcaccggcgcgacggccctggagtactccttcttcaaggcgcacggcatcgaccagcgcatctggaacaccggctccatcaacacccagatcggctggctccaggacatgaagccgtccctctgtaaatcggagcaagactgcaaggattacttcagcaaatccctgttcgtcgtcggggagttcgggggcaacgactacaacgcgccgctcttctccggcgtcccattttctgatgtcaagacttacgtgccccttgttgcaaaggctatcgccaatggcgttgagacctcctggtgcctggcgttctcccaattggctgcttcccgttgtacctgacgctgtacaacaccagcagcaaagcagactacaacgcccggaccgggtgccttcggaggtacaaccgcctggccttccaccacaacagggagctgaagcagcagcttgacgagcttcagaagaagtaccccaagacgaagatcatgtatggagattacttcaaggctgcactgcagtttgtcgtcaaccctggaaaatttggttttagcacggccttgcaggcgtgctgcggcgcaggagggcagggcaactacaacttcaacctgaagaagaagtgtggcgagcagggcgcgagcgtgtgctccaacccgtcgtcgtacgtgagctgggacggcatccacatgaccgaagctgcgtacagaaaggtcgccaatggctggttgaatggcccgtatgctcagcccccaattctcaagtcatgatcgagattactaggctgtgcgtaataccgccgcagctgcatgctgcggctagagatatatatgaggagtgtttcaggcaatagatatgctaagttatggtaaagctatttggtctgttcattggaagatctgtataaactgcgccggtatagatatgttcccagctgaaatggctctagcacagatgtgcatggcatgttctctgattcttttcatttgttctaaaaaaatattgcggcagtaatatgagttgataaaagtaactaaatttctgcaattttatcaggcttcaaagctaccatt

SEQ ID NO: 80129 - DNA, 849 bp, Zea Mays
ctgtaactagcttaacggctttatacatctgtttgcccgtacctacgtaaactgatcgagcttggggcaacagacctcctggtgcctggcgttctcccaattggctgcttcccgttgtacctgacgctgtacaacaccagcagcaaagcagactacaacgcccggaccgggtgccttcggaggtacaaccgcctggccttccaccacaacagggagctgaagcagcagcttgacgagcttcagaagaagtaccccaagacgaagatcatgtatggagattacttcaaggctgcactgcagtttgtcgtcaaccctggaaaatttggttttagcacggccttgcaggcgtgctgcggcgcaggagggcagggcaactacaacttcaacctgaagaagaagtgtggcgagcagggcgcgagcgtgtgctccaacccgtcgtcgtacgtgagctgggacggcatccacatgaccgaagctgcgtacagaaaggtcgccaatggctggttgaatggcccgtatgctcagcccccaattctcaagtcatgatcgagattactaggctgtgcgtaataccgccgcagctgcatgctgcggctagagatatatatgaggagtgtttcaggcaatagatatgctaagttatggtaaagctatttggtctgttcattggaagatctgtataaactgcgccggtatagatatgttcccagctgaaatggctctagcacagatgtgcatggcatgttctctgattcttttcatttgttctaaaaaaatattgcggcagtaatatgagttgataaaagtaactaaatttctgcaattttatcaggcttcaaagctaccatt

SEQ ID NO: 80130 - DNA, 2137 bp, Zea Mays
gaagacccgtgtggtcgttggattctggaaaaccactcgttgcttctggaacaccaccgcgaaagcaaaggaataacgagccgaggaaatggccacgcggtcactcacctccgcacttccgctctccagaaccccgcgcgtcccctcgcatcgtccctctctccgccgactccaaaccctaacccgcgcgcttacctcctcgtcccctcaggccatggcgtcgtcccctacccccaagaaggtgctggtcccgatcgcgaatgggacggagccgatggaggcggtcatcaccatcgacgtgctccggcgcgcgggggccgatgtcgccgtcgcttccgtcgagccgggggcgacgtccgtagctgcctcatggggcatcaagcttaccgccgacgcgctcctcgccgacctcgcggacgatgagttcgatctcatctctctaccgggagggatgcctggttcttcgacttttggagagtgcaaagttttggagaaaatggtcaaaaaacatgtagagaagggcaagctttatgctgcaatttgcgctgcaccagcaatgactctaggaacttggggtttgctcaatggcttaaaggcaacatgttatccttcgttcattgataaacttccttcagaggtacatgctgtggaatcaagagtgcagattgatgggaagtgtatgaccagtcgtggaccgggaacagccatggagtattctgttattttggttgagcaactatatggaaaggaaaaagctaaagaagttgctgggccaatggaggactgtctcattatattaagaagaaagaaggttatggggccagaaaacagcccaaacacaggagcctccttacggaggatgaaaacatgaaaacataaaaggactcataaggaacctataaacaacatcctcacatcaagtaagacagggagagagaaactagactgcagggtgccgggcagccaaggcccaagttgtttcgactaaaaaggctttgttgtgttttcttgcaactttcctgcatttgattcctgtttccatcatattagttttgaagtagtagtttttttgttgacatttgcaacatctcttgttctttgtttttttactatagttgatgtatttttgacagctgttaattctattcaactaagtgaatattacctttcaggttatgcgtcctcagcatggtgtggaattctctatgaaagaggtgaattcaactagttggaatgttggtgaaacaccaaatattctagtaccaatcgctaatgggacagaggagatggaagcaactatgatacttgacattttgcgtagggcgaaagcaaatgttgtggttgcctccttggaagacaagctagagattgttgcatccaggaaggtgaagatgattgctgatgtgctgttggatgatgctcttaaggagcaatatgatctcattctgttacctgtctgggtggtgcagaagcatatgcaaaatctgataaactaatggatctgatcaagaagcaagctgcggcaaatagattgtatggagctatatgtgcctcccctgcgattgctcttgaaccacatggcctactaaagggaaagaaagttacatcctatcctgctatgtggaacaaacttgcagaccaaagcgaatgcaacaacagagttattgttgatggtaacctaatcaccagccaaggtcctgggacttctatggaattctcgcttgccatagtggagaaactctttggacgggagagagcccttgagctggccaaatccatggtttttatttgagttgaaatggtacgtgtacgtattaggtttctggagtatgtacttgtgtaaatcgaggcatgctatgttctttttcttgtggaatgtacttcaaatccccttttaaatagaaataagacgaacgcttgtaatgtgtttcatatgcagtaaaaggtttgaggcaaacattaagcgaagacagtcctgaacctcacgttctatgaaatctttttgctcgtttgaagctagcctatattgaaatggggtgtagcagttaggtgacgagcatagcatgttttggctttttagatatagtttttcttatgaacgtagatataaataatgtctagaaactaataaaattaa

SEQ ID NO: 80131 - DNA, 1834 bp, Zea Mays
cccgtgtggtcgttggattctggaaaaccactcgttgcttctggaacaccaccgcgaaagcaaaggaataacgagccgaggaaatggccacgcggtcactcacctccgcacttccgctctccagaaccccgcgcgtcccctcgcatcgtccctctctccgccgactccaaaccctaacccgcgcgcttacctcctcgtcccctcaggccatggcgtcgtcccctacccccaagaaggtgctggtcccgatcgcgaatgggacggagccgatggaggcggtcatcaccatcgacgtgctccggcgcgcgggggccgatgtcgccgtcgcttccgtcgagccgggggcgacgtccgtagctgcctcatggggcatcaagcttaccgccgacgcgctcctcgccgacctcgcggacgatgagttcgatctcatctctctaccgggagggatgcctggttcttcgacttttggagagtgcaaagttttggagaaaatggtcaaaaaacatgtagagaagggcaagctttatgctgcaatttgcgctgcaccagcaatgactctaggaacttggggtttgctcaatggcttaaaggcaacatgttatccttcgttcattgataaacttccttcagaggtacatgctgtggaatcaagagtgcagattgatgggaagtgtatgaccagtcgtggaccgggaacagccatggagtattctgttattttggttgagcaactatatggaaaggaaaaagctaaagaagttgctgggccaatggaggactgtctcattatattaagaagaaagaaggttatggggccagaaaacagcccaaacacaggagcctccttacggaggatgaaaacatgaaaacataaaaggactcataaggaacctataaacaacatcctcacatcaagtaagacagggagagagaaactagactgcagggtgccgggcagccaaggcccaagttgtttcgactaaaaaggctttgttgtgttttcttgcaactttcctgcatttgattcctgtttccatcatattagttttgaagtagtagtttttttgttgacatttgcaacatctcttgttctttgtttttttactatagttgatgtatttttgacagctgttaattctattcaactaagtgaatattacctttcaggttatgcgtcctcagcatggtgtggaattctctatgaaagaggtgaattcaactagttggaatgttggtgaaacaccaaatattctagtaccaatcgctaatgggacagaggagatggaagcaactatgatacttgacattttgcgtagggcgaaagcaaatgttgtggttgcctccttggaagacaagctagagattgttgcatccaggaaggtgaagatgattgctgatgtgctgttggatgatgctcttaaggagcaatatgatctcattctgttacctggaggtctgggtggtgcagaagcatatgcaaaatctgataaactaatggatctgatcaagaagcaagctgcggcaaatagattgtatggagctatatgtgcctcccctgcgattgctcttgaaccacatggcctactaaagggaaagaaagttacatcctatcctgctatgtggaacaaacttgcagaccaaagcgaatgcaacaacagagttattgttgatggtaacctaatcaccagccaaggtcctgggacttctatggaattctcgcttgccatagtggagaaactctttggacgggagagagcccttgagctggccaaatccatggtttttatttgagttgaaatgcactccaggacacaagattactaccaagataaac

SEQ ID NO: 80132 - DNA, 1861 bp, Zea Mays
aaaaccactcgttgcttctggaacaccaccgcgaaagcaaaggaataacgagccgaggaaatggccacgcggtcactcacctccgcacttccgctctccagaaccccgcgcgtcccctcgcatcgtccctctctccgccgactccaaaccctaacccgcgcgcttacctcctcgtcccctcaggccatggcgtcgtcccctacccccaagaaggtgctggtcccgatcgcgaatgggacggagccgatggaggcggtcatcaccatcgacgtgctccggcgcgcgggggccgatgtcgccgtcgcttccgtcgagccgggggcgacgtccgtagctgcctcatggggcatcaagcttaccgccgacgcgctcctcgccgacctcgcggacgatgagttcgatctcatctctctaccgggagggatgcctggttcttcgacttttggagagtgcaaagttttggagaaaatggtcaaaaaacatgtagagaagggcaagctttatgctgcaatttgcgctgcaccagcaatgactctaggaacttggggtttgctcaatggcttaaaggcaacatgttatccttcgttcattgataaacttccttcagaggtacatgctgtggaatcaagagtgcagattgatgggaagtgtatgaccagtcgtggaccgggaacagccatggagtattctgttattttggttgagcaactatatggaaaggaaaaagctaaagaagttgctgggccaatggaggactgtctcattatattaagaagaaagaaggttatggggccagaaaacagcccaaacacaggagcctccttacggaggatgaaaacatgaaaacataaaaggactcataaggaacctataaacaacatcctcacatcaagttatgcgtcctcagcatggtgtggaattctctatgaaagaggtgaattcaactagttggaatgttggtgaaacaccaaatattctagtaccaatcgctaatgggacagaggagatggaagcaactatgatacttgacattttgcgtagggcgaaagcaaatgttgtggttgcctccttggaagacaagctagagattgttgcatccaggaaggtgaagatgattgctgatgtgctgttggatgatgctcttaaggagcaatatgatctcattctgttacctggaggtctgggtggtgcagaagcatatgcaaaatctgataaactaatggatctgatcaagaagcaagctgcggcaaatagattgtatggagctatatgtgcctcccctgcgattgctcttgaaccacatggcctactaaagggaaagaaagttacatcctatcctgctatgtggaacaaacttgcagaccaaagcgaatgcaacaacagagttattgttgatggtaacctaatcaccagccaaggtcctgggacttctatggaattctcgcttgccatagtggagaaactctttggacgggagagagcccttgagctggccaaatccatggtttttatttgagttgaaatggtacgtgtacgtattaggtttctggagtatgtacttgtgtaaatcgaggcatgctatgttctttttcttgtggaatgtacttcaaatccccttttaaatagaaataagacgaacgcttgtaatgtgtttcatatgcagtaaaaggtttgaggcaaacattaagcgaagacagtcctgaacctcacgttctatgaaatctttttgctcgtttgaagctagcctatattgaaatggggtgtagcagttaggtgacgagcatagcatgttttggctttttagatatagtttttcttatgaacgtagatataaataatgtctagaaactaataaaattaa

SEQ ID NO: 80133 - DNA, 1840 bp, Zea Mays
catcgatctatgcacttttcctgcgcatgcagacaccttttcgctcttgcagtgtcagtttgacaccttggcgatgccattctgcttgagcttatcagggaagacacggcgcctcaatcagaaaaaaaacgcccagatgcctagggagggatgcctggttcttcgacttttggagagtgcaaagttttggagaaaatggtcaaaaaacatgtagagaagggcaagctttatgctgcaatttgcgctgcaccagcaatgactctaggaacttggggtttgctcaatggcttaaaggcaacatgttatccttcgttcattgataaacttccttcagaggtacatgctgtggaatcaagagtgcagattgatgggaagtgtatgaccagtcgtggaccgggaacagccatggagtattctgttattttggttgagcaactatatggaaaggaaaaagctaaagaagttgctgggccaatggaggactgtctcattatattaagaagaaagaaggttatggggccagaaaacagcccaaacacaggagcctccttacggaggatgaaaacatgaaaacataaaaggactcataaggaacctataaacaacatcctcacatcaagtaagacagggagagagaaactagactgcagggtgccgggcagccaaggcccaagttgtttcgactaaaaaggctttgttgtgttttcttgcaactttcctgcatttgattcctgtttccatcatattagttttgaagtagtagtttttttgttgacatttgcaacatctcttgttctttgtttttttactatagttgatgtatttttgacagctgttaattctattcaactaagtgaatattacctttcaggttatgcgtcctcagcatggtgtggaattctctatgaaagaggtgaattcaactagttggaatgttggtgaaacaccaaatattctagtaccaatcgctaatgggacagaggagatggaagcaactatgatacttgacattttgcgtagggcgaaagcaaatgttgtggttgcctccttggaagacaagctagagattgttgcatccaggaaggtgaagatgattgctgatgtgctgttggatgatgctcttaaggagcaatatgatctcattctgttacctggaggtctgggtggtgcagaagcatatgcaaaatctgataaactaatggatctgatcaagaagcaagctgcggcaaatagattgtatggagctatatgtgcctcccctgcgattgctcttgaaccacatggcctactaaagggaaagaaagttacatcctatcctgctatgtggaacaaacttgcagaccaaagcgaatgcaacaacagagttattgttgatggtaacctaatcaccagccaaggtcctgggacttctatggaattctcgcttgccatagtggagaaactctttggacgggagagagcccttgagctggccaaatccatggtttttatttgagttgaaatggtacgtgtacgtattaggtttctggagtatgtacttgtgtaaatcgaggcatgctatgttctttttcttgtggaatgtacttcaaatccccttttaaatagaaataagacgaacgcttgtaatgtgtttcatatgcagtaaaaggtttgaggcaaacattaagcgaagacagtcctgaacctcacgttctatgaaatctttttgctcgtttgaagctagcctatattgaaatggggtgtagcagttaggtgacgagcatagcatgttttggctttttagatatagtttttcttatgaacgtagatataaataatgtctagaaactaataaaattaa

SEQ ID NO: 80134 - DNA, 1545 bp, Zea Mays
tcactttcctcgtgtttttcttgcctgtctccatactcatcgatcggttgctttttgtcgtcagttcttttgaggagctgagctacaatcaggcaagggatatttccgagatcttagctaggttttacagggaggaatgcatccaggtgttggaccattgtcggtgccaccaggcttccgcttccatccgactgatgaggagctcctctactactacctgaggaaaaaggttgcttatgagcccatagatcttgatgtcataagggagattgatctcaataagcttgagccctgggatctcaaagaaagatgcaaaataggcactgggcctcaaaacgagtggtacttcttcagccacaaggacaagaagtacccaacgggaacgagaacgaaccgtgccacgacggcgggattctggaaggcgactggccgagacaaggccatcttccttggcagcgccaggaggatcggcttgagaaagaccctggtgttctatatcggcagggcgccgcacgggaagaagactgagtggatcatgcacgagtaccgccttgatgaagagaacgttgaaattcagggttttcaagaagaagaactatgagcagagaggccacaacatggctgagatggcggcactggacgacgatgagctccagcctttcacggttcctgtcgtccctgctggcactagctccctgccaacaacagaccacaagaacaaccctcacctcatgcaatatgacttcccttctttcgacccttccatgcagctcccacagctgatgagcgccgaccagcccgtgccaaccctattccccagccatcctggcgtcgccacggccatgagctcatcaatcgacgttgagtgctcgcagaacctgctgacgatgctgacatccaacggcagcgacgggatgctccacgtccgcgctggtggtgctggagctggtgtcgaccgcttcgctggcacgacagattggtcgatcctagacaagctcctcgcctcgcaccagaacctcgaccagctcttccacggcaaggtcaccgcagcatctgcctccccaatggctccataccatcagcagctcatggaactcggtggctcgtcgtcgtcgtcgtccttgcagaggcttccactgcagtacctcagcggcgagacgaccgatctcctcaggttccccaagtaattattggatcgacctcaagtttagctaccttgttgagcagtgaccatatcaggattttggttgactactaggctgcttaattcggcctacttcgtatggagtttagtgcttttaaatgtatatatggtgcaactgtttggggcatgcaggcatggaatgccatcgatctaccatggttgcttgcttggccaagaggatgttttcgatgtttccattttggcttagggttgctcgttaggttcttttggagaaaaaatgtgaagagatggcccggtaaattaagaacttctatttgtttcccacagattggtcttttggttgttcgttcaactataataatataggatggggcatttat

SEQ ID NO: 80135 - DNA, 1557 bp, Zea Mays
tcactttcctcgtgtttttcttgcctgtctccatactcatcgatcggttgctttttgtcgtcagttcttttgaggagctgagctacaatcaggcaagggatatttccgaggttttacagggaggaatgcatccaggtgttggaccattgtcggtgccaccaggcttccgcttccatccgactgatgaggagctcctctactactacctgaggaaaaaggttgcttatgagcccatagatcttgatgtcataagggagattgatctcaataagcttgagccctgggatctcaaagaaagatgcaaaataggcactgggcctcaaaacgagtggtacttcttcagccacaaggacaagaagtacccaacgggaacgagaacgaaccgtgccacgacggcgggattctggaaggcgactggccgagacaaggccatcttccttggcagcgccaggaggatcggcttgagaaagaccctggtgttctatatcggcagggcgccgcacgggaagaagactgagtggatcatgcacgagtaccgccttgatgaagagaacgttgaaattcaggaagatggatgggtggtatgtagggttttcaagaagaagaactatgagcagagaggccacaacatggctgagatggcggcactggacgacgatgagctccagcctttcacggttcctgtcgtccctgctggcactagctccctgccaacaacagaccacaagaacaaccctcacctcatgcaatatgacttcccttctttcgacccttccatgcagctcccacagctgatgagcgccgaccagcccgtgccaaccctattccccagccatcctggcgtcgccacggccatgagctcatcaatcgacgttgagtgctcgcagaacctgctgacgatgctgacatccaacggcagcgacgggatgctccacgtccgcgctggtggtgctggagctggtgtcgaccgcttcgctggcacgacagattggtcgatcctagacaagctcctcgcctcgcaccagaacctcgaccagctcttccacggcaaggtcaccgcagcatctgcctccccaatggctccataccatcagcagctcatggaactcggtggctcgtcgtcgtcgtcgtccttgcagaggcttccactgcagtacctcagcggcgagacgaccgatctcctcaggttccccaagtaattattggatcgacctcaagtttagctaccttgttgagcagtgaccatatcaggattttggttgactactaggctgcttaattcggcctacttcgtatggagtttagtgcttttaaatgtatatatggtgcaactgtttggggcatgcaggcatggaatgccatcgatctaccatggttgcttgcttggccaagaggatgttttcgatgtttccattttggcttagggttgctcgttaggttcttttggagaaaaaatgtgaagagatggcccggtaaattaagaacttctatttgtttcccacagattggtcttttggttgttcgttcaactataataatataggatggggcatttat

SEQ ID NO: 80136 - DNA, 1530 bp, Zea Mays
tcactttcctcgtgtttttcttgcctgtctccatactcatcgatcggttgctttttgtcgtcagttcttttgaggagctgagctacaatcagggaggaatgcatccaggtgttggaccattgtcggtgccaccaggcttccgcttccatccgactgatgaggagctcctctactactacctgaggaaaaaggttgcttatgagcccatagatcttgatgtcataagggagattgatctcaataagcttgagccctgggatctcaaagaaagatgcaaaataggcactgggcctcaaaacgagtggtacttcttcagccacaaggacaagaagtacccaacgggaacgagaacgaaccgtgccacgacggcgggattctggaaggcgactggccgagacaaggccatcttccttggcagcgccaggaggatcggcttgagaaagaccctggtgttctatatcggcagggcgccgcacgggaagaagactgagtggatcatgcacgagtaccgccttgatgaagagaacgttgaaattcaggaagatggatgggtggtatgtagggttttcaagaagaagaactatgagcagagaggccacaacatggctgagatggcggcactggacgacgatgagctccagcctttcacggttcctgtcgtccctgctggcactagctccctgccaacaacagaccacaagaacaaccctcacctcatgcaatatgacttcccttctttcgacccttccatgcagctcccacagctgatgagcgccgaccagcccgtgccaaccctattccccagccatcctggcgtcgccacggccatgagctcatcaatcgacgttgagtgctcgcagaacctgctgacgatgctgacatccaacggcagcgacgggatgctccacgtccgcgctggtggtgctggagctggtgtcgaccgcttcgctggcacgacagattggtcgatcctagacaagctcctcgcctcgcaccagaacctcgaccagctcttccacggcaaggtcaccgcagcatctgcctccccaatggctccataccatcagcagctcatggaactcggtggctcgtcgtcgtcgtcgtccttgcagaggcttccactgcagtacctcagcggcgagacgaccgatctcctcaggttccccaagtaattattggatcgacctcaagtttagctaccttgttgagcagtgaccatatcaggattttggttgactactaggctgcttaattcggcctacttcgtatggagtttagtgcttttaaatgtatatatggtgcaactgtttggggcatgcaggcatggaatgccatcgatctaccatggttgcttgcttggccaagaggatgttttcgatgtttccattttggcttagggttgctcgttaggttcttttggagaaaaaatgtgaagagatggcccggtaaattaagaacttctatttgtttcccacagattggtcttttggttgttcgttcaactataataatataggatggggcatttat

SEQ ID NO: 80137 - DNA, 1548 bp, Zea Mays
tcactttcctcgtgtttttcttgcctgtctccatactcatcgatcggttgctttttgtcgtcagttcttttgaggagctgagctacaatcaggcaagggatatttccgagggaggaatgcatccaggtgttggaccattgtcggtgccaccaggcttccgcttccatccgactgatgaggagctcctctactactacctgaggaaaaaggttgcttatgagcccatagatcttgatgtcataagggagattgatctcaataagcttgagccctgggatctcaaagaaagatgcaaaataggcactgggcctcaaaacgagtggtacttcttcagccacaaggacaagaagtacccaacgggaacgagaacgaaccgtgccacgacggcgggattctggaaggcgactggccgagacaaggccatcttccttggcagcgccaggaggatcggcttgagaaagaccctggtgttctatatcggcagggcgccgcacgggaagaagactgagtggatcatgcacgagtaccgccttgatgaagagaacgttgaaattcaggaagatggatgggtggtatgtagggttttcaagaagaagaactatgagcagagaggccacaacatggctgagatggcggcactggacgacgatgagctccagcctttcacggttcctgtcgtccctgctggcactagctccctgccaacaacagaccacaagaacaaccctcacctcatgcaatatgacttcccttctttcgacccttccatgcagctcccacagctgatgagcgccgaccagcccgtgccaaccctattccccagccatcctggcgtcgccacggccatgagctcatcaatcgacgttgagtgctcgcagaacctgctgacgatgctgacatccaacggcagcgacgggatgctccacgtccgcgctggtggtgctggagctggtgtcgaccgcttcgctggcacgacagattggtcgatcctagacaagctcctcgcctcgcaccagaacctcgaccagctcttccacggcaaggtcaccgcagcatctgcctccccaatggctccataccatcagcagctcatggaactcggtggctcgtcgtcgtcgtcgtccttgcagaggcttccactgcagtacctcagcggcgagacgaccgatctcctcaggttccccaagtaattattggatcgacctcaagtttagctaccttgttgagcagtgaccatatcaggattttggttgactactaggctgcttaattcggcctacttcgtatggagtttagtgcttttaaatgtatatatggtgcaactgtttggggcatgcaggcatggaatgccatcgatctaccatggttgcttgcttggccaagaggatgttttcgatgtttccattttggcttagggttgctcgttaggttcttttggagaaaaaatgtgaagagatggcccggtaaattaagaacttctatttgtttcccacagattggtcttttggttgttcgttcaactataataatataggatggggcatttat

SEQ ID NO: 80138 - DNA, 1171 bp, Zea Mays
cgaggggcagggtgaagaagtcggtggagaatgcctcgccgtcgatgaagaactgggcaccatggtacacacccgagcatggcaccaagtcactgttggccaccgtgacgtggagattgccgccttggtgacgcggaaacgtggtgcggctagaggcttcttcggcgatgaagttgtgggtagagccgaagtcgaggagggcgaggagggagacgccacccatcttgatgcgcatttgcattgtttcgctggtgcggatgtcgatgatcgcgtgcaccgagatatgtggtttgtcgtcggtcggagcttccacgcccgtgtccgtctcgtcgtctatcggcgccaggttgaagaggatgatgcgctggcagacacggttgtgaccgcgcccgaactttcgttgcagttgaagcacagccccaagcgtgtaagtaaagggactctaactctcatcaagaggatgacactatgagttggggcaatttttctgtttatttcctcaaacactacataatgccatacccttagaggggttggggacacatatttatagccctaggggctgcactaccacaccttctcacacacactacacaacaggattgtcctctagatgctaaagagactacagaggacagtcaaaagcgattgttgtcctctagatgctaaagcgactacagaggacagtcaaaaagcgactgttgtcctctagatgctaaagagactacagaggacagtcaagctgtcctctagatgctaaaggactacagaggacagtcaaaagcaggctgtcctctagatgctcaagacttattccatcattctccccataagtcttgggcgtcgtcttgtgagaaagttgggtcatcccggacctggagcaaagctcaacaaacttgatcttcccaaggggcttggtgagcaggtctgcaagctgatccttggtgttgatgtagcgcgccttgatgctcccttctgccaagcagtctcggatgaagtgtatctcagccggatgtgcttgctccgttcatggaacacggggttcttggccaatgccagagcggactggctgtccaccctgagttccaccgctccagtgtctctcccgaggagatcaccgagcagtcgagccagccagagtgcctgagtcgaagcagtggacgccgctatg

SEQ ID NO: 80139 - DNA, 2668 bp, Zea Mays
gtgggctagtgaggggtcgctgcgtgtggaagaggttgtctcagacgaaaggctgctcgtctgagcaggggaggaaggaacagttggagctcttgctgccgactgagtgtggggagaggcgcaggaaggagatgaacacgagatgtttaggctgcaggatagtttggctctgataccaattgtaagtaaagggactctaactctcatcaagaggatgacactatgagttggggcaatttttctgtttatttcctcaaacactacacaatgccatacccttagaggggttggggacaaatatttatagccctagaggctgcactaccacaccttctcaaacacactacacaacaggattgtcctctagatgctaaagagactacagaggacagtcaaaagcgactgttgtcctctagatgctaaagcgactacagaggacagtcaaaaagcgactgttgtcctctagatgctaaagagactacagaggacagtcaagctgtcctctagatgctaaaggactacagaggacagtcaaaagcaggttgtcctctagatgctcaagacttattccatcaaagcggcgccgttccggagcctgctggcctgcagcttgcgggtggggagctggcagcgccaggcgtggtggtggagttggtagaagccctctttgttgtggatgtcgaggctgtgaagcgagggtcgccgcacactgatcacggagttccagcttgcgggtgaggctcatggcgacggcaagtgattgtgggttgtggatctcgacgtcgaggctgagaggggctgcagcccggctgtgaaaagttgcaccttctggagctccgtgagcatgccgacgcggggaaggagggcctcgaaccgctcctagtaatctgcgactgtcccgtgtgtttgcacgccacgagttcaccgagtgggttggcacgcaaaggtggcccgaagcgtgtgttgagcagttcgacgaagcgtctccatgatggagtgccttctttgctctggatctgcataaaccatatctaggcgccatcctccagattataggaggccatccatacctgctcttcggtcgcgatccgttgctggaagaagtatgattcacaccggtttatgaacgccaggggtcagacttccgtcgaacttgggaaagtccatcttctggaaacgtggtggactgtcgctgtggtggtcgcctccatgcatgatgcgggagccggacgcggatgtgtcgttggggcgttgttccagtgcgtcgaacttggcctgcagcgtctcgacggttgcagtcagcttggtgatgagggctgcgaggtctgctgttgatggcgtggcatggtagttggtgtggcatgtgggctgggcgtatgtgggtcagaggatcggaggatcgactggatcgtgaattcgtgataccaggttgtcaaggactccaatgcccaagacagcagggccccgactacggagctcttagtcgcggtcagcaaaggccctagggattttgcctggtaacccaattgtggaggtgagattggagaggaacaataggagacaggagataggaaattattgcttgccttattaaaacagtcgcctactttatatatagccaggacagcctaaccaactcctatttattctctatacttatcttcgtaaacaacttcctaacaatgtatccctatttgctagcagcagacagctctgatatgttgctggtcgtgagcttatcttctaaacaaatctcctattttctagctactagcaactgctagctattcctgcgccctgatctgctgctggtcgcgtggccgacgctggtagtggtgaccccacatgacagcagaaaacaactctcacgagtaaatcaccaggtaaacactaatgtagccttgatgcttgcttaattgtgtatgctatatagtatatatagtatagtaggtatgtcctgatatataggacgactatatggacgactaagatcgactaggctcgactaatcggacaggttgatgactaatcatgattaatcacctggtcggtcccatggcgactaggttctattacgatttgtaaacattgatcatggtggagtatatctaaatatgtattgttaaaaaaaagaaaaatgtgttactaaaagagaaatgtattaatttagggcctgtttggcatggctccagagcaaaactccaaggaggagctcgccagagcatgccaaacaccctaactccagagttgtaaactctatggagtttttggagctacagtacaaaattttggagtacctcttttgctactccgaaaactccaaaaaacaccttagtcatggagtttggagttatttacccgccactgccaccggttatgagaaacaatctaaactctggagcagagctgctccacccagagttttggagtagagctgctctggggtggagcagagccatgccaaacacgcccatagtttggccgcttctcaatactgattggatctgttaaaaccccaaaatcatgctaatagtgttcacgcaatacaaaggagatatgggaaggaaaaacatctttttctagaatacgcaggagagctgcgtattttttatattaagaagacaagaaaaggtcttaagaagaccaagtacaaggcgctatacaagca

SEQ ID NO: 80140 - DNA, 3010 bp, Zea Mays
gtcatggaggagtcgccgtcgttcaccgccattctaaggatttgactagttctctgttatcctgtccttgaattacctttttgcgttgagctattatgattaatatcatgctagtgctttgctttaatcaataaacatgatgagaatactttatgatacgatgatgttttttttggatatgatgatgaacttgtgggcactaaagggggactcggattgtttcccgagtgtctctccattaggacctattcgttggatgatcacccaagaaaacagtacaaccatgagggtggtatgggacgcccttagctgattaattagaggaacttgaggtgtagtctgcttcgtcgtcttgccgttaatggggtccaggcatagtacttgctctgtcgaggcttgggtgccgagattctttcgttctgcttttgttagtcacccttcctgtggggagaggtactgtgtttatcaaattggagaaacctaacgggcagctatgacctctaggaaatttttgtaaaggctacgtagtgaaaccttgccgactcaccttaggagtgtttaagggtctgtacaacctgaggcaaaaaagggggatcacggctcgtgcgtaaagtgtgcgacctctgcaaagggttagaaactggtatatcagccgtgctcacggttatgagcggccttgggagctcctttgattagagatatttcagacacctttatgatgatggtttaatgatgattataattatggatccttttgtagttcctctctaagggggtactcttttgggataataatttggggttattgctaaaacttggcttctactaataataaatacctgacgaactaaaagcaactgctttgagcttcaccccacatacagctaatccactttagtcaaatgggacatttgctgagtacgttgatgtgtactcacccttgcttaaacactaaacaccaggttgtcccattgcaacccctgctcaggagaagatgaaggccatgcggaagactttcaggagtttcaggacgtcgatgagttctagagtagattagcggcaaaccttcaatcagttgcctgtgaaggtcttatctttgctgtgtttctctttagcactttgattattgtttaagttaatgactatgtgggtgtccctaacatcgtgatgtaataaagtactactttatgttttattcgagcaccgtgcgatgatgttcagttatgtaatcgttgtgtacgtgaatttctgatcttagcacgtacatagttcgcatttggtttgccttccaaaaccgggtgtgacataaatggtatcaaagtcgtgctgactgtagaaccgacaatctacgacggcaagcggtgggcgacggctactagttttgaagctatagcgggtatactactagttgtgatccttaaagtatttgttccatgttctgttagtgcagaactttgtaatctgatcagcatgtttaggtctgtctagactccagtagtagtacttcagtaatcagtagtattcctggtatgtcgtatgcattatttaggatgcttggatttctttagatatagacaatcttggaaataaatttcatttgtaaatccttttcggatgacatttgtaattgtttattcttaagttttctagtaagatgcaattgcttcaatatagactgtagttgtgtcttgttgtgtttagctgtttattagtctatactactaggatgtgtcgaatgatgtattactcggtatccgacaaaaatattcactaccgatgttatccgtgtccgacaagttctgtattcgacacacatctatccgtatttgcatccgagaatatccgtatttgtattcgaatccgaagttatccgtattcgaattcgaatccgaagaaaaatatgaaaacaaatatggtttcagtgaaatccgtttgtattcgatccgattacacccctacccacaagatagcatcttctcgaatgtgttgtagaatgacagtgctgctaggggatgaccttgtccttagttgttggggcgaagcgaaggtttcacttcgaaagtttctaggaaaacatcttttcttaatgttaaaatagttcctagccatttactagtgattttttgtattgtgtggcccggaaaacagacatacactttgtcaagcaggcaacaggattttgcaaatttgtaatagcagataagaaatttgtcccatttctatatgcacagatctcaaagtaaaatcactagtagtaaaagtgggagcctgtcaaggtaaaaaaataagcatgaccattattggaaagcaagataaagattgatttaaggggaagtggcattgaaagcatggtttaatacacagttacaatatcaatagtttttcaggcattgagaaaatgtcaaatttccatggtcttgacatgggcacaaatggagttaacttctctggtcagtattatattttactccctctgtatcaaaataaaattcattttaggccaatgatggattcatcaaagacttgatggatgtattttatatgtgtctacgaggggatttttttttaaccacggcctgaaaattccctcccacgaggagtcgaactcagaacctaaggagtgctactcaaaccacctaaccgactcggctagaggccctttcgcaactttaggcattaagatgacaagattttaagcaataaactaagtttttccatctagattaagcatgcattttgccattagcattaagattgtacttttgcctataagttccatgcatgccaaatggtaacattacaaacaatatgcaaatttggtgtataatttatatggattgaaatcaaacaaaatgaattaattcaataaaccagatgctaagaacaaacatagcattgcattcatattcagcttctgtgaacaaaaggcataccataatagcctcaatctcttcttcagtcagaggtttacgcttaggaaggagtgaagcttgacctcctacagcagtat

SEQ ID NO: 80141 - DNA, 3242 bp, Zea Mays
catttgtttttcccgattccactttctcatccttaaaccctaaaccgtctgccggccgccatgcggcgccaccaccacctcttcgttatcctccgccgcgcggtcgcctcctctgcctcccagcgcgcgcagccccttcccttgctccactccgttgcgctccgaaatggcgcagctggttccttctccccgtgcttcttctcctcccgcgcccgttcctcggtcggcgccgcgaagagccttgtggaagacgaggcggagctcagcgactggattagcgacctcaaaactgactcgttccacctcggtctcagcagcggagacgaaggcgatgcgccgtccacccgcaggtcctcggtcggctcatccaggggcggccgaggtgggtcggactccaggggttcgttcccgaggtcaagtacggccggcggtgagttcagtggagacagacgcggcggcttcgagcagagggggaggatgattagtagtggactggatgatgctgattccggctttggttcctccaggggaaggcggggacggggtgagaggacgtcggggttcgtgagaagaggagggagggggaatggatttgatgaggaggccacatttaggtctcctagggagcagcgaagccagcgagggagggcttcaggtgtggcgagaaggggagggaggtacagtgactttgaccaagatgatggtgacactggatttgggtcttcaaggggaagacacggtgccagtggtcaactgtctgtatcctcacacagaagaggaagggtgagtgatttagatgacgatgaggatagtgatgatgatttggttgggtttggggatcttgatggaaagcagcatcatggtcgcaggaaagggggaagggaaaacacagttgggctgggccgaggtcggggcaggagggatttgggtctgtcacgaaagggagggagttacaatgattttggtgattatgatgacggaaggagaaggacgtccgatcttttgcagagaacagggagaggaagcgatttagatgacgatgaagatgatgatgctggtccagttgggtttgatggttacagtgtaaggcagcaaggtggcaggagaggcaaaatggcgaagagtgttggaccacatcggggtgggaggggcagcgatacggactttggtcaccgacagccaaggggtctgaaaaaaattgactttggcttgtcagaggatgatgatgaggcgggggaagttgatgaggaagatgagccatcggggttcgaagatgatctttttgaagacgagggtgataaggaggatgtgggacatataataggtaataagtctggctcatctatgttacccgaagatgagccagctaaaaatgaaagtgtacagggcagaagtgctgggggtggtgattcttatctgagccagaagaggtttgatgaatgcccgttatctcccttgtcactgaaaggtgttaaggctgctgggtatgaacggatgactgctgttcaggaggctactcttcctattatacttcaagggaaggatgtactagccaaagcaaagacaggaactggaaaaactgtagctttcttgctaccagcaattgaagttgtttcgaaattgccacctgttgatcgtgatctaaagaaacctcccatcagtgttgtagtagtgtgccctacacgtgagcttgctgatcaggctgctgcagaagctaacaagcttcttaaatttcatccatcaattggagtacagcttgtaataggcggcactagaatggcacttgaacagaagcgcatgcacactaacccttgccagattctagtagctactcctggaaggcttagggatcacatggagaacactccagggtttgctacaaggttgttgggtgtcaaagttctaattcttgatgaagctgaccgcttgttagatatgggattccgatcagatattgaaaaaattgtggctgcactaccaaaacagcgtcaaacacttctattttctgcgacagttccagatgaggttcgtcaagtatgtcatattgccatgaaaagagatcttgaattcgtcaacactgttcaagaaggaagtgaggaaacacactctcaggtgaagcaaatgcatttaattgcaccactggacaaacaattctccaacctatatggtcttctaactgatcatatttctgaaaatgttgactacaaggtgattgtattctgtacaacagcaaaagtaacaagccttgttgctgagcttctgtctgagttgaagttgaatgtacgtgagatccactccagaaaacctcaaagctacagaactaggatatcgaaagaatttaaggagtcaaagggtctcattcttgttagctctgatgtatctgccaggggtgttgattatcccaatgtcacactagttgtgcagttgggggtgccaactgacagagagcaatatattcatcgacttggtagaactggtcgcagaggcaatgaggggacaggaatcttactattggcaccatgggaagaatatttccttaggagcatcaatgacttgcctattacagaggcaacacaaccattaattgatctggatactaagaaaaagaggtttctattcttttgataaacccatctgggttttatcttcatcagcagacatgaaggttactcattgccctccctccctccagccatcttctgagtatcaggttcatattgagaaacgggcacatagccagcggtagcggcttcaggtcgataaggctcttgcacatgtggaggttaaagacaaggaatccgcttatcaggcgtggcttggttactacaattcaaataaggtcattgggcgcgacaaataccagcttgtatcacttgccaatgagttcagcagaagcatgggtctcaacaaccctcctgcagtgtctaagcttgccctcaggaagatggggctgaacaacattccaggtctgagatcaaagtaaccaattgccatgtatactgtatacatgtcttgaagtcttttttgcacatgatctgacatctgagcacgctattccatactgatcgagttgagttagtttctggtaataaatttattgtacgttttatgcttgcagaagtgcacgaatattcataatatgttctcattcgtttgttctgttactgagataacaaatgataaagatgaacgtgttttgctattaaagaaaataaagggatacaaataaatgaagataataa

SEQ ID NO: 80142 - DNA, 3150 bp, Zea Mays
tttgtttttcccgattccactttctcatccttaaaccctaaaccgtctgccggccgccatgcggcgccaccaccacctcttcgttatcctccgccgcgcggtcgcctcctctgcctcccagcgcgcgcagccccttcccttgctccactccgttgcgctccgaaatggcgcagctggttccttctccccgtgcttcttctcctcccgcgcccgttcctcggtcggcgccgcgaagagccttgtggaagacgaggcggagctcagcgactggattagcgacctcaaaactgactcgttccacctcggtctcagcagcggagacgaaggcgatgcgccgtccacccgcaggtcctcggtcggctcatccaggggcggccgaggtgggtcggactccaggggttcgttcccgaggtcaagtacggccggcggtgagttcagtggagacagacgcggcggcttcgagcagagggggaggatgattagtagtggactggatgatgctgattccggctttggttcctccaggggaaggcggggacggggtgagaggacgtcggggttcgtgagaagaggagggagggggaatggatttgatgaggaggccacatttaggtctcctagggagcagcgaagccagcgagggagggcttcaggtgtggcgagaaggggagggaggtacagtgactttgaccaagatgatggtgacactggatttgggtcttcaaggggaagacacggtgccagtggtcaactgtctgtatcctcacacagaagaggaagggtgagtgatttagatgacgatgaggatagtgatgatgatttggttgggtttggggatcttgatggaaagcagcatcatggtcgcaggaaagggggaagggaaaacacagttgggctgggccgaggtcggggcaggagggatttgggtctgtcacgaaagggagggagttacaatgattttggtgattatgatgacggaaggagaaggacgtccgatcttttgcagagaacagggagaggaagcgatttagatgacgatgaagatgatgatgctggtccagttgggtttgatggttacagtgtaaggcagcaaggtggcaggagaggcaaaatggcgaagagtgttggaccacatcggggtgggaggggcagcgatacggactttggtcaccgacagccaaggggtctgaaaaaaattgactttggcttgtcagaggatgatgatgaggcgggggaagttgatgaggaagatgagccatcggggttcgaagatgatctttttgaagacgagggtgataaggaggatgtgggacatataataggtaataagtctggctcatctatgttacccgaagatgagccagctaaaaatgaaagtgtacagggcagaagtgctgggggtggtgattcttatctgagccagaagaggtttgatgaatgcccgttatctcccttgtcactgaaaggtgttaaggctgctgggtatgaacggatgactgctgttcaggaggctactcttcctattatacttcaagggaaggatgtactagccaaagcaaagacaggaactggaaaaactgtagctttcttgctaccagcaattgaagttgtttcgaaattgccacctgttgatcgtgatctaaagaaacctcccatcagtgttgtagtagtgtgccctacacgtgagcttgctgatcaggctgctgcagaagctaacaagcttcttaaatttcatccatcaattggagtacagcttgtaataggcggcactagaatggcacttgaacagaagcgcatgcacactaacccttgccagattctagtagctactcctggaaggcttagggatcacatggagaacactccagggtttgctacaaggttgttgggtgtcaaagttctaattcttgatgaagctgaccgcttgttagatatgggattccgatcagatattgaaaaaattgtggctgcactaccaaaacagcgtcaaacacttctattttctgcgacagttccagatgaggttcgtcaagtatgtcatattgccatgaaaagagatcttgaattcgtcaacactgttcaagaaggaagtgaggaaacacactctcaggtgaagcaaatgcatttaattgcaccactggacaaacaattctccaacctatatggtcttctaactgatcatatttctgaaaatgttgactacaaggtgattgtattctgtacaacagcaaaagtaacaagccttgttgctgagcttctgtctgagttgaagttgaatgtacgtgagatccactccagaaaacctcaaagctacagaactaggatatcgaaagaatttaaggagtcaaagggtctcattcttgttagctctgatgtatctgccaggggtgttgattatcccaatgtcacactagttgtgcagttgggggtgccaactgacagagagcaatatattcatcgacttggtagaactggtcgcagaggcaatgaggggacaggaatcttactattggcaccatgggaagaatatttccttaggagcatcaatgacttgcctattacagaggcaacacaaccattaattgatctggatactaagaaaaagaggtttctattcttttgataaacccatctgggttttatcttcatcagcagacatgaaggtcgataaggctcttgcacatgtggaggttaaagacaaggaatccgcttatcaggcgtggcttggttactacaattcaaataaggtcattgggcgcgacaaataccagcttgtatcacttgccaatgagttcagcagaagcatgggtctcaacaaccctcctgcagtgtctaagcttgccctcaggaagatggggctgaacaacattccaggtctgagatcaaagtaaccaattgccatgtatactgtatacatgtcttgaagtcttttttgcacatgatctgacatctgagcacgctattccatactgatcgagttgagttagtttctggtaataaatttattgtacgttttatgcttgcagaagtgcacgaatattcataatatgttctcattcgtttgttctgttactgagataacaaatgataaagatgaacgtgttttgctattaaagaaaataaagggatacaaataaatgaagataataa

SEQ ID NO: 80143 - DNA, 2841 bp, Zea Mays
cccgattccactttctcatccttaaaccctaaaccgtctgccggccgccatgcggcgccaccaccacctcttcgttatcctccgccgcgcggtcgcctcctctgcctcccagcgcgcgcagccccttcccttgctccactccgttgcgctccgaaatggcgcagctggttccttctccccgtgcttcttctcctcccgcgcccgttcctcggtcggcgccgcgaagagccttgtggaagacgaggcggagctcagcgactggattagcgacctcaaaactgactcgttccacctcggtctcagcagcggagacgaaggcgatgcgccgtccacccgcaggtcctcggtcggctcatccaggggcggccgaggtgggtcggactccaggggttcgttcccgaggtcaagtacggccggcggtgagttcagtggagacagacgcggcggcttcgagcagagggggaggatgattagtagtggactggatgatgctgattccggctttggttcctccaggggaaggcggggacggggtgagaggacgtcggggttcgtgagaagaggagggagggggaatggatttgatgaggaggccacatttaggtctcctagggagcagcgaagccagcgagggagggcttcaggtgtggcgagaaggggagggaggtacagtgactttgaccaagatgatggtgacactggatttgggtcttcaaggggaagacacggtgccagtggtcaactgtctgtatcctcacacagaagaggaagggtgagtgatttagatgacgatgaggatagtgatgatgatttggttgggtttggggatcttgatggaaagcagcatcatggtcgcaggaaagggggaagggaaaacacagttgggctgggccgaggtcggggcaggagggatttgggtctgtcacgaaagggagggagttacaatgattttggtgattatgatgacggaaggagaaggacgtccgatcttttgcagagaacagggagaggaagcgatttagatgacgatgaagatgatgatgctggtccagttgggtttgatggttacagtgtaaggcagcaaggtggcaggagaggcaaaatggcgaagagtgttggaccacatcggggtgggaggggcagcgatacggactttggtcaccgacagccaaggggtctgaaaaaaattgactttggcttgtcagaggatgatgatgaggcgggggaagttgatgaggaagatgagccatcggggttcgaagatgatctttttgaagacgagggtgataaggaggatgtgggacatataataggtaataagtctggctcatctatgttacccgaagatgagccagctaaaaatgaaagtgtacagggcagaagtgctgggggtggtgattcttatctgagccagaagaggtttgatgaatgcccgttatctcccttgtcactgaaaggtgttaaggctgctgggtatgaacggatgactgctgttcaggaggctactcttcctattatacttcaagggaaggatgtactagccaaagcaaagacaggaactggaaaaactgtagctttcttgctaccagcaattgaagttgtttcgaaattgccacctgttgatcgtgatctaaagaaacctcccatcagtgttgtagtagtgtgccctacacgtgagcttgctgatcaggctgctgcagaagctaacaagcttcttaaatttcatccatcaattggagtacagcttgtaataggcggcactagaatggcacttgaacagaagcgcatgcacactaacccttgccagattctagtagctactcctggaaggcttagggatcacatggagaacactccagggtttgctacaaggttgttgggtgtcaaagttctaattcttgatgaagctgaccgcttgttagatatgggattccgatcagatattgaaaaaattgtggctgcactaccaaaacagcgtcaaacacttctattttctgcgacagttccagatgaggttcgtcaagtatgtcatattgccatgaaaagagatcttgaattcgtcaacactgttcaagaaggaagtgaggaaacacactctcaggtgaagcaaatgcatttaattgcaccactggacaaacaattctccaacctatatggtcttctaactgatcatatttctgaaaatgttgactacaaggtgattgtattctgtacaacagcaaaagtaacaagccttgttgctgagcttctgtctgagttgaagttgaatgtacgtgagatccactccagaaaacctcaaagctacagaactaggatatcgaaagaatttaaggagtcaaagggtctcattcttgttagctctgatgtatctgccaggggtgttgattatcccaatgtcacactagttgtgcagttgggggtgccaactgacagagagcaatatattcatcgacttggtagaactggtcgcagaggcaatgaggggacaggaatcttactattggcaccatgggaagaatatttccttaggagcatcaatgacttgcctattacagaggcaacacaaccattaattgatctggatactaagaaaaaggtcgataaggctcttgcacatgtggaggttaaagacaaggaatccgcttatcaggcgtggcttggttactacaattcaaataaggtcattgggcgcgacaaataccagcttgtatcacttgccaatgagttcagcagaagcatgggtctcaacaaccctcctgcagtgtctaagcttgccctcaggaagatggggctgaacaacattccagacgagcaagccactttggaaactgaggttcaaca

SEQ ID NO: 80144 - DNA, 2780 bp, Zea Mays
ttaaaccctaaaccgtctgccggccgccatgcggcgccaccaccacctcttcgttatcctccgccgcgcggtcgcctcctctgcctcccagcgcgcgcagccccttcccttgctccactccgttgcgctccgaaatggcgcagctggttccttctccccgtgcttcttctcctcccgcgcccgttcctcggtcggcgccgcgaagagccttgtggaagacgaggcggagctcagcgactggattagcgacctcaaaactgactcgttccacctcggtctcagcagcggagacgaaggcgatgcgccgtccacccgcaggtcctcggtcggctcatccaggggcggccgaggtgggtcggactccaggggttcgttcccgaggtcaagtacggccggcggtgagttcagtggagacagacgcggcggcttcgagcagagggggaggatgattagtagtggactggatgatgctgattccggctttggttcctccaggggaaggcggggacggggtgagaggacgtcggggttcgtgagaagaggagggagggggaatggatttgatgaggaggccacatttaggtctcctagggagcagcgaagccagcgagggagggcttcaggtgtggcgagaaggggagggaggtacagtgactttgaccaagatgatggtgacactggatttgggtcttcaaggggaagacacggtgccagtggtcaactgtctgtatcctcacacagaagaggaagggtgagtgatttagatgacgatgaggatagtgatgatgatttggttgggtttggggatcttgatggaaagcagcatcatggtcgcaggaaagggggaagggaaaacacagttgggctgggccgaggtcggggcaggagggatttgggtctgtcacgaaagggagggagttacaatgattttggtgattatgatgacggaaggagaaggacgtccgatcttttgcagagaacagggagaggaagcgatttagatgacgatgaagatgatgatgctggtccagttgggtttgatggttacagtgtaaggcagcaaggtggcaggagaggcaaaatggcgaagagtgttggaccacatcggggtgggaggggcagcgatacggactttggtcaccgacagccaaggggtctgaaaaaaattgactttggcttgtcagaggatgatgatgaggcgggggaagttgatgaggaagatgagccatcggggttcgaagatgatctttttgaagacgagggtgataaggaggatgtgggacatataataggtaataagtctggctcatctatgttacccgaagatgagccagctaaaaatgaaagtgtacagggcagaagtgctgggggtggtgattcttatctgagccagaagaggtttgatgaatgcccgttatctcccttgtcactgaaaggtgttaaggctgctgggtatgaacggatgactgctgttcaggaggctactcttcctattatacttcaagggaaggatgtactagccaaagcaaagacaggaactggaaaaactgtagctttcttgctaccagcaattgaagttgtttcgaaattgccacctgttgatcgtgatctaaagaaacctcccatcagtgttgtagtagtgtgccctacacgtgagcttgctgatcaggctgctgcagaagctaacaagcttcttaaatttcatccatcaattggagtacagcttgtaataggcggcactagaatggcacttgaacagaagcgcatgcacactaacccttgccagattctagtagctactcctggaaggcttagggatcacatggagaacactccagggtttgctacaaggttgttgggtgtcaaagttctaattcttgatgaagctgaccgcttgttagatatgggattccgatcagatattgaaaaaattgtggctgcactaccaaaacagcgtcaaacacttctattttctgcgacagttccagatgaggttcgtcaagtatgtcatattgccatgaaaagagatcttgaattcgtcaacactgttcaagaaggaagtgaggaaacacactctcaggtgaagcaaatgcatttaattgcaccactggacaaacaattctccaacctatatggtcttctaactgatcatatttctgaaaatgttgactacaaggtgattgtattctgtacaacagcaaaagtaacaagccttgttgctgagcttctgtctgagttgaagttgaatgtacgtgagatccactccagaaaacctcaaagctacagaactaggatatcgaaagaatttaaggagtcaaagggtctcattcttgttagctctgatgtatctgccaggggtgttgattatcccaatgtcacactagttgtgcagttgggggtgccaactgacagagagcaatatattcatcgacttggtagaactggtcgcagaggcaatgaggggacaggaatcttactattggcaccatgggaagaatatttccttaggagcatcaatgacttgcctattacagaggcaacacaaccattaattgatctggatactaagaaaaagaggtttctattcttttgataaacccatctgggttttatcttcatcagcagacatgaaggttactcattgccctccctccctccagccatcttctgagtatcaggttcatattgagaaacgggcacatagccagcggtagcggcttcaggtgctggataagtggatatactggcacgtgcctgttgcttgggaaacctgttgggac

SEQ ID NO: 80145 - DNA, 3040 bp, Zea Mays
ttaaaccctaaaccgtctgccggccgccatgcggcgccaccaccacctcttcgttatcctccgccgcgcggtcgcctcctctgcctcccagcgcgcgcagccccttcccttgctccactccgttgcgctccgaaatggcgcagctggttccttctccccgtgcttcttctcctcccgcgcccgttcctcggtcggcgccgcgaagagccttgtggaagacgaggcggagctcagcgactggattagcgacctcaaaactgactcgttccacctcggtctcagcagcggagacgaaggcgatgcgccgtccacccgcaggtcctcggtcggctcatccaggggcggccgaggtgggtcggactccaggggttcgttcccgaggtcaagtacggccggcggtgagttcagtggagacagacgcggcggcttcgagcagagggggaggatgattagtagtggactggatgatgctgattccggctttggttcctccaggggaaggcggggacggggtgagaggacgtcggggttcgtgagaagaggagggagggggaatggatttgatgaggaggccacatttaggtctcctagggagcagcgaagccagcgagggagggcttcaggtgtggcgagaaggggagggaggtacagtgactttgaccaagatgatggtgacactggatttgggtcttcaaggggaagacacggtgccagtggtcaactgtctgtatcctcacacagaagaggaagggtgagtgatttagatgacgatgaggatagtgatgatgatttggttgggtttggggatcttgatggaaagcagcatcatggtcgcaggaaagggggaagggaaaacacagttgggctgggccgaggtcggggcaggagggatttgggtctgtcacgaaagggagggagttacaatgattttggtgattatgatgacggaaggagaaggacgtccgatcttttgcagagaacagggagaggaagcgatttagatgacgatgaagatgatgatgctggtccagttgggtttgatggttacagtgtaaggcagcaaggtggcaggagaggcaaaatggcgaagagtgttggaccacatcggggtgggaggggcagcgatacggactttggtcaccgacagccaaggggtctgaaaaaaattgactttggcttgtcagaggatgatgatgaggcgggggaagttgatgaggaagatgagccatcggggttcgaagatgatctttttgaagacgagggtgataaggaggatgtgggacatataataggtaataagtctggctcatctatgttacccgaagatgagccagctaaaaatgaaagtgtacagggcagaagtgctgggggtggtgattcttatctgagccagaagaggtttgatgaatgcccgttatctcccttgtcactgaaaggtgttaaggctgctgggtatgaacggatgactgctgttcaggaggctactcttcctattatacttcaagggaaggatgtactagccaaagcaaagacaggaactggaaaaactgtagctttcttgctaccagcaattgaagttgtttcgaaattgccacctgttgatcgtgatctaaagaaacctcccatcagtgttgtagtagtgtgccctacacgtgagcttgctgatcaggctgctgcagaagctaacaagcttcttaaatttcatccatcaattggagtacagcttgtaataggcggcactagaatggcacttgaacagaagcgcatgcacactaacccttgccagattctagtagctactcctggaaggcttagggatcacatggagaacactccagggtttgctacaaggttgttgggtgtcaaagttctaattcttgatgaagctgaccgcttgttagatatgggattccgatcagatattgaaaaaattgtggctgcactaccaaaacagcgtcaaacacttctattttctgcgacagttccagatgaggttcgtcaagtatgtcatattgccatgaaaagagatcttgaattcgtcaacactgttcaagaaggaagtgaggaaacacactctcaggtgaagcaaatgcatttaattgcaccactggacaaacaattctccaacctatatggtcttctaactgatcatatttctgaaaatgttgactacaagcaaaagtaacaagccttgttgctgagcttctgtctgagttgaagttgaatgtacgtgagatccactccagaaaacctcaaagctacagaactaggatatcgaaagaatttaaggagtcaaagggtctcattcttgttagctctgatgtatctgccaggggtgttgattatcccaatgtcacactagttgtgcagttgggggtgccaactgacagagagcaatatattcatcgacttggtagaactggtcgcagaggcaatgaggggacaggaatcttactattggcaccatgggaagaatatttccttaggagcatcaatgacttgcctattacagaggcaacacaaccattaattgatctggatactaagaaaaaggtcgataaggctcttgcacatgtggaggttaaagacaaggaatccgcttatcaggcgtggcttggttactacaattcaaataaggtcattgggcgcgacaaataccagcttgtatcacttgccaatgagttcagcagaagcatgggtctcaacaaccctcctgcagtgtctaagcttgccctcaggaagatggggctgaacaacattccaggtctgagatcaaagtaaccaattgccatgtatactgtatacatgtcttgaagtcttttttgcacatgatctgacatctgagcacgctattccatactgatcgagttgagttagtttctggtaataaatttattgtacgttttatgcttgcagaagtgcacgaatattcataatatgttctcattcgtttgttctgttactgagataacaaatgataaagatgaacgtgttttgctattaaagaaaataaagggatacaaataaatgaagataataa

SEQ ID NO: 80146 - DNA, 1656 bp, Zea Mays
cagaattcagagacgtggtgcaagggcttatgcgaggcgatgaggaggcacgagagaacgaagcagcaccacgggagcggcggcagaagggccgcactgtggctcattactgccacatgttgcgcgctttaaggagactggatttgaaaaaataacaaatgaaatggttcatagagtatcatcgttaggtttggacagtgcaagacggcagcagcaacaatcacctgacgcagaatctgcaaaacatgtgtcagcgccgtcaatgagcgaagttacctgcaactggagcaatcgtcactcagacacctgcaaaatggaaggtgacttgcggatccatggcatggccggcacagtctacgtcctttcatcatccaacttccgaccaaacaactcgaccatcacaatccggccgtacacgcggaagtgggagcaagagaccatgctgaggattcgggaggtcagcatccggtccactgcgccagagcctttcagcttcgtcatcccgcccaagtgcaccgtgaggcacgacgtgccagcggtggtcttctctaccggcggctgcggcaccaacttcttccacgccatgactgacctcattgtcccactctacatcacagcccgtgagcacaacggccacgtccagctgcttgtcgccgactaccagcctgaatgggtggccaaattcagaccgatcctcactgcactgtccatctacccggtcatagacttcgacgcggacactgccgtgcgctgcttcccgtcggcgcatgtcgggctcgagagccacaggatacttggcatcaacccggcgctctcccggaacagctacactatgatggggttccgtgacttcctccgcgacgtcttctcgctgcggcggccatgggctacacccgtaagcaggagcagcgggcagaagcctcggctcgtctttgtcctgcggcgccactctagggaggtgacgaacgaagtggatgccatcgctgctcttgccggtctcggcttcgaggtggtcgttgcgggaccggaggacgtccgcgatatggccaaaatcgcaggggtggtgaactcgtgcgacgtgatggtgggcgtgcacggcgcagggctcaccaacatggtgttcctgccgcacaacggcaccatagtgcagatcatcccgtggggaaacttgaagtacccatgccggttcgacttcggcgacccggcgccggacatgggactccgctacgtcgaatacgaggcgaacgcggaggagaccacgctcaagtacaagtatccgagggaccatcctgtgtttaccgacccgatctccatagagcgcagcggcaaactttgggagaccttcctcgagggccagaacgtcacactggacatcgaccggttcagagaggcaatgcagcaagtgtacaactccatcaccacggagtagactagctgccaggcatgaagtagactagcatggcactagtagttgattacaatcttgagagatgtaataacttaagtaatattagtaaaagttacttatattaatttacccgttttatgcctttgtttatttttagatttagtatgcatacattatatagatgctatgtgtattatatgtctgaggcggggtttaatttttataggcatattcggttatcaaccatc

SEQ ID NO: 80147 - DNA, 3531 bp, Zea Mays
accagcagttcaagatgacatcatcatcgaagccatggtcaaggggctcatgctaggaccagtagcctaatacttcacaaggaagcctctgcattctttagagaagttgttacaaaagatggatgaacacataaggattgacaacaacttctgccaaagaaggtaggagttgcatagatacatcgaagccgctaggggcttcgggggaagattcaacccaagacatgtctgaagaattcataacccggtgcagggtgaagaaaaaacaacctaatcttagggccagtcaggccagcaacaagcaagctctcagcagcagccatcccacaacacgtttcacccacctgctccgagagggggaataggaggccgaagcctcattggtaggttcaatgcacctccaaggaagtcatttttcttattttgtggtgaggacaagggccacacaacaagaacctgtcacaatacaatcaacaatcaaaaagagcttgcttggtcggctgctcaaccttctcaatcgaaggaggtgttcagtacatcttcttactgttcaccgcatgtcccgcaatatgttccgcctcagtcagaagagccaaggatgcacttgccttcagcctcaaatgcttcaaacaaccctgtgatgagcacatggtcgccatctacttcctttgtcctgggaccaactccttatgaccaagttcctgctggttatcccaagttcctggtgcaagatttgtagcaaaagggtagaagggagagatccaaaactcgcaccgtcaacagcatggtcccatagatgaagcatatatactaaagaccacaatggttgggtaagcagacctgaagctatcaagaagaagctattacatatttacgtttacttgcaaaactcttttccattctgcaatttaatgtaataaccagttggcaccttcgagtacaatgatgaaacaatttattcacttaagttacggtgaaaaaagctctaaagtcgttcctaagggaatggagagctccgatttattcacctaagtaatggtgaaaaggctccaaagttgttcccaagggaatgcagagctctgatttattcacctaagtaatggtaaaaaagctccaaagtcgttcataagagaacacaaagctccaatttattcacctaagtaacggtgaaaaagctctgaagtcgttcctaaggaaatgtagagccccgatttattcacctaggtaatggtgaaaaagctctgaagtcgttcctaagggaatgtgtcacaccagggttttaggggtccaaaacccaggcgcgtaatagtcaccaagtgtgctgggaccaagtctcacacatatgatgactcatggtacagaaacaaatgtcacatctttactatataataggagttatgtaaaaaatagctaaataattacatcatatatagacaacgaaccaacaaccatagttgactgggagacgacagcctagaccactcacgaactcatcacaacatccttcatgcgccttgtccagtggtacctgttcttgacataggggatgtgagtacaacaagggtgagctcacatacggtcatcgctcaacaagttgtggggaataatgtgcatgaactcaccaaaggtgggagctcatgtgaagtgtaaggcttatcaaaggagacgactaaaattgagcattgcttttaaagttggtcaaaattttattagcagttactaagtataaatagataccaacctaattaagcaagagatcaaaattgataataacacccgcgatgcaatgcatatgacatattaagtttagttctataaattaatcatgcgagagtcctgagctgctcatgaccacgagcacgactgatataccagttttacactctacagaggttgcgccctttacccacaagtcgtgtatcccatcgagccaggcttagctagacccatagacacttctgaggtgaatgactagggatgcactacgaggcctttaaaaatttccactaccttcagaaaacccgctacagttctagggagcgcaatataggaattccccgtccgacaagccatcgcagcatgatcgacccgagaacctccctatatcgacaactcctctactacccttgccccttttgggtaaggtagtactccactagctttcctaattagtcagcgaaggacgtcccattccacccttgtggtagcacggatatctcaagttaagctccatgttccaattaacacaatgatcttgtcacgaacaataactaaaacaacagtataactggaacaatgatcataatgcagagcaatagcaaaactacccaaaagttcaatggtaaacaaggtgtggaataaacaagtctagggaaaccaattatgtcccatcaaattaacctgagcatgtcacagtgattaacatgaacattattgggtaaagaaaagtgatcaagggcacaacttgccttagacttgagattccaggtacaaggttggtcttcaagtgactcgtaacctcattgctaatcgtagcaatacaaacaaacatggtataggaaaaattaacatcacactaaacataagctcaagctgcataataatattctacgtgttgtaatgagatcataggttcgagaaccactaaattcggagctacggttataaagttatgattttctgaagatttagaagtggggtacaaaagaaattatgtgcataattttaatttaggtttcataacaaaaaaagttaccaggggataaacaatattattatggatctaatgcaactggaatggatcaaaaaggagttaaaatgcagaagatacaaaataaacaagttataataattattttcatactagaattcatctctatatttcttttattccagatggacaacacatggtattgtaaataagatcagggttggttttataatattgtggacctaatagctctattctatacacacacccgtactgcgggttgatactaacaaaacacaacacggggtcactttagcataatgtccccgccaaaggggtatcattacttctgggccgctcaatcagaaaccggtggcaaagattaggttctaaccgttatgcgctccagttcgcaggatcgaagatcaacagttacagtttaacgaaacacagatctaatcctacgtgcccgatccgaatcgaacggcaccgatttattgtgtgaagggggtatacatcttgtaatcctagccgccgttagctgattgaacgaccatgatttaaaatacctagattaattctcgtgcgttcatcaaagatctactatcctgattcactctcctccccgacggccgacagcggcggtggcgcgcgcatacctgcggtagagccatggctagcgcgcggccaacaccgattccgacccacaacttcgagaatttatgatgcaacgtgagtaggaggtcgaggcgaacaatatgggtggggaaattttaccaaaggagacggtgggcgcaaggctgtcctcgacgtcgcgacgg

SEQ ID NO: 80148 - DNA, 1825 bp, Zea Mays
cagaagttcagttttccgtccgtctttgatatatagaaattcttctaaacttactagctactatttacattctagatgttgtatatattatatgttttttgtacggtacacttgcattcgttcctatttcactctccctctcactggttttttcgaatattttgtacgtggttgcaaattaaattaagagcaactacctactaatctatagttattttggcagaattgaatgtagtagcctcgtagggccaacatgaccgaactcaaaatgtgcagcccacctccaatcccgtagaagatagtgctgccctgccgaatgccgcccacctccaatcccgtagaagacaaagagagagggagagaactggacggcggcggcggcggagacgacgatgcagtggtacttggtggccgcgctcctcaccatcctcaccagctcccagggaatattgaccaccctttcccagagcaatggcaaatacaattatgattatgccacaattccttttttagctgagctcttcaagttatctgtctcaggcttcttcctctggaaggaatgccattcttcatctccaccaaggatgacaaaggaatggaggagcgtgcgactatatgttgttccttcagttatatacctcatccacaacaatgtccagtttgcgacattgacctatgttgacccatctacctatcagataatgggaaacttgaaaattgtcacgactgggattttgtttaggcttgtcctaaaaaggaagttgtccaatatacaatggatggcaattgttttattggctgttggtacaactacaagccaggttaaaggatgtggagattcaccatgtgattctcttttctcagcaccattggagggttacttgcttggaatactttctgcttgtctttcagctctagctggtgtgtacacagaatatttgatgaagaagaataatgatagtttgtactggcaaaatgtacaattatatacgtaggtttggagttatctttaacatgggctggctaatttatggcgattttaaagctggatttgagctaggtccatggtggcagcgcctttttaatggttattcgatcacaacatggatggtagtgttcaatttaggatctactggtcttctagtatcatggttgatgaaatattctgacaatatagtcaaggtgtactcaacttcaatggcaatgcttttaacgatggttttatctatatatcttttcagtgtgaaagctacaattcagctcttcttgggcattatcatttgtataatttccctgcagatgtattttatgcctgtgcacatgcttattgagttgccacaaactttgcctgtaacatcaaagtaggttcatggcattgttagctaacccattgatcagctgagggtagggcactgttgattgagtggttaattgactatctgcagcccagctctatttgagtcatatatttggagatttatggttgtaatctcaacagctatggatatagacagctaggttagtttcatgttgcaggaaaggtgaatcaactgtcaagtgagcatgtaatgccaatacaaatggattgaaagttaacacctacatgccttccaatttttatccagttttgcattaatggagtcgatatggaactgacaagtacaatgagttatggcttcattacaaaaaagtacacaattttgctcctgcggcagcagtcttgtcttttcaggaaattcaaacaggacaaagtgttcattgagcagatcctcagcaaagagtttgactttgaagaagatatcgatgatgccatagtccagtcgtg

SEQ ID NO: 80149 - DNA, 1845 bp, Zea Mays
actatttacattctagatgttgtatatattatatgttttttgtacggtacacttgcattcgttcctatttcactctccctctcactggttttttcgaatattttgtacgtggttgcaaattaaattaagagcaactacctactaatctatagttattttggcagaattgaatgtagtagcctcgtagggccaacatgaccgaactcaaaatgtgcagcccacctccaatcccgtagaagatagtgctgccctgccgaatgccgcccacctccaatcccgtagaagacaaagagagagggagagaactggacggcggcggcggcggagacgacgatgcagtggtacttggtggccgcgctcctcaccatcctcaccagctcccagggaatattgaccaccctttcccagagcaatggcaaatacaattatgattatgccacaattccttttttagctgagctcttcaagttatctgtctcaggcttcttcctctggaaggaatgccattcttcatctccaccaaggatgacaaaggaatggaggagcgtgcgactatatgttgttccttcagttatatacctcatccacaacaatgtccagtttgcgacattgacctatgttgacccatctacctatcagataatgggaaacttgaaaattgtcacgactgggattttgtttaggcttgtcctaaaaaggaagttgtccaatatacaatggatggcaattgttttattggctgttggtacaactacaagccaggttaaaggatgtggagattcaccatgtgattctcttttctcagcaccattggagggttacttgcttggaatactttctgcttgtctttcagctctagctggtgtgtacacagaatatttgatgaagaagaataatgatagtttgtactggcaaaatgtacaattatatacgtttggagttatctttaacatgggctggctaatttatggcgattttaaagctggatttgagctaggtccatggtggcagcgcctttttaatggttattcgatcacaacatggatggtagtgttcaatttaggatctactggtcttctagtatcatggttgatgaaatattctgacaatatagtcaaggtgtactcaacttcaatggcaatgcttttaacgatggttttatctatatatcttttcagtgtgaaagctacaattcagctcttcttgggcattatcatttgtataatttccctgcagatgtattttatgcctgtgcacatgcttattgagttgccacaaactttgcctgtaacatcaaagtaggttcatggcattgttagctaacccattgatcagctgagggtagggcactgttgattgagtggttaattgactatctgcagcccagctctatttgagtcatatatttggagatttatggttgtaatctcaacagctatggatatagacagctaggttagtttcatgttgcaggaaaggtgaatcaactgtcaagtgagcatgtaatgccaatacaaatggattgaaagttaacacctacatgccttccaatttttatccagttttgcattaatggagtcgatatggaactgacaagtacaatgagttatggcttcattacaaaaaagtacacaattttgctcctgcggcagcagtcttgtcttttcaggaaattcaaacaggacaaagtgttcattgagcagatcctcaggtgtactgatttttttttatcatcatcagttagaaatggctgtacattctagcatatgttatttattttagttaaaagaaagcgcaacactgttactgtgattaatttcatgaaaatcatagcatcgttaaatt

SEQ ID NO: 80150 - DNA, 1210 bp, Zea Mays
cttttctccttatccccacacgtcttctccctctcccctagatccttcgacgccgccctccctcagctcattccctgccgccgctcatctgctggccttgtctcactgccgcccaaccattttcctccctcaagctagcacgcagcctcaactcctctcccacctcacgcacgtctctcccagccgttccttcatttctctggctcgtccttctccatgaggtcgcgccctgctgcgccgtcgtgctggtcgccggctgagcccccttcagtgcctgacgccgcatctccctgccacctcccatggacgccagccctcagccatggatgccgaaccccctctctttagtgcctttctttacagcccctgcgtcgccgtgcgtgtaaggtgtttgtataaatgctcaagaggagtgacgtgtcatggccaacccttttggcgtcgtcggatgtttgatgttttgtgcatcccgtctacgacgccgtcgaccatcggagcgaaatccgtgaaatctaggtgaagaagagacggagcacgtcgtcgtcatggttgcagctttgcttttgtcgtcgtggagcctccaccagcgccgtgtagcaggactgctcttatgtgttattggtgctattccgcttgtacggccaacgaaataggtcctactacacaagggaaatagaggataccatactcttagctttacagaagcctgaagtgtatgatgacattgctcgcgctacatgctgcaaatttgggatagatagacctcaagttgtacctgtgcaaggactacctcaggtttgaaccatacttatggaatgcatgtaagaggtttgtgttggagcaccgggctggcgagaaccgtgctccaatcatttcagatgatagccccaacaaagatatcaacaatgccttctataatatcgtgatgctgaaaaagaaaagatgaaatggaactcaaattttagtggtcgcacaagtgtggagccagttgatgaccaagtttttcaattagtattttagtttgaatttagagtacacatatgtatgagttatttgacaatgcttgtttatgagagattgaatgatacctatctatattatattaattataatgttattaaataaatgtgtatatgtatatttctctttcaaattattataatgtgttatctcaaaatgattataaattgaagaatgtactttaaatctt

SEQ ID NO: 80151 - DNA, 2788 bp, Zea Mays
cttatccccacacgtcttctccctctcccctagatccttcgacgccgccctccctcagctcattccctgccgccgctcatctgctggccttgtctcactgccgcccaaccattttcctccctcaagctagcacgcagcctcaactcctctcccacctcacgcacgtctctcccagccgttccttcatttctctggctcgtccttctccatgaggtcgcgccctgctgcgccgtcgtgctggtcgccggctgagcccccttcagtgcctgacgccgcatctccctgccacctcccatggacgccagccctcagccatggatgccgaaccccctctctttagtgcctttctttacagcccctgcgtcgccgtgcgtgtaaggtgtttgtataaatgctcaagaggagtgacgtgtcatggccaacccttttggcgtcgtcggatgtttgatgttttgtgcatcccgtctacgacgccgtcgaccatcggagcgaaatccgtgaaatctaggtgaagaagagacggagcacgtcgtcgtcatggttgcagctttgcttttgtcgtcgtggagcctccaccagcgccgtgtagcagtgagcccctcgctagtagtccgttgttttttgcatccctagtgcttgataaaatgttgaaccgttgtgtgtcgttaatcgcagccaccgtcaacgttgtgccttgcgcttcaccaatgcgatgaaatgttttagttgtgtgcgataatatggttgtcgttcgaatggaaagtagaattaatctatatatgtgattagaaagtgccaagcacatgataattataggagtaaattgaatacttgctgtttggactgtgttcagttttagtatgcaggtagtttagtgaagtaaaccatgttttctgtagaaatgttatataggaaagttgtagatcacttctttatcttgcttgtgtataaatttcatgaccacaggtttagtagtttaggagttatgatttttccaagtacagtatacgaatctatccagattctgtacagatttcgaaaactgtcttgtttgattaagttaaacttagaatcagttcttagtaattataaagaagttgtagtacttttcttaagctttccaaaaaaatttggatcaccctttttggtgatctataaattaagttagtgctgtttgagttaggatctctgaatctgtcccaatttggacagcagagcctttctcatattttctgaccttgatatatattaaattaacctgggatgttcataaatgaattgtagagaattctattagctttctaaaaagtctaggatcacctgatttggatgcctgaaactccagttatgatttttttaaagtaagtagtcgaattctgtccaaatctggacagaatttacgtctagcattgtttgaccattctaaatgtcaagtctcactgtgatgataatacaaaagttgtagaggacttcttaagctttctagaaagtcttagttcacaatttttggatgaatattttgtaagttatgagcaaaaccgctgactgctgtactgctatccaaaatcagcaagtattaaaatggttgtttagagaagtcgatgctttgctctagttgtcgtattctatattcacttgattgtgttataaaagggtgtgccagataaccaagttattaacaccctaaaactgcagtgcgaagcaagctatagacgaccaaatggcaactgaattataattactaagctttgtggccatatgaagctttttggctatgtgttcttatgagatgatttgtaacttctgttcttaactaacagttcaggaacaatggaaccaaaatacaggacattttcctacttcacgtctggatgccatccaattaatatcttctctgcgatattgcaatggaaggtgtagatagatgcaagtatacattcaatgttcttatgatagaggaaaggcatagctgcagatgggtttgatgttttatcttttcattcatgcatttcatcccatgcgcataaacaatttccaagtagcttgtgtatccaaacttggttcttttgttcactcagccaggttgtactgtttcattcagaattcggatttttcagccattaacccgcattttctattggatcgttttagattcatttgttttatctattagaccgtactctatattgtttcatttgaggacatttcaaatggttgttgtaggtcaatatgtgatagatgactagaagaaaattataaaaggatgttgaataagattgtgcttattttctcgtgacgaaggttttttctatgcttagggactgctcttatgtgttattggtgctattccgcttgtacggccaacgaaataggtcctactacacaagggaaatagaggataccatactcttagctttacagaagcctgaagtgtatgatgacattgctcgcgctacatgctgcaaatttgggatagatagacctcaagttgtacctgtgcaaggactacctcaggaaaagatgaaatggaactcaaattttagtggtcgcacaagtgtggagccagttgatgaccaagtttttcaattagtattttagtttgaatttagagtacacatatgtatgagttatttgacaatgcttgtttatgagagattgaatgatacctatctatattatattaattataatgttattaaataaatgtgtatatgtatatttctctttcaaattattataatgtgttatctcaaaatgattataaattgaagaatgtactttaaatctt

SEQ ID NO: 80152 - DNA, 1700 bp, Zea Mays
cttatccccacacgtcttctccctctcccctagatccttcgacgccgccctccctcagctcattccctgccgccgctcatctgctggccttgtctcactgccgcccaaccattttcctccctcaagctagcacgcagcctcaactcctctcccacctcacgcacgtctctcccagccgttccttcatttctctggctcgtccttctccatgaggtcgcgccctgctgcgccgtcgtgctggtcgccggctgagcccccttcagtgcctgacgccgcatctccctgccacctcccatggacgccagccctcagccatggatgccgaaccccctctctttagtgcctttctttacagcccctgcgtcgccgtgcgtgtaaggtgtttgtataaatgctcaagaggagtgacgtgtcatggccaacccttttggcgtcgtcggatgtttgatgttttgtgcatcccgtctacgacgccgtcgaccatcggagcgaaatccgtgaaatctaggtgaagaagagacggagcacgtcgtcgtcatggttgcagctttgcttttgtcgtcgtggagcctccaccagcgccgtgtagcattcaggaacaatggaaccaaaatacaggacattttcctacttcacgtctggatgccatccaattaatatcttctctgcgatattgcaatggaaggtgtagatagatgcaagtatacattcaatgttcttatgatagaggaaaggcatagctgcagatgggtttgatgttttatcttttcattcatgcatttcatcccatgcgcataaacaatttccaagtagcttgtgtatccaaacttggttcttttgttcactcagccaggttgtactgtttcattcagaattcggatttttcagccattaacccgcattttctattggatcgttttagattcatttgttttatctattagaccgtactctatattgtttcatttgaggacatttcaaatggttgttgtaggtcaatatgtgatagatgactagaagaaaattataaaaggatgttgaataagattgtgcttattttctcgtgacgaaggttttttctatgcttagggactgctcttatgtgttattggtgctattccgcttgtacggccaacgaaataggtcctactacacaagggaaatagaggataccatactcttagctttacagaagcctgaagtgtatgatgacattgctcgcgctacatgctgcaaatttgggatagatagacctcaagttgtacctgtgcaaggactacctcaggtttgaaccatacttatggaatgcatgtaagaggtttgtgttggagcaccgggctggcgagaaccgtgctccaatcatttcagatgatagccccaacaaagatatcaacaatgccttctataatatcgtgatgctgaaaaagaaaagatgaaatggaactcaaattttagtggtcgcacaagtgtggagccagttgatgaccaagtttttcaattagtattttagtttgaatttagagtacacatatgtatgagttatttgacaatgcttgtttatgagagattgaatgatacctatctatattatattaattataatgttattaaataaatgtgtatatgtatatttctctttcaaattattataatgtgttatctcaaaatgattataaattgaagaatgtactttaaatctt

SEQ ID NO: 80153 - DNA, 1149 bp, Zea Mays
cccacacgtcttctccctctcccctagatccttcgacgccgccctccctcagctcattccctgccgccgctcatctgctggccttgtctcactgccgcccaaccattttcctccctcaagctagcacgcagcctcaactcctctcccacctcacgcacgtctctcccagccgttccttcatttctctggctcgtccttctccatgaggtcgcgccctgctgcgccgtcgtgctggtcgccggctgagcccccttcagtgcctgacgccgcatctccctgccacctcccatggacgccagccctcagccatggatgccgaaccccctctctttagtgcctttctttacagcccctgcgtcgccgtgcgtgtaaggtgtttgtataaatgctcaagaggagtgacgtgtcatggccaacccttttggcgtcgtcggatgtttgatgttttgtgcatcccgtctacgacgccgtcgaccatcggagcgaaatccgtgaaatctaggtgaagaagagacggagcacgtcgtcgtcatggttgcagctttgcttttgtcgtcgtggagcctccaccagcgccgtgtagcattcaggaacaatggaaccaaaatacaggacattttcctacttcacgtctggatgccatccaattaatatcttctctgcgatattgcaatggaagggactgctcttatgtgttattggtgctattccgcttgtacggccaacgaaataggtcctactacacaagggaaatagaggataccatactcttagctttacagaagcctgaagtgtatgatgacattgctcgcgctacatgctgcaaatttgggatagatagacctcaagttgtacctgtgcaaggactacctcaggaaaagatgaaatggaactcaaattttagtggtcgcacaagtgtggagccagttgatgaccaagtttttcaattagtattttagtttgaatttagagtacacatatgtatgagttatttgacaatgcttgtttatgagagattgaatgatacctatctatattatattaattataatgttattaaataaatgtgtatatgtatatttctctttcaaattattataatgtgttatctcaaaatgattataaattgaagaatgtactttaaatctt

SEQ ID NO: 80154 - DNA, 1322 bp, Zea Mays
cgtcttctccctctcccctagatccttcgacgccgccctccctcagctcattccctgccgccgctcatctgctggccttgtctcactgccgcccaaccattttcctccctcaagctagcacgcagcctcaactcctctcccacctcacgcacgtctctcccagccgttccttcatttctctggctcgtccttctccatgaggtcgcgccctgctgcgccgtcgtgctggtcgccggctgagcccccttcagtgcctgacgccgcatctccctggtgctcacctctgtttccccctgcgttggacgacctcgcactccctccctgctccagatttctccatgccacctcccatggacgccagccctcagccatggatgccgaaccccctctctttagtgcctttctttacagcccctgcgtcgccgtgcgtgtaaggtgtttgtataaatgctcaagaggagtgacgtgtcatggccaacccttttggcgtcgtcggatgtttgatgttttgtgcatcccgtctacgacgccgtcgaccatcggagcgaaatccgtgaaatctaggtgaagaagagacggagcacgtcgtcgtcatggttgcagctttgcttttgtcgtcgtggagcctccaccagcgccgtgtagcagtgagcccctcgctagtagtccgttgttttttgcatccctagtgcttgataaaatgttgaaccgttgtgtgtcgttaatcgcagccaccgtcaacgttgtgccttgcgcttcaccaatgcgatgaaatgttttagttgtgtgcgataatatggttgtcgttcgaatggaaagtagaattaatctatatatgtgattagaaagtgccaagcacatgataattataggagtaaattgaatacttgctgtttggactgtgttcagttttagtatgcaggtagtttagtgaagtaaaccatgttttctgtagaaatgttatataggaaagttgtagatcacttctttatcttgcttgtgtataaatttcatgaccacaggtttagtagtttaggagttatgatttttccaagtacagtatacgaatctatccagattctgtacagatttcgaaaactgtcttgtttgattaagttaaacttagaatcagttcttagtaattataaagaagttgtagtacttttcttaagctttccaaaaaaatttggatcaccctttttggtgatctataaattaagttagtgctgtttgagttaggatctctgaatctgtcccaatttggacagcagagcctttctcatattttctgaccttgatatatattaaattaacctgggatg

SEQ ID NO: 80155 - DNA, 1284 bp, Zea Mays
cgtcttctccctctcccctagatccttcgacgccgccctccctcagctcattccctgccgccgctcatctgctggccttgtctcactgccgcccaaccattttcctccctcaagctagcacgcagcctcaactcctctcccacctcacgcacgtctctcccagccgttccttcatttctctggctcgtccttctccatgaggtcgcgccctgctgcgccgtcgtgctggtcgccggctgagcccccttcagtgcctgacgccgcatctccctgccacctcccatggacgccagccctcagccatggatgccgaaccccctctctttagtgcctttctttacagcccctgcgtcgccgtgcgtgtaaggtgtttgtataaatgctcaagaggagtgacgtgtcatggccaacccttttggcgtcgtcggatgtttgatgttttgtgcatcccgtctacgacgccgtcgaccatcggagcgaaatccgtgaaatctaggtgaagaagagacggagcacgtcgtcgtcatggttgcagctttgcttttgtcgtcgtggagcctccaccagcgccgtgtagcattcaggaacaatggaaccaaaatacaggacattttcctacttcacgtctggatgccatccaattaatatcttctctgcgatattgcaatggaagggactgctcttatgtgttattggtgctattccgcttgtacggccaacgaaataggtcctactacacaagggaaatagaggataccatactcttagctttacagaagcctgaagtgtatgatgacattgctcgcgctacatgctgcaaatttgggatagatagacctcaagttgtacctgtgcaaggactacctcaggtttgaaccatacttatggaatgcatgtaagaggtttgtgttggagcaccgggctggcgagaaccgtgctccaatcatttcagatgatagccccaacaaagatatcaacaatgccttctataatatcgtgatgctgaaaaagaaaagatgaaatggaactcaaattttagtggtcgcacaagtgtggagccagttgatgaccaagtttttcaattagtattttagtttgaatttagagtacacatatgtatgagttatttgacaatgcttgtttatgagagattgaatgatacctatctatattatattaattataatgttattaaataaatgtgtatatgtatatttctctttcaaattattataatgtgttatctcaaaatgattataaattgaagaatgtactttaaatctt

SEQ ID NO: 80156 - DNA, 1338 bp, Zea Mays
cgtcttctccctctcccctagatccttcgacgccgccctccctcagctcattccctgccgccgctcatctgctggccttgtctcactgccgcccaaccattttcctccctcaagctagcacgcagcctcaactcctctcccacctcacgcacgtctctcccagccgttccttcatttctctggctcgtccttctccatgaggtcgcgccctgctgcgccgtcgtgctggtcgccggctgagcccccttcagtgcctgacgccgcatctccctgccacctcccatggacgccagccctcagccatggatgccgaaccccctctctttagtgcctttctttacagcccctgcgtcgccgtgcgtgtaaggtgtttgtataaatgctcaagaggagtgacgtgtcatggccaacccttttggcgtcgtcggatgtttgatgttttgtgcatcccgtctacgacgccgtcgaccatcggagcgaaatccgtgaaatctaggtgaagaagagacggagcacgtcgtcgtcatggttgcagctttgcttttgtcgtcgtggagcctccaccagcgccgtgtagcaggactgctcttatgtgttattggtgctattccgcttgtacggccaacgaaataggtcctactacacaagggaaatagaggataccatactcttagctttacagaagcctgaagtgtatgatgacattgctcgcgctacatgctgcaaatttgggatagatagacctcaagttgtacctgtgcaaggactacctcaggtttgaaccatacttatggaatgcatgtaagaggtttgtgttggagcaccgggctggcgagaaccgtgctccaatcatttcagatgatagccccaacaaagatatcaacaatgccttctataatatcgtgatgctgaaaaagatgggagaatgttgaatgcttcttcagatactatttcttggtctgtcaaatctgcttaacccaaatgcaagtttgttcaaatgtggcaaaaaataattgtctcaccaattgtcagcatgtttgcttccagcaaagttgtccagagaagaaaagatgaaatggaactcaaattttagtggtcgcacaagtgtggagccagttgatgaccaagtttttcaattagtattttagtttgaatttagagtacacatatgtatgagttatttgacaatgcttgtttatgagagattgaatgatacctatctatattatattaattataatgttattaaataaatgtgtatatgtatatttctctttcaaattattataatgtgttatctcaaaatgattataaattgaagaatgtactttaaatctt

SEQ ID NO: 80157 - DNA, 1435 bp, Zea Mays
cgtcttctccctctcccctagatccttcgacgccgccctccctcagctcattccctgccgccgctcatctgctggccttgtctcactgccgcccaaccattttcctccctcaagctagcacgcagcctcaactcctctcccacctcacgcacgtctctcccagccgttccttcatttctctggctcgtccttctccatgaggtcgcgccctgctgcgccgtcgtgctggtcgccggctgagcccccttcagtgcctgacgccgcatctccctgccacctcccatggacgccagccctcagccatggatgccgaaccccctctctttagtgcctttctttacagcccctgcgtcgccgtgcgtgtaaggtgtttgtataaatgctcaagaggagtgacgtgtcatggccaacccttttggcgtcgtcggatgtttgatgttttgtgcatcccgtctacgacgccgtcgaccatcggagcgaaatccgtgaaatctaggtgaagaagagacggagcacgtcgtcgtcatggttgcagctttgcttttgtcgtcgtggagcctccaccagcgccgtgtagcattcaggaacaatggaaccaaaatacaggacattttcctacttcacgtctggatgccatccaattaatatcttctctgcgatattgcaatggaagggactgctcttatgtgttattggtgctattccgcttgtacggccaacgaaataggtcctactacacaagggaaatagaggataccatactcttagctttacagaagcctgaagtgtatgatgacattgctcgcgctacatgctgcaaatttgggatagatagacctcaagttgtacctgtgcaaggactacctcaggtttgaaccatacttatggaatgcatgtaagaggtttgtgttggagcaccgggctggcgagaaccgtgctccaatcatttcagatgatagccccaacaaagatatcaacaatgccttctataatatcgtgatgctgaaaaataggatgggagaatgttgaatgcttcttcagatactatttcttggtctgtcaaatctgcttaacccaaatgcaagtttgttcaaatgtggcaaaaaataattgtctcaccaattgtcagcatgtttgcttccagcaaagttgtccagagaagaaaagatgaaatggaactcaaattttagtggtcgcacaagtgtggagccagttgatgaccaagtttttcaattagtattttagtttgaatttagagtacacatatgtatgagttatttgacaatgcttgtttatgagagattgaatgatacctatctatattatattaattataatgttattaaataaatgtgtatatgtatatttctctttcaaattattataatgtgttatctcaaaatgattataaattgaagaatgtactttaaatctt

SEQ ID NO: 80158 - DNA, 1547 bp, Zea Mays
cgtcttctccctctcccctagatccttcgacgccgccctccctcagctcattccctgccgccgctcatctgctggccttgtctcactgccgcccaaccattttcctccctcaagctagcacgcagcctcaactcctctcccacctcacgcacgtctctcccagccgttccttcatttctctggctcgtccttctccatgaggtcgcgccctgctgcgccgtcgtgctggtcgccggctgagcccccttcagtgcctgacgccgcatctccctgccacctcccatggacgccagccctcagccatggatgccgaaccccctctctttagtgcctttctttacagcccctgcgtcgccgtgcgtgtaaggtgtttgtataaatgctcaagaggagtgacgtgtcatggccaacccttttggcgtcgtcggatgtttgatgttttgtgcatcccgtctacgacgccgtcgaccatcggagcgaaatccgtgaaatctaggtgaagaagagacggagcacgtcgtcgtcatggttgcagctttgcttttgtcgtcgtggagcctccaccagcgccgtgtagcattcaggaacaatggaaccaaaatacaggacattttcctacttcacgtctggatgccatccaattaatatcttctctgcgatattgcaatggaaggtgtagatagatgcaagtatacattcaatgttcttatgatagaggaaaggcatagctgcagatgggtttgatgttttatcttttcattcatgcatttcatcccatgcgcataaacaatttccaagtagcttgtgtatccaaacttggttcttttgttcactcagccaggttgtactgtttcattcagaattcggatttttcagccattaacccgcattttctattggatcgttttagattcatttgttttatctattagaccgtactctatattgtttcatttgaggacatttcaaatggttgttgtaggtcaatatgtgatagatgactagaagaaaattataaaaggatgttgaataagattgtgcttattttctcgtgacgaaggttttttctatgcttagggactgctcttatgtgttattggtgctattccgcttgtacggccaacgaaataggtcctactacacaagggaaatagaggataccatactcttagctttacagaagcctgaagtgtatgatgacattgctcgcgctacatgctgcaaatttgggatagatagacctcaagttgtacctgtgcaaggactacctcaggaaaagatgaaatggaactcaaattttagtggtcgcacaagtgtggagccagttgatgaccaagtttttcaattagtattttagtttgaatttagagtacacatatgtatgagttatttgacaatgcttgtttatgagagattgaatgatacctatctatattatattaattataatgttattaaataaatgtgtatatgtatatttctctttcaaattattataatgtgttatctcaaaatgattataaattgaagaatgtactttaaatctt

SEQ ID NO: 80159 - DNA, 1193 bp, Zea Mays
cgtcttctccctctcccctagatccttcgacgccgccctccctcagctcattccctgccgccgctcatctgctggccttgtctcactgccgcccaaccattttcctccctcaagctagcacgcagcctcaactcctctcccacctcacgcacgtctctcccagccgttccttcatttctctggctcgtccttctccatgaggtcgcgccctgctgcgccgtcgtgctggtcgccggctgagcccccttcagtgcctgacgccgcatctccctggtgctcacctctgtttccccctgcgttggacgacctcgcactccctccctgctccagatttctccatggtcgcccctttccttgccccgggtggcgagctcgcccctcattcctgctcgcctaatctccacttccctgttgcagccacctcccatggacgccagccctcagccatggatgccgaaccccctctctttagtgcctttctttacagcccctgcgtcgccgtgcgtgtaaggtgtttgtataaatgctcaagaggagtgacgtgtcatggccaacccttttggcgtcgtcggatgtttgatgttttgtgcatcccgtctacgacgccgtcgaccatcggagcgaaatccgtgaaatctaggtgaagaagagacggagcacgtcgtcgtcatggttgcagctttgcttttgtcgtcgtggagcctccaccagcgccgtgtagcaggactgctcttatgtgttattggtgctattccgcttgtacggccaacgaaataggtcctactacacaagggaaatagaggataccatactcttagctttacagaagcctgaagtgtatgatgacattgctcgcgctacatgctgcaaatttgggatagatagacctcaagttgtacctgtgcaaggactacctcaggaaaagatgaaatggaactcaaattttagtggtcgcacaagtgtggagccagttgatgaccaagtttttcaattagtattttagtttgaatttagagtacacatatgtatgagttatttgacaatgcttgtttatgagagattgaatgatacctatctatattatattaattataatgttattaaataaatgtgtatatgtatatttctctttcaaattattataatgtgttatctcaaaatgattataaattgaagaatgtactttaaatctt

SEQ ID NO: 80160 - DNA, 7090 bp, Zea Mays
ccagtttatttttttgtttatttttttgacctgttagagattacaataaacaaacaactccaatacggtttagggttcttttggagtacagtctacggtgaagccagagtccaaaatcaccctgctctacaccgcaagtcccagatctcggttgaacaagacaacactcgagcaccagtgacgcattccctctcccaccctctaggcccctaccctcccatggcgaagggcgtcggtggcggggatcccataccgctgtcgcggttcggcgcgctggtggcccagctggagtccgtagtggcatcggccaggcagaagacccccgacgcgctgctctgcttcgacctcctctccgagctctcctctgccatcgacgaggcccccaaggagaccatacaactttggcaaaggaaatgtgaggatgctctccaatccttgctcgtccttgggacacgacgtccagttcggcgcttggcgtcatcagcgatgggccgaattatcgagaaaggcgatgtgatatctgtatattcaagggcaagtaacttgcaggggtggttggtcgatgtgaaaagggctgaggccactgcatgtgcaggtgcagcacaatgtctgggggaaatttaccgtttatttggacgcaagattactgcagggctgattgagacatcaagcattgtagctaaactcatgaagtatcatgaggactttgtgagacaagatgctcttctcttgcttgagaatgcattggaaggctcaggtggtggtggtgctgctgcagcttatcaagaggcttttcgtatcatcatgcgaggtgtaagtgataaatcgttcattgtcagagcagcggcagcacgttgcttgaaggcatttgctaatattggtgggcctgcattggggatggctgatttcgattcttctatgtcttattgtgtgaagggtttggaagatagtgtatcttcagttagagattcatttgccgaagcacttggtgccatacttgctcttgcagtgaatccagatgcccaggtgaagaaaggcgggaaaaaacaaactgcttctgcaaagaaaattgaagatggtgtgcagaagcatttgattgtgccatttgtcaaagcaaatggagcaaatgcaaaggaactccggattggtttgactttatcatgggtgttctttctgcatatgattcatatgaagtatggcaccccagatagcgaacttcaaaattatgccatacaaacgatggaaattctccaggggaatgattcccttgatccacatgcgctggcatgcgttctgtatgttcttcgagttggtgtcgcggatcagatgactgagctgacacaacgcgattttttgctatttctgggaagaaagctggagtctttgaactacacagctgcaacgagagtggcaacactacgcattttgtgttacctattgagaagcgttggtgaggttccagctgaattcaaggatgttcttgataacacagttgttgcagcattgtctcattcttctgctcatgttcgtgtggaggcagctttaacattgcgtgctttagcagaggttgatcctacttgtgtaggtggtttagtttcatatggtcttacaacattgcaagctctacgagagactgtatcatttgataagggcaaaagtttgaaccttgagctcgactcactacatggacaggccactgtgttagctgctcttgttgcaatatcaccaaagttgcttcttggttatcctgcgaggctgcccaagtctgtacttgaattatccaaaaaaatgctgaatggtttcagtcgaaatccagtggctgctattgcagagcgtgaagctggttggttgctattagcttctcttctagcatccatgccaaaagaggagctggaagaccaggtgtttgatgttcttttgctatgggcgggtccttttactggaaatcctgaatcttaccttcgtcatatacaggattgggcatcagaattgcgggttctgtcagttgcagttgaggcgcttactgccttcataagaagttttgtttatccatctatcacaactactgattgtggaatcttgcttaatcctgtacttgcctaccttggcggagctctatccctcatatcttcgttgagatctaaacaagtgcccaatgtaaggtctgcgctggacctactcacaactagaacattgatggcttattggtccctttcgaatccagtggtatataaaactgagcaccagcagatacttcagctatgctcaagtccgttcagtgatccttctggatgggaagaaagctcatgcttgaagtttttgttggataagagagatgcttcactgggcccatggatacctggaagggattcatttgaggatgaattacgtgcttttgatggtggtgctgatgggtttctaccgtgtgtgtgggatgatgaaatcagcaacttccctcagccagagtcaattcggaaaatgctcgtcaaccagatgcttctctgttatggttccatatttgcatgtcaggaaaacactgtcaagataagcctcttgaacaatcttgaccagtgcctgaagtctgggaagaagtacctgtggtttaagtttctcattacaaatgcatgtgttgctctattgtcagggttaaaggaattcctcgctttacgtggtgctcaatcattgccaattgatatattaagtatgattcagtccattttcaaggccattttagtagagcctgaaatttctacagcacagcggcgagcagcgtgcgagggtctcggtttattagcacgagctgggaatgatatctttacagcaaggatggctcgctctcttctcggagagctggtaacaacaacagatctgagctatacaacttctgttgcattttcattgggttgcatccatcgaagtgctggaggaatggcattatctactctggttaccccaactgtgagctcactatctcatttgagtaaaagctctaatttcaatctgcagttgtggtcactgcatgctcttcttttaacaattgaagctgctggcttgtcttatgtctcgcaagttcaggggacacttttccttgctatggagattctcctcttggaagaaaatggatatgttgatcttcgacaaggaattggtcatcttattaatgcaatagttgctgttattggtccagagcttgctcctgatagcacattcttttcacgatgcaagtctgttattgcagagataagttcatcaaatgaaatggctacacttttagaatcggttagattctcccagcagcttgtgctttttgctcctcaagctgttcctgtgcacttgcacgttcaaggtcttatcccaatgctttactcaagacagccaagtcttagatatttagcagtgtcgacactgcaccatctgattgaaagggacccggctgcaatgattgacgagaatattgaagagaatctgttcagtatgcttgatgaggagaccgattcagaaacagcgatgttggttcgtgcaactattattcgcttattgtatacatcatgtccagtatgtccatcacggtggctggcagttttacgaaatattgttcttgctacgtcaattagaagaaacacaggtgaagttctgtcatgttttgggcataatcctcctgatagtacatctgagaatgatgtgtactatggagaagatgaagacaacatgatttccagctcaaagcagcagcaaatccgctgtgctggttctatatccagccagtttcctccaaggaataaacacctcagatatcgtaccagggtttttgctgcagaatgcgttagccatgtaccaattgcagttggagcagaacctgctcattttgacctcttgttggcaaggagcgcaatatctcaaggcacttatttgtcaaatgattggctagtgcttaaactacaggaactggtctcactttcataccagattagtactgggcaatttgaaggaatgcaaccaataggtgtgaagcttttgtgtttgataatggacaagttcggcaaggcagtagatccggaatttcctggccatatcttgctggaacaatttcaggcccaacttgtttctgctgttagaatggctataagcactgcttctggtccacttcttttggaggctggacttgaactcgctacaagggttatgacgagcagcataattggtggggatagactagctcttagtcgcttgttttctctgataacacgcccgttaagtgacatagagggcctactatatccatcttttgctgactgggtagtgtgcaagataaaagttcgccttctaactgcccatgcagcagtcaagtgtaacacctatcaattcttgaggatgagggaaaatgctcctaatgaataccagcaattggcaccttcacttgtaaacagttcaactctattaggaaaatactggattcgagcactcaaggattatgtttctataagttttggtttgcactcaaaaatcaattacaagccattccttgatgggattcagtcattattagtcttgtccaaggtgcagaggtatcttgatgaagtttggttattaattcttaaagcaacagctcttgatgccgcgcctttggattttgatgagaataatcctaaaaatttactcgaacaaacatttatatctgggcattgtatggtcaaattggacagaactgaattccaatttctttgggggttatctatccttgtgctgttccattcctgccaatcaatgaagaataattctttgaagatcaaccttgactttaaacaagacaaaaactttggggaatttattgttcatggacttgatgacaaaagaccgtgtgatcaggtcttacgcgtgctttcgtccctcacaacagaagtctttttcagcaataattttatttcagtggatatttgccagcaactcctccaggcacttacatatgcagattgttcaagcgctcctatcatccacctattcacccagattatcagattctgccctgacaatttttttgaggttgaagcctttgtcttctctgcaatagagttattgtctcagtatctgggtctgatacttcaatgtagggatgggagttctcagaataattcaagtaacactttgatttctgagttgtctattgcaagcgagacgatggcttatcggatcaaaggagagtatttgtggaagctggtgatgttagtggtatctacttcacaccaatcatttcaacaagtttcaactaatttatgcttctcaaatattatatgcttcctccaaaatatcttccctttcatgaggaaaatttttagagaaagagtcgaatcagatggtgagtgcacaagtcctaaagttgtctttggtgctatggttggcctagtgggatacttctatgtagagtgtgataaaaagatctcattgctcgaaaacaagatttctgattcctacaagctgttgaataagatactacttttttgcttgggagaagccactgctcttgcaaaacttgttcctgagatcatttatcgaagtgaaaatgtaagtaacaatgatgtgctcctttggggcagcttcaggctgtgcgtacaggttattcaaggttcatttcgtagtaccaacatacaggtgcacatgctgggtctgcaagtactgagaagctatgcacagaaggagctaactgaaggttcagaaacaaagttggattcttttatgatgttgcttacggaattgttgggagacttgtttttggtgatggagactacattgaaggaatgttcaaacaaaaaatctgtcagtgtcgttgatgaatgtttgaaacttgttttcctcttccacacactagcacaatcaaagaaataccgacaagatgctacaactcttctgctggaggccttgctgatggttttctctctgtccagtgatactgtttcacaggagcttgctgaagtgaacaccatttccagaaagttgttctctcattttattcagattccgtctgtggctatacagatcaaagacataatgctttctgcaccagctgaaaggagactacagcttcaggacatggtccgagcttcagtcagtcaagggcagataacggtgccagtggctacgagtgcacactcagaacagaatattcaggatagttgcagtaaaaaccctgggtccacatctgaagcttctgattgtgttgcaactcacgggaataatgacaatgaagttgttgatgatgactgggatgacgattgggatgctttccaatctcttcctgcaattgcaaatgatggtgttgattctggagaaatctctcttacaactaggtacaatgaacagatccctcaagaaaatagcagttacggttcttgtaatgcggatattacagctcgtgctatggaagacataacttgtgtggacaaggaacttgaggagccctctgatttgcaattctcaagtactgaacaacagcctaaacatgatttaccagggtcatcccacgaaggttgtgctaaacttgaaagacatccatctgttgattgcaaagagcaattagctgatgatgagacagcagatgaactgcagcagcaggttcatgaagacactgatcatgtaaataaagatagcgaagttctctctgcagaaattcatggggttaaattggatatccttgatgaagatgttgaagatgattccccaatgaattcaaacaatctatcagatatcgcagaggaagagtcctagggttggtacaatgcaacgagggtggaccgcaagcttgtcgagatagtagagaagagctgtccggttcctctgatgctggcataccagattttagtatgtcaggacacgtgatgagcaagagcggaggaaatgagcaaaatgttattttgcctgtatcaatatatattgcacgagataaaaataatataaggttacaaccatgatttttattttgtgccttcctccgcccctccgcttctaaataaatagttacctttgaatgaatttcaagaaaacccaatcaagacttatgacatcaaattaatatcattaaatctaacatagaatatat

SEQ ID NO: 80161 - DNA, 2618 bp, Zea Mays
ccagagtccaaaatcaccctgctctacaccgcaagtcccagatctcggttgaacaagacaacactcgagcaccagtgacgcattccctctcccaccctctaggcccctaccctcccatggcgaagggcgtcggtggcggggatcccataccgctgtcgcggttcggcgcgctggtggcccagctggagtccgtagtggcatcggccaggcagaagacccccgacgcgctgctctgcttcgacctcctctccgagctctcctctgccatcgacgaggcccccaaggagaccatacaactttggcaaaggaaatgtgaggatgctctccaatccttgctcgtccttgggacacgacgtccagttcggcgcttggcgtcatcagcgatgggccgaattatcgagaaaggcgatgtgatatctgtatattcaagggcaagtaacttgcaggggtggttggtcgatgtgaaaagggctgaggccactgcatgtgcaggtgcagcacaatgtctgggggaaatttaccgtttatttggacgcaagattactgcagggctgattgagacatcaagcattgtagctaaactcatgaagtatcatgaggactttgtgagacaagatgctcttctcttgcttgagaatgcattggaaggctcaggtggtggtggtgctgctgcagcttatcaagaggcttttcgtatcatcatgcgaggtgtaagtgataaatcgttcattgtcagagcagcggcagcacgttgcttgaaggcatttgctaatattggtgggcctgcattggggatggctgatttcgattcttctatgtcttattgtgtgaagggtttggaagatagtgtatcttcagttagagattcatttgccgaagcacttggtgccatacttgctcttgcagtgaatccagatgcccaggtgaagaaaggcgggaaaaaacaaactgcttctgcaaagaaaattgaagatggtgtgcagaagcatttgattgtgccatttgtcaaagcaaatggagcaaatgcaaaggaactccggattggtttgactttatcatgggtgttctttctgcatatgattcatatgaagtatggcaccccagatagcgaacttcaaaattatgccatacaaacgatggaaattctccaggggaatgattcccttgatccacatgcgctggcatgcgttctgtatgttcttcgagttggtgtcgcggatcagatgactgagctgacacaacgcgattttttgctatttctgggaagaaagctggagtctttgaactacacagctgcaacgagagtggcaacactacgcattttgtgttacctattgagaagcgttggtgaggttccagctgaattcaaggatgttcttgataacacagttgttgcagcattgtctcattcttctgctcatgatatgcagctcttgcatgttcaagaaaaagacatgccaccacaatacaagaaagtcaatttttcattgatgttggtcggctgttcacattgtgcattaatgaaatgcaaacatgaaactggctacatgtcacatctatttttaatcatgttatcattttgttgtatcaagctggttcgtgtggaggcagctttaacattgcgtgctttagcagaggttgatcctacttgtgtaggtggtttagtttcatatggtcttacaacattgcaagctctacgagagactgtatcatttgataagggcaaaagtttgaaccttgagctcgactcactacatggacaggccactgtgttagctgctcttgttgcaatatcaccaaagttgcttcttggttatcctgcgaggctgcccaagtctgtacttgaattatccaaaaaaatgctgaatggtttcagtcgaaatccagtggctgctattgcagagcgtgaagctggttggttgctattagcttctcttctagcatccatgccaaaagaggagctggaagaccaggtgtttgatgttcttttgctatgggcgggtccttttactggaaatcctgaatcttaccttcgtcatatacaggattgggcatcagaattgcgggttctgtcagttgcagttgaggcgcttactgccttcataagaagttttgtttatccatctatcacaactactgattgtggaatcttgcttaatcctgtacttgcctaccttggcggagctctatccctcatatcttcgttgagatctaaacaagtgcccaatgtaaggtctgcgctggacctactcacaactagaacattgatggcttattggtccctttcgaatccagtggtatataaaactgagcaccagcagatacttcagctatgctcaagtccgttcaggagaactgtgtctcattatattaagaaggtaaagcaaggtctaaaaatagaccccgagcaaggacttccttaccgaggtctaaaactcagcaacctgagaagatccatcatccattcatccatctaaacaaaaaatctaccaacaaaaagcggcccacccttatccagactaatcctcagggattgaggctgccaggtaggagaggcacttagccccaaccatctcccacatcattctctcatccctagctaaccgaagagctagaga

SEQ ID NO: 80162 - DNA, 8729 bp, Zea Mays
ccagagtccaaaatcaccctgctctacaccgcaagtcccagatctcggttgaacaagacaacactcgagcaccagtgacgcattccctctcccaccctctaggcccctaccctcccatggcgaagggcgtcggtggcggggatcccataccgctgtcgcggttcggcgcgctggtggcccagctggagtccgtagtggcatcggccaggcagaagacccccgacgcgctgctctgcttcgacctcctctccgagctctcctctgccatcgacgaggcccccaaggagaccatacaactttggcaaaggaaatgtgaggatgctctccaatccttgctcgtccttgggacacgacgtccagttcggcgcttggcgtcatcagcgatgggccgaattatcgagaaaggcgatgtgatatctgtatattcaagggcaagtaacttgcaggggtggttggtcgatgtgaaaagggctgaggccactgcatgtgcaggtgcagcacaatgtctgggggaaatttaccgtttatttggacgcaagattactgcagggctgattgagacatcaagcattgtagctaaactcatgaagtatcatgaggactttgtgagacaagatgctcttctcttgcttgagaatgcattggaaggctcaggtggtggtggtgctgctgcagcttatcaagaggcttttcgtatcatcatgcgaggtgtaagtgataaatcgttcattgtcagagcagcggcagcacgttgcttgaaggcatttgctaatattggtgggcctgcattggggatggctgatttcgattcttctatgtcttattgtgtgaagggtttggaagatagtgtatcttcagttagagattcatttgccgaagcacttggtgccatacttgctcttgcagtgaatccagatgcccaggtgaagaaaggcgggaaaaaacaaactgcttctgcaaagaaaattgaagatggtgtgcagaagcatttgattgtgccatttgtcaaagcaaatggagcaaatgcaaaggaactccggattggtttgactttatcatgggtgttctttctgcatatgattcatatgaagtatggcaccccagatagcgaacttcaaaattatgccatacaaacgatggaaattctccaggggaatgattcccttgatccacatgcgctggagcggctggtggccgagcttgttggacgggaatgtggccacgaagatggagagtgtcttgaccagtccgacgacgacgatggccacgaggacgacgctggtcgacgaaatgcccgccttcttgaatacctgaggggtgtagaggacgatggtgttgatgctgggcatttgctggaagcagagcacaaggacgttggtgaggatccgtcgcacgaacaacttcgtccagtctttggtgccgcccacccatgtcgtgatggcctgcctgatctccttgagcacgagcacgacacgggctactggggcgtctccggcatggcatgcgttctgtatgttcttcgagttggtgtcgcggatcagatgactgagctgacacaacgcgattttttgctatttctgggaagaaagctggagtctttgaactacacagctgcaacgagagtggcaacactacgcattttgtgttacctattgagaagcgttggtgaggttccagctgaattcaaggatgttcttgataacacagttgttgcagcattgtctcattcttctgctcatgttcgtgtggaggcagctttaacattgcgtgctttagcagaggttgatcctacttgtgtaggtggtttagtttcatatggtcttacaacattgcaagctctacgagagactgtatcatttgataagggcaaaagtttgaaccttgagctcgactcactacatggacaggccactgtgttagctgctcttgttgcaatatcaccaaagttgcttcttggttatcctgcgaggctgcccaagtctgtacttgaattatccaaaaaaatgctgaatggtttcagtcgaaatccagtggctgctattgcagagcgtgaagctggttggttgctattagcttctcttctagcatccatgccaaaagaggagctggaagaccaggtgtttgatgttcttttgctatgggcgggtccttttactggaaatcctgaatcttaccttcgtcatatacaggattgggcatcagaattgcgggttctgtcagttgcagttgaggcgcttactgccttcataagaagttttgtttatccatctatcacaactactgattgtggaatcttgcttaatcctgtacttgcctaccttggcggagctctatccctcatatcttcgttgagatctaaacaagtgcccaatgtaaggtctgcgctggacctactcacaactagaacattgatggcttattggtccctttcgaatccagtggtatataaaactgagcaccagcagatacttcagctatgctcaagtccgttcagtgatccttctggatgggaagaaagctcatgcttgaagtttttgttggataagagagatgcttcactgggcccatggatacctggaagggattcatttgaggatgaattacgtgcttttgatggtggtgctgatgggtttctaccgtgtgtgtgggatgatgaaatcagcaacttccctcagagtcaattcggaaaatgctcgtcaaccagatgcttctctgttatggttccatatttgcatgtcaggaaaacactgtcaagataagcctcttgaacaatcttgaccagtgcctgaagtctgggaagaagtacctgtggtttaagtttctcattacaaatgcatgtgttgctctattgtcagggttaaaggaattcctcgctttacgtggtgctcaatcattgccaattgatatattaagtatgattcagtccattttcaaggccattttagtagagcctgaaatttctacagcacagcggcgagcagcgtgcgagggtctcggtttattagcacgagctgggaatgatatctttacagcaaggatggctcgctctcttctcggagagctggtaacaacaacagatctgagctatacaacttctgttgcattttcattgggttgcatccatcgaaggtaagtttcatacctgaagatatttcgttgtattaattctgaatctcaaaataccagttaatagtctccatgggtgtatagtgtccatttgtttcagttttataattctttgttgacatggcctactatttccattgtttactttgagattttttttcttgagtactttgtattgacgtaggtgttctcctgttcctattgggaagtcatttgtgtccccattacttgttcgaacactagccacaacattgttgtatatgcaccttaatgagtccaacgtagctcttttgagaatttatgtttgtccaacgcccaccacataacatttcttggtattttgtattaaaccttctactagacggtgaagaccatgtatatgtccttattttgctccctatattgctccattacttgtcttattgagaaaatgactttcatggttgacctttcagacataaaccaaattggtttaggggcatcgtggacgtagaagaaaatagcatgcaattaaggtaggaagggtcattgttaagccgccatggatgaagcatacattgtggttggcaggctcgagaatgcgtcgtgactggaggctgtgcaccgggttgtactaggtagagggccccaaccatataccaatgtttaaggaaacggttgagcgatcctcaacgatgattgcaacgcgtagaacatcgggggtagaaggtgctaggtgtagcctgctgttgtcggattagacaaattagatgtgaaacagatgtggttgtgctagacgaggttaggtcaagcagtgtgtggatgatagtagatgtacctacttagaggttaggcatgcctgaagttagtggtccggacgcaaggtacacgtgtcgtcaatgcatagcatacgatgatgtagatgctgcagtgagtgccatcttggatagaggcatgcttgtgagagtgtgtcctttggtggataccattggaagtggtgttgtgactcgaggaggcgacacaacaatagcagcgctattgtttggagtggatgcgtgtagtactttgctaacttcacatgagctaggaggaccgtgcataatcagttggttgatcaagtatgcatgatgtgggatgctaatggaagaaatcggtggtggtgtcctcatttatggtggcgatgatgaaccaacgataatcatgggtcgttgtgggattgggatatagagggcaacattgctagaatcatgacacaattatgacatcatgctctagtgctatgtttgtcccgcttgagcctcaagttcgagccaagcatagttgtcatttggcaatgagtccaatgcacccgcacaagaggagtctggactcctgtgcgctcgtgtgacatgctagctgagacaacatccttgtgatatacaactgcaggccatggatgaaataagaagagagtgctggaggaatggcattatctactctggttaccccaactgtgagctcactatctcatttgagtaaaagctctaatttcaatctgcagttgtggtcactgcatgctcttcttttaacaattgaagctgctggcttgtcttatgtctcgcaagttcaggggacacttttccttgctatggagattctcctcttggaagaaaatggatatgttgatcttcgacaaggaattggtcatcttattaatgcaatagttgctgttattggtccagagcttgctcctgatagcacattcttttcacgatgcaagtctgttattgcagagataagttcatcaaatgaaatggctacacttttagaatcggttagattctcccagcagcttgtgctttttgctcctcaagctgttcctgtgcacttgcacgttcaaggtcttatcccaatgctttactcaagacagccaagtcttagatatttagcagtgtcgacactgcaccatctgattgaaagggacccggctgcaatgattgacgagaatattgaagagaatctgttcagtatgcttgatgaggagaccgattcagaaacagcgatgttggttcgtgcaactattattcgcttattgtatacatcatgtccagtatgtccatcacggtggctggcagttttacgaaatattgttcttgctacgtcaattagaagaaacacaggtgaagttctgtcatgttttgggcataatcctcctgatagtacatctgagaatgatgtgtactatggagaagatgaagacaacatgatttccagctcaaagcagcagcaaatccgctgtgctggttctatatccagccagtttcctccaaggaataaacacctcagatatcgtaccagggtttttgctgcagaatgcgttagccatgtaccaattgcagttggagcagaacctgctcattttgacctcttgttggcaaggagcgcaatatctcaaggcacttatttgtcaaatgattggctagtgcttaaactacaggaactggtctcactttcataccagattagtactgggcaatttgaaggaatgcaaccaataggtgtgaagcttttgtgtttgataatggacaagttcggcaaggcagtagatccggaatttcctggccatatcttgctggaacaatttcaggcccaacttgtttctgctgttagaatggctataagcactgcttctggtccacttcttttggaggctggacttgaactcgctacaagggttatgacgagcagcataattggtggggatagactagctcttagtcgcttgttttctctgataacacgcccgttaagtgacatagagggcctactatatccatcttttgctgactgggtagtgtgcaagataaaagttcgccttctaactgcccatgcagcagtcaagtgtaacacctatcaattcttgaggatgagggaaaatgctcctaatgaataccagcaattggcaccttcacttgtaaacagttcaactctattaggaaaatactggattcgagcactcaaggattatgtttctataagttttggtttgcactcaaaaatcaattacaagccattccttgatgggattcagtcattattagtcttgtccaaggtgcagaggtatcttgatgaagtttggttattaattcttaaagcaacagctcttgatgccgcgcctttggattttgatgagaataatcctaaaaatttactcgaacaaacatttatatctgggcattgtatggtcaaattggacagaactgaattccaatttctttgggggttatctatccttgtgctgttccattcctgccaatcaatgaagaataattctttgaagatcaaccttgactttaaacaagacaaaaactttggggaatttattgttcatggacttgatgacaaaagaccgtgtgatcaggtcttacgcgtgctttcgtccctcacaacagaagtctttttcagcaataattttatttcagtggatatttgccagcaactcctccaggcacttacatatgcagattgttcaagcgctcctatcatccacctattcacccagattatcagattctgccctgacaatttttttgaggttgaagcctttgtcttctctgcaatagagttattgtctcagtatctgggtctgatacttcaatgtagggatgggagttctcagaataattcaagtaacactttgatttctgagttgtctattgcaagcgagacgatggcttatcggatcaaaggagagtatttgtggaagctggtgatgttagtggtatctacttcacaccaatcatttcaacaagtttcaactaatttatgcttctcaaatattatatgcttcctccaaaatatcttccctttcatgaggaaaatttttagagaaagagtcgaatcagatggtgagtgcacaagtcctaaagttgtctttggtgctatggttggcctagtgggatacttctatgtagagtgtgataaaaagatctcattgctcgaaaacaagatttctgattcctacaagctgttgaataagatactacttttttgcttgggagaagccactgctcttgcaaaacttgttcctgagatcatttatcgaagtgaaaatgtaagtaacaatgatgtgctcctttggggcagcttcaggctgtgcgtacaggttattcaaggttcatttcgtagtaccaacatacaggtgcacatgctgggtctgcaagtactgagaagctatgcacagaaggagctaactgaaggttcagaaacaaagttggattcttttatgatgttgcttacggaattgttgggagacttgtttttggtgatggagactacattgaaggaatgttcaaacaaaaaatctgtcagtgtcgttgatgaatgtttgaaacttgttttcctcttccacacactagcacaatcaaagaaataccgacaagatgctacaactcttctgctggaggccttgctgatggttttctctctgtccagtgatactgtttcacaggagcttgctgaagtgaacaccatttccagaaagttgttctctcattttattcagattccgtctgtggctatacagatcaaagacataatgctttctgcaccagctgaaaggagactacagcttcaggacatggtccgagcttcagtcagtcaagggcagataacggtgccagtggctacgagtgcacactcagaacagaatattcaggatagttgcagtaaaaaccctgggtccacatctgaagcttctgattgtgttgcaactcacgggaataatgacaatgaagttgttgatgatgactgggatgacgattgggatgctttccaatctcttcctgcaattgcaaatgatggtgttgattctggagaaatctctcttacaactaggtacaatgaacagatccctcaagaaaatagcagttacggttcttgtaatgcggatattacagctcgtgctatggaagacataacttgtgtggacaaggaacttgaggagccctctgatttgcaattctcaagtactgaacaacagcctaaacatgatttaccagggtcatcccacgaaggttgtgctaaacttgaaagacatccatctgttgattgcaaagagcaattagctgatgatgagacagcagatgaactgcagcagcaggttcatgaagacactgatcatgtaaataaagatagcgaagttctctctgcagaaattcatggggttaaattggatatccttgatgaagatgttgaagatgattccccaatgaattcaaacaatctatcagatatcgcagaggaagagtcctagggttggtacaatgcaacgagggtggaccgcaagcttgtcgagatagtagagaagagctgtccggttcctctgatgctggcataccagattttagtatgtcaggacacgtgatgagcaagagcggaggaaatgagcaaaatgttattttgcctgtatcaatatatattgcacgagataaaaataatataaggttacaaccatgatttttattttgtgccttcctccgcccctccgcttctaaataaatagttacctttgaatgaatttcaagaaaacccaatcaagacttatgacatcaaattaatatcattaaatctaacatagaatatat

SEQ ID NO: 80163 - DNA, 6984 bp, Zea Mays
ccagagtccaaaatcaccctgctctacaccgcaagtcccagatctcggttgaacaagacaacactcgagcaccagtgacgcattccctctcccaccctctaggcccctaccctcccatggcgaagggcgtcggtggcggggatcccataccgctgtcgcggttcggcgcgctggtggcccagctggagtccgtagtggcatcggccaggcagaagacccccgacgcgctgctctgcttcgacctcctctccgagctctcctctgccatcgacgaggcccccaaggagaccatacaactttggcaaaggaaatgtgaggatgctctccaatccttgctcgtccttgggacacgacgtccagttcggcgcttggcgtcatcagcgatgggccgaattatcgagaaaggcgatgtgatatctgtatattcaagggcaagtaacttgcaggggtggttggtcgatgtgaaaagggctgaggccactgcatgtgcaggtgcagcacaatgtctgggggaaatttaccgtttatttggacgcaagattactgcagggctgattgagacatcaagcattgtagctaaactcatgaagtatcatgaggactttgtgagacaagatgctcttctcttgcttgagaatgcattggaaggctcaggtggtggtggtgctgctgcagcttatcaagaggcttttcgtatcatcatgcgaggtgtaagtgataaatcgttcattgtcagagcagcggcagcacgttgcttgaaggcatttgctaatattggtgggcctgcattggggatggctgatttcgattcttctatgtcttattgtgtgaagggtttggaagatagtgtatcttcagttagagattcatttgccgaagcacttggtgccatacttgctcttgcagtgaatccagatgcccaggtgaagaaaggcgggaaaaaacaaactgcttctgcaaagaaaattgaagatggtgtgcagaagcatttgattgtgccatttgtcaaagcaaatggagcaaatgcaaaggaactccggattggtttgactttatcatgggtgttctttctgcatatgattcatatgaagtatggcaccccagatagcgaacttcaaaattatgccatacaaacgatggaaattctccaggggaatgattcccttgatccacatgcgctggcatgcgttctgtatgttcttcgagttggtgtcgcggatcagatgactgagctgacacaacgcgattttttgctatttctgggaagaaagctggagtctttgaactacacagctgcaacgagagtggcaacactacgcattttgtgttacctattgagaagcgttggtgaggttccagctgaattcaaggatgttcttgataacacagttgttgcagcattgtctcattcttctgctcatgttcgtgtggaggcagctttaacattgcgtgctttagcagaggttgatcctacttgtgtaggtggtttagtttcatatggtcttacaacattgcaagctctacgagagactgtatcatttgataagggcaaaagtttgaaccttgagctcgactcactacatggacaggccactgtgttagctgctcttgttgcaatatcaccaaagttgcttcttggttatcctgcgaggctgcccaagtctgtacttgaattatccaaaaaaatgctgaatggtttcagtcgaaatccagtggctgctattgcagagcgtgaagctggttggttgctattagcttctcttctagcatccatgccaaaagaggagctggaagaccaggtgtttgatgttcttttgctatgggcgggtccttttactggaaatcctgaatcttaccttcgtcatatacaggattgggcatcagaattgcgggttctgtcagttgcagttgaggcgcttactgccttcataagaagttttgtttatccatctatcacaactactgattgtggaatcttgcttaatcctgtacttgcctaccttggcggagctctatccctcatatcttcgttgagatctaaacaagtgcccaatgtaaggtctgcgctggacctactcacaactagaacattgatggcttattggtccctttcgaatccagtggtatataaaactgagcaccagcagatacttcagctatgctcaagtccgttcagtgatccttctggatgggaagaaagctcatgcttgaagtttttgttggataagagagatgcttcactgggcccatggatacctggaagggattcatttgaggatgaattacgtgcttttgatggtggtgctgatgggtttctaccgtgtgtgtgggatgatgaaatcagcaacttccctcagccagagtcaattcggaaaatgctcgtcaaccagatgcttctctgttatggttccatatttgcatgtcaggaaaacactgtcaagataagcctcttgaacaatcttgaccagtgcctgaagtctgggaagaagtacctgtggtttaagtttctcattacaaatgcatgtgttgctctattgtcagggttaaaggaattcctcgctttacgtggtgctcaatcattgccaattgatatattaagtatgattcagtccattttcaaggccattttagtagagcctgaaatttctacagcacagcggcgagcagcgtgcgagggtctcggtttattagcacgagctgggaatgatatctttacagcaaggatggctcgctctcttctcggagagctggtaacaacaacagatctgagctatacaacttctgttgcattttcattgggttgcatccatcgaagtgctggaggaatggcattatctactctggttaccccaactgtgagctcactatctcatttgagtaaaagctctaatttcaatctgcagttgtggtcactgcatgctcttcttttaacaattgaagctgctggcttgtcttatgtctcgcaagttcaggggacacttttccttgctatggagattctcctcttggaagaaaatggatatgttgatcttcgacaaggaattggtcatcttattaatgcaatagttgctgttattggtccagagcttgctcctgatagcacattcttttcacgatgcaagtctgttattgcagagataagttcatcaaatgaaatggctacacttttagaatcggttagattctcccagcagcttgtgctttttgctcctcaagctgttcctgtgcacttgcacgttcaaggtcttatcccaatgctttactcaagacagccaagtcttagatatttagcagtgtcgacactgcaccatctgattgaaagggacccggctgcaatgattgacgagaatattgaagagaatctgttcagtatgcttgatgaggagaccgattcagaaacagcgatgttggttcgtgcaactattattcgcttattgtatacatcatgtccagtatgtccatcacggtggctggcagttttacgaaatattgttcttgctacgtcaattagaagaaacacaggtgaagttctgtcatgttttgggcataatcctcctgatagtacatctgagaatgatgtgtactatggagaagatgaagacaacatgatttccagctcaaagcagcagcaaatccgctgtgctggttctatatccagccagtttcctccaaggaataaacacctcagatatcgtaccagggtttttgctgcagaatgcgttagccatgtaccaattgcagttggagcagaacctgctcattttgacctcttgttggcaaggagcgcaatatctcaaggcacttatttgtcaaatgattggctagtgcttaaactacaggaactggtctcactttcataccagattagtactgggcaatttgaaggaatgcaaccaataggtgtgaagcttttgtgtttgataatggacaagttcggcaaggcagtagatccggaatttcctggccatatcttgctggaacaatttcaggcccaacttgtttctgctgttagaatggctataagcactgcttctggtccacttcttttggaggctggacttgaactcgctacaagggttatgacgagcagcataattggtggggatagactagctcttagtcgcttgttttctctgataacacgcccgttaagtgacatagagggcctactatatccatcttttgctgactgggtagtgtgcaagataaaagttcgccttctaactgcccatgcagcagtcaagtgtaacacctatcaattcttgaggatgagggaaaatgctcctaatgaataccagcaattggcaccttcacttgtaaacagttcaactctattaggaaaatactggattcgagcactcaaggattatgtttctataagttttggtttgcactcaaaaatcaattacaagccattccttgatgggattcagtcattattagtcttgtccaaggtgcagaggtatcttgatgaagtttggttattaattcttaaagcaacagctcttgatgccgcgcctttggattttgatgagaataatcctaaaaatttactcgaacaaacatttatatctgggcattgtatggtcaaattggacagaactgaattccaatttctttgggggttatctatccttgtgctgttccattcctgccaatcaatgaagaataattctttgaagatcaaccttgactttaaacaagacaaaaactttggggaatttattgttcatggacttgatgacaaaagaccgtgtgatcaggtcttacgcgtgctttcgtccctcacaacagaagtctttttcagcaataattttatttcagtggatatttgccagcaactcctccaggcacttacatatgcagattgttcaagcgctcctatcatccacctattcacccagattatcagattctgccctgacaatttttttgaggttgaagcctttgtcttctctgcaatagagttattgtctcagtatctgggtctgatacttcaatgggatgggagttctcagaataattcaagtaacactttgatttctgagttgtctattgcaagcgagacgatggcttatcggatcaaaggagagtatttgtggaagctggtgatgttagtggtatctacttcacaccaatcatttcaacaagtttcaactaatttatgcttctcaaatattatatgcttcctccaaaatatcttccctttcatgaggaaaatttttagagaaagagtcgaatcagatggtgagtgcacaagtcctaaagttgtctttggtgctatggttggcctagtgggatacttctatgtagagtgtgataaaaagatctcattgctcgaaaacaagatttctgattcctacaagctgttgaataagatactacttttttgcttgggagaagccactgctcttgcaaaacttgttcctgagatcatttatcgaagtgaaaatgtaagtaacaatgatgtgctcctttggggcagcttcaggctgtgcgtacaggttattcaaggttcatttcgtagtaccaacatacaggtgcacatgctgggtctgcaagtactgagaagctatgcacagaaggagctaactgaaggttcagaaacaaagttggattcttttatgatgttgcttacggaattgttgggagacttgtttttggtgatggagactacattgaaggaatgttcaaacaaaaaatctgtcagtgtcgttgatgaatgtttgaaacttgttttcctcttccacacactagcacaatcaaagaaataccgacaagatgctacaactcttctgctggaggccttgctgatggttttctctctgtccagtgatactgtttcacaggagcttgctgaagtgaacaccatttccagaaagttgttctctcattttattcagattccgtctgtggctatacagatcaaagacataatgctttctgcaccagctgaaaggagactacagcttcaggacatggtccgagcttcagtcagtcaagggcagataacggtgccagtggctacgagtgcacactcagaacagaatattcaggatagttgcagtaaaaaccctgggtccacatctgaagcttctgattgtgttgcaactcacgggaataatgacaatgaagttgttgatgatgactgggatgacgattgggatgctttccaatctcttcctgcaattgcaaatgatggtgttgattctggagaaatctctcttacaactaggtacaatgaacagatccctcaagaaaatagcagttacggttcttgtaatgcggatattacagctcgtgctatggaagacataacttgtgtggacaaggaacttgaggagccctctgatttgcaattctcaagtactgaacaacagcctaaacatgatttaccagggtcatcccacgaaggttgtgctaaacttgaaagacatccatctgttgattgcaaagagcaattagctgatgatgagacagcagatgaactgcagcagcaggttcatgaagacactgatcatgtaaataaagatagcgaagttctctctgcagaaattcatggggttaaattggatatccttgatgaagatgttgaagatgattccccaatgaattcaaacaatctatcagatatcgcagaggaagagtcctagggttggtacaatgcaacgagggtggaccgcaagcttgtcgagatagtagagaagagctgtccggttcctctgatgctggcataccagattttagtatgtcaggacacgtgatgagcaagagcggaggaaatgagcaaaatgttattttgcctgtatcaatatatattgcacgagataaaaataatataaggttacaaccatgatttttattttgtgccttcctccgcccctccgcttctaaataaatagttacctttgaatgaatttcaagaaaacccaatcaagacttatgacatcaaattaatatcattaaatctaacatagaatatat

SEQ ID NO: 80164 - DNA, 6728 bp, Zea Mays
ccagagtccaaaatcaccctgctctacaccgcaagtcccagatctcggttgaacaagacaacactcgagcaccagtgacgcattccctctcccaccctctaggcccctaccctcccatggcgaagggcgtcggtggcggggatcccataccgctgtcgcggttcggcgcgctggtggcccagctggagtccgtagtggcatcggccaggcagaagacccccgacgcgctgctctgcttcgacctcctctccgagctctcctctgccatcgacgaggcccccaaggagaccatacaactttggcaaaggaaatgtgaggatgctctccaatccttgctcgtccttgggacacgacgtccagttcggcgcttggcgtcatcagcgatgggccgaattatcgagaaaggcgatgtgatatctgtatattcaagggcaagtaacttgcaggggtggttggtcgatgtgaaaagggctgaggccactgcatgtgcaggtgcagcacaatgtctgggggaaatttaccgtttatttggacgcaagattactgcagggctgattgagacatcaagcattgtagctaaactcatgaagtatcatgaggactttgtgagacaagatgctcttctcttgcttgagaatgcattggaaggctcaggtggtggtggtgctgctgcagcttatcaagaggcttttcgtatcatcatgcgaggtgtaagtgataaatcgttcattgtcagagcagcggcagcacgttgcttgaaggcatttgctaatattggtgggcctgcattggggatggctgatttcgattcttctatgtcttattgtgtgaagggtttggaagatagtgtatcttcagttagagattcatttgccgaagcacttggtgccatacttgctcttgcagtgaatccagatgcccaggtgaagaaaggcgggaaaaaacaaactgcttctgcaaagaaaattgaagatggtgtgcagaagcatttgattgtgccatttgtcaaagcaaatggagcaaatgcaaaggaactccggattggtttgactttatcatgggtgttctttctgcatatgattcatatgaagtatggcaccccagatagcgaacttcaaaattatgccatacaaacgatggaaattctccaggggaatgattcccttgatccacatgcgctggcatgcgttctgtatgttcttcgagttggtgtcgcggatcagatgactgagctgacacaacgcgattttttgctatttctgggaagaaagctggagtctttgaactacacagctgcaacgagagtggcaacactacgcattttgtgttacctattgagaagcgttggtgaggttccagctgaattcaaggatgttcttgataacacagttgttgcagcattgtctcattcttctgctcatgttcgtgtggaggcagctttaacattgcgtgctttagcagaggttgatcctacttgtgtaggtggtttagtttcatatggtcttacaacattgcaagctctacgagagactgtatcatttgataagggcaaaagtttgaaccttgagctcgactcactacatggacaggccactgtgttagctgctcttgttgcaatatcaccaaagttgcttcttggttatcctgcgaggctgcccaagtctgtacttgaattatccaaaaaaatgctgaatggtttcagtcgaaatccagtggctgctattgcagagcgtgaagctggttggttgctattagcttctcttctagcatccatgccaaaagaggagctggaagaccaggtgtttgatgttcttttgctatgggcgggtccttttactggaaatcctgaatcttaccttcgtcatatacaggattgggcatcagaattgcgggttctgtcagttgcagttgaggcgcttactgccttcataagaagttttgtttatccatctatcacaactactgattgtggaatcttgcttaatcctgtacttgcctaccttggcggagctctatccctcatatcttcgttgagatctaaacaagtgcccaatgtaaggtctgcgctggacctactcacaactagaacattgatggcttattggtccctttcgaatccagtggtatataaaactgagcaccagcagatacttcagctatgctcaagtccgttcagtgatccttctggatgggaagaaagctcatgcttgaagtttttgttggataagagagatgcttcactgggcccatggatacctggaagggattcatttgaggatgaattacgtgcttttgatggtggtgctgatgggtttctaccgtgtgtgtgggatgatgaaatcagcaacttccctcagccagagtcaattcggaaaatgctcgtcaaccagatgcttctctgttatggttccatatttgcatgtcaggaaaacactgtcaagataagcctcttgaacaatcttgaccagtgcctgaagtctgggaagaagtacctgtggtttaagtttctcattacaaatgcatgtgttgctctattgtcagggttaaaggaattcctcgctttacgtggtgctcaatcattgccaattgatatattaagtatgattcagtccattttcaaggccattttagtagagcctgaaatttctacagcacagcggcgagcagcgtgcgagggtctcggtttattagcacgagctgggaatgatatctttacagcaaggatggctcgctctcttctcggagagctggtaacaacaacagatctgagctatacaacttctgttgcattttcattgggttgcatccatcgaagtgctggaggaatggcattatctactctggttaccccaactgtgagctcactatctcatttgagtaaaagctctaatttcaatctgcagttgtggtcactgcatgctcttcttttaacaattgaagctgctggcttgtcttatgtctcgcaagttcaggggacacttttccttgctatggagattctcctcttggaagaaaatggatatgttgatcttcgacaaggaattggtcatcttattaatgcaatagttgctgttattggtccagagcttgctcctgatagcacattcttttcacgatgcaagtctgttattgcagagataagttcatcaaatgaaatggctacacttttagaatcggttagattctcccagcagcttgtgctttttgctcctcaagctgttcctgtgcacttgcacgttcaaggtcttatcccaatgctttactcaagacagccaagtcttagatatttagcagtgtcgacactgcaccatctgattgaaagggacccggctgcaatgattgacgagaatattgaagagaatctgttcagtatgcttgatgaggagaccgattcagaaacagcgatgttggttcgtgcaactattattcgcttattgtatacatcatgtccagtatgtccatcacggtggctggcagttttacgaaatattgttcttgctacgtcaattagaagaaacacaggtgaagttctgtcatgttttgggcataatcctcctgatagtacatctgagaatgatgtgtactatggagaagatgaagacaacatgatttccagctcaaagcagcagcaaatccgctgtgctggttctatatccagccagtttcctccaaggaataaacacctcagatatcgtaccagggtttttgctgcagaatgcgttagccatgtaccaattgcagttggagcagaacctgctcattttgacctcttgttggcaaggagcgcaatatctcaaggcacttatttgtcaaatgattggctagtgcttaaactacaggaactggtctcactttcataccagattagtactgggcaatttgaaggaatgcaaccaataggtgtgaagcttttgtgtttgataatggacaagttcggcaaggcagtagatccggaatttcctggccatatcttgctggaacaatttcaggcccaacttgtttctgctgttagaatggctataagcactgcttctggtccacttcttttggaggctggacttgaactcgctacaagggttatgacgagcagcataattggtggggatagactagctcttagtcgcttgttttctctgataacacgcccgttaagtgacatagagggcctactatatccatcttttgctgactgggtagtgtgcaagataaaagttcgccttctaactgcccatgcagcagtcaagtgtaacacctatcaattcttgaggatgagggaaaatgctcctaatgaataccagcaattggcaccttcacttgtaaacagttcaactctattaggaaaatactggattcgagcactcaaggattatgtttctataagttttggtttgcactcaaaaatcaattacaagccattccttgatgggattcagtcattattagtcttgtccaaggtgcagaggtatcttgatgaagtttggttattaattcttaaagcaacagctcttgatgccgcgcctttggattttgatgagaataatcctaaaaatttactcgaacaaacatttatatctgggcattgtatggtcaaattggacagaactgaattccaatttctttgggggttatctatccttgtgctgttccattcctgccaatcaatgaagaataattctttgaagatcaaccttgactttaaacaagacaaaaactttggggaatttattgttcatggacttgatgacaaaagaccgtgtgatcaggtcttacgcgtgctttcgtccctcacaacagaagtctttttcagcaataattttatttcagtggatatttgccagcaactcctccaggcacttacatatgcagattgttcaagcgctcctatcatccacctattcacccagattatcagattctgccctgacaatttttttgaggttgaagcctttgtcttctctgcaatagagttattgtctcagtatctgggtctgatacttcaatgggatgggagttctcagaataattcaagtaacactttgatttctgagttgtctattgcaagcgagacgatggcttatcggatcaaaggagagtatttgtggaagctggtgatgttagtggtatctacttcacaccaatcatttcaacaagtttcaactaatttatgcttctcaaatattatatgcttcctccaaaatatcttccctttcatgaggaaaatttttagagcttcaggctgtgcgtacaggttattcaaggttcatttcgtagtaccaacatacaggtgcacatgctgggtctgcaagtactgagaagctatgcacagaaggagctaactgaaggttcagaaacaaagttggattcttttatgatgttgcttacggaattgttgggagacttgtttttggtgatggagactacattgaaggaatgttcaaacaaaaaatctgtcagtgtcgttgatgaatgtttgaaacttgttttcctcttccacacactagcacaatcaaagaaataccgacaagatgctacaactcttctgctggaggccttgctgatggttttctctctgtccagtgatactgtttcacaggagcttgctgaagtgaacaccatttccagaaagttgttctctcattttattcagattccgtctgtggctatacagatcaaagacataatgctttctgcaccagctgaaaggagactacagcttcaggacatggtccgagcttcagtcagtcaagggcagataacggtgccagtggctacgagtgcacactcagaacagaatattcaggatagttgcagtaaaaaccctgggtccacatctgaagcttctgattgtgttgcaactcacgggaataatgacaatgaagttgttgatgatgactgggatgacgattgggatgctttccaatctcttcctgcaattgcaaatgatggtgttgattctggagaaatctctcttacaactaggtacaatgaacagatccctcaagaaaatagcagttacggttcttgtaatgcggatattacagctcgtgctatggaagacataacttgtgtggacaaggaacttgaggagccctctgatttgcaattctcaagtactgaacaacagcctaaacatgatttaccagggtcatcccacgaaggttgtgctaaacttgaaagacatccatctgttgattgcaaagagcaattagctgatgatgagacagcagatgaactgcagcagcaggttcatgaagacactgatcatgtaaataaagatagcgaagttctctctgcagaaattcatggggttaaattggatatccttgatgaagatgttgaagatgattccccaatgaattcaaacaatctatcagatatcgcagaggaagagtcctagggttggtacaatgcaacgagggtggaccgcaagcttgtcgagatagtagagaagagctgtccggttcctctgatgctggcataccagattttagtatgtcaggacacgtgatgagcaagagcggaggaaatgagcaaaatgttattttgcctgtatcaatatatattgcacgagataaaaataatataaggttacaaccatgatttttattttgtgccttcctccgcccctccgcttctaaataaatagttacctttgaatgaatttcaagaaaacccaatcaagacttatgacatcaaattaatatcattaaatctaacatagaatatat

SEQ ID NO: 80165 - DNA, 6989 bp, Zea Mays
ccagagtccaaaatcaccctgctctacaccgcaagtcccagatctcggttgaacaagacaacactcgagcaccagtgacgcattccctctcccaccctctaggcccctaccctcccatggcgaagggcgtcggtggcggggatcccataccgctgtcgcggttcggcgcgctggtggcccagctggagtccgtagtggcatcggccaggcagaagacccccgacgcgctgctctgcttcgacctcctctccgagctctcctctgccatcgacgaggcccccaaggagaccatacaactttggcaaaggaaatgtgaggatgctctccaatccttgctcgtccttgggacacgacgtccagttcggcgcttggcgtcatcagcgatgggccgaattatcgagaaaggcgatgtgatatctgtatattcaagggcaagtaacttgcaggggtggttggtcgatgtgaaaagggctgaggccactgcatgtgcaggtgcagcacaatgtctgggggaaatttaccgtttatttggacgcaagattactgcagggctgattgagacatcaagcattgtagctaaactcatgaagtatcatgaggactttgtgagacaagatgctcttctcttgcttgagaatgcattggaaggctcaggtggtggtggtgctgctgcagcttatcaagaggcttttcgtatcatcatgcgaggtgtaagtgataaatcgttcattgtcagagcagcggcagcacgttgcttgaaggcatttgctaatattggtgggcctgcattggggatggctgatttcgattcttctatgtcttattgtgtgaagggtttggaagatagtgtatcttcagttagagattcatttgccgaagcacttggtgccatacttgctcttgcagtgaatccagatgcccaggtgaagaaaggcgggaaaaaacaaactgcttctgcaaagaaaattgaagatggtgtgcagaagcatttgattgtgccatttgtcaaagcaaatggagcaaatgcaaaggaactccggattggtttgactttatcatgggtgttctttctgcatatgattcatatgaagtatggcaccccagatagcgaacttcaaaattatgccatacaaacgatggaaattctccaggggaatgattcccttgatccacatgcgctggcatgcgttctgtatgttcttcgagttggtgtcgcggatcagatgactgagctgacacaacgcgattttttgctatttctgggaagaaagctggagtctttgaactacacagctgcaacgagagtggcaacactacgcattttgtgttacctattgagaagcgttggtgaggttccagctgaattcaaggatgttcttgataacacagttgttgcagcattgtctcattcttctgctcatgttcgtgtggaggcagctttaacattgcgtgctttagcagaggttgatcctacttgtgtaggtggtttagtttcatatggtcttacaacattgcaagctctacgagagactgtatcatttgataagggcaaaagtttgaaccttgagctcgactcactacatggacaggccactgtgttagctgctcttgttgcaatatcaccaaagttgcttcttggttatcctgcgaggctgcccaagtctgtacttgaattatccaaaaaaatgctgaatggtttcagtcgaaatccagtggctgctattgcagagcgtgaagctggttggttgctattagcttctcttctagcatccatgccaaaagaggagctggaagaccaggtgtttgatgttcttttgctatgggcgggtccttttactggaaatcctgaatcttaccttcgtcatatacaggattgggcatcagaattgcgggttctgtcagttgcagttgaggcgcttactgccttcataagaagttttgtttatccatctatcacaactactgattgtggaatcttgcttaatcctgtacttgcctaccttggcggagctctatccctcatatcttcgttgagatctaaacaagtgcccaatgtaaggtctgcgctggacctactcacaactagaacattgatggcttattggtccctttcgaatccagtggtatataaaactgagcaccagcagatacttcagctatgctcaagtccgttcagtgatccttctggatgggaagaaagctcatgcttgaagtttttgttggataagagagatgcttcactgggcccatggatacctggaagggattcatttgaggatgaattacgtgcttttgatggtggtgctgatgggtttctaccgtgtgtgtgggatgatgaaatcagcaacttccctcagccagagtcaattcggaaaatgctcgtcaaccagatgcttctctgttatggttccatatttgcatgtcaggaaaacactgtcaagataagcctcttgaacaatcttgaccagtgcctgaagtctgggaagaagtacctgtggtttaagtttctcattacaaatgcatgtgttgctctattgtcagggttaaaggaattcctcgctttacgtggtgctcaatcattgccaattgatatattaagtatgattcagtccattttcaaggccattttagtagagcctgaaatttctacagcacagcggcgagcagcgtgcgagggtctcggtttattagcacgagctgggaatgatatctttacagcaaggatggctcgctctcttctcggagagctggtaacaacaacagatctgagctatacaacttctgttgcattttcattgggttgcatccatcgaagtgctggaggaatggcattatctactctggttaccccaactgtgagctcactatctcatttgagtaaaagctctaatttcaatctgcagttgtggtcactgcatgctcttcttttaacaattgaagctgctggcttgtcttatgtctcgcaagttcaggggacacttttccttgctatggagattctcctcttggaagaaaatggatatgttgatcttcgacaaggaattggtcatcttattaatgcaatagttgctgttattggtccagagcttgctcctgatagcacattcttttcacgatgcaagtctgttattgcagagataagttcatcaaatgaaatggctacacttttagaatcggttagattctcccagcagcttgtgctttttgctcctcaagctgttcctgtgcacttgcacgttcaaggtcttatcccaatgctttactcaagacagccaagtcttagatatttagcagtgtcgacactgcaccatctgattgaaagggacccggctgcaatgattgacgagaatattgaagagaatctgttcagtatgcttgatgaggagaccgattcagaaacagcgatgttggttcgtgcaactattattcgcttattgtatacatcatgtccagtatgtccatcacggtggctggcagttttacgaaatattgttcttgctacgtcaattagaagaaacacaggtgaagttctgtcatgttttgggcataatcctcctgatagtacatctgagaatgatgtgtactatggagaagatgaagacaacatgatttccagctcaaagcagcagcaaatccgctgtgctggttctatatccagccagtttcctccaaggaataaacacctcagatatcgtaccagggtttttgctgcagaatgcgttagccatgtaccaattgcagttggagcagaacctgctcattttgacctcttgttggcaaggagcgcaatatctcaaggcacttatttgtcaaatgattggctagtgcttaaactacaggaactggtctcactttcataccagattagtactgggcaatttgaaggaatgcaaccaataggtgtgaagcttttgtgtttgataatggacaagttcggcaaggcagtagatccggaatttcctggccatatcttgctggaacaatttcaggcccaacttgtttctgctgttagaatggctataagcactgcttctggtccacttcttttggaggctggacttgaactcgctacaagggtgttatgacgagcagcataattggtggggatagactagctcttagtcgcttgttttctctgataacacgcccgttaagtgacatagagggcctactatatccatcttttgctgactgggtagtgtgcaagataaaagttcgccttctaactgcccatgcagcagtcaagtgtaacacctatcaattcttgaggatgagggaaaatgctcctaatgaataccagcaattggcaccttcacttgtaaacagttcaactctattaggaaaatactggattcgagcactcaaggattatgtttctataagttttggtttgcactcaaaaatcaattacaagccattccttgatgggattcagtcattattagtcttgtccaaggtgcagaggtatcttgatgaagtttggttattaattcttaaagcaacagctcttgatgccgcgcctttggattttgatgagaataatcctaaaaatttactcgaacaaacatttatatctgggcattgtatggtcaaattggacagaactgaattccaatttctttgggggttatctatccttgtgctgttccattcctgccaatcaatgaagaataattctttgaagatcaaccttgactttaaacaagacaaaaactttggggaatttattgttcatggacttgatgacaaaagaccgtgtgatcaggtcttacgcgtgctttcgtccctcacaacagaagtctttttcagcaataattttatttcagtggatatttgccagcaactcctccaggcacttacatatgcagattgttcaagcgctcctatcatccacctattcacccagattatcagattctgccctgacaatttttttgaggttgaagcctttgtcttctctgcaatagagttattgtctcagtatctgggtctgatacttcaatgtagggatgggagttctcagaataattcaagtaacactttgatttctgagttgtctattgcaagcgagacgatggcttatcggatcaaaggagagtatttgtggaagctggtgatgttagtggtatctacttcacaccaatcatttcaacaagtttcaactaatttatgcttctcaaatattatatgcttcctccaaaatatcttccctttcatgaggaaaatttttagagaaagagtcgaatcagatggtgagtgcacaagtcctaaagttgtctttggtgctatggttggcctagtgggatacttctatgtagagtgtgataaaaagatctcattgctcgaaaacaagatttctgattcctacaagctgttgaataagatactacttttttgcttgggagaagccactgctcttgcaaaacttgttcctgagatcatttatcgaagtgaaaatgtaagtaacaatgatgtgctcctttggggcagcttcaggctgtgcgtacaggttattcaaggttcatttcgtagtaccaacatacaggtgcacatgctgggtctgcaagtactgagaagctatgcacagaaggagctaactgaaggttcagaaacaaagttggattcttttatgatgttgcttacggaattgttgggagacttgtttttggtgatggagactacattgaaggaatgttcaaacaaaaaatctgtcagtgtcgttgatgaatgtttgaaacttgttttcctcttccacacactagcacaatcaaagaaataccgacaagatgctacaactcttctgctggaggccttgctgatggttttctctctgtccagtgatactgtttcacaggagcttgctgaagtgaacaccatttccagaaagttgttctctcattttattcagattccgtctgtggctatacagatcaaagacataatgctttctgcaccagctgaaaggagactacagcttcaggacatggtccgagcttcagtcagtcaagggcagataacggtgccagtggctacgagtgcacactcagaacagaatattcaggatagttgcagtaaaaaccctgggtccacatctgaagcttctgattgtgttgcaactcacgggaataatgacaatgaagttgttgatgatgactgggatgacgattgggatgctttccaatctcttcctgcaattgcaaatgatggtgttgattctggagaaatctctcttacaactaggtacaatgaacagatccctcaagaaaatagcagttacggttcttgtaatgcggatattacagctcgtgctatggaagacataacttgtgtggacaaggaacttgaggagccctctgatttgcaattctcaagtactgaacaacagcctaaacatgatttaccagggtcatcccacgaaggttgtgctaaacttgaaagacatccatctgttgattgcaaagagcaattagctgatgatgagacagcagatgaactgcagcagcaggttcatgaagacactgatcatgtaaataaagatagcgaagttctctctgcagaaattcatggggttaaattggatatccttgatgaagatgttgaagatgattccccaatgaattcaaacaatctatcagatatcgcagaggaagagtcctagggttggtacaatgcaacgagggtggaccgcaagcttgtcgagatagtagagaagagctgtccggttcctctgatgctggcataccagattttagtatgtcaggacacgtgatgagcaagagcggaggaaatgagcaaaatgttattttgcctgtatcaatatatattgcacgagataaaaataatataaggttacaaccatgatttttattttgtgccttcctccgcccctccgcttctaaataaatagttacctttgaatgaatttcaagaaaacccaatcaagacttatgacatcaaattaatatcattaaatctaacatagaatatat

SEQ ID NO: 80166 - DNA, 6985 bp, Zea Mays
ccagagtccaaaatcaccctgctctacaccgcaagtcccagatctcggttgaacaagacaacactcgagcaccagtgacgcattccctctcccaccctctaggcccctaccctcccatggcgaagggcgtcggtggcggggatcccataccgctgtcgcggttcggcgcgctggtggcccagctggagtccgtagtggcatcggccaggcagaagacccccgacgcgctgctctgcttcgacctcctctccgagctctcctctgccatcgacgaggcccccaaggagaccatacaactttggcaaaggaaatgtgaggatgctctccaatccttgctcgtccttgggacacgacgtccagttcggcgcttggcgtcatcagcgatgggccgaattatcgagaaaggcgatgtgatatctgtatattcaagggcaagtaacttgcaggggtggttggtcgatgtgaaaagggctgaggccactgcatgtgcaggtgcagcacaatgtctgggggaaatttaccgtttatttggacgcaagattactgcagggctgattgagacatcaagcattgtagctaaactcatgaagtatcatgaggactttgtgagacaagatgctcttctcttgcttgagaatgcattggaaggctcaggtggtggtggtgctgctgcagcttatcaagaggcttttcgtatcatcatgcgaggtgtaagtgataaatcgttcattgtcagagcagcggcagcacgttgcttgaaggcatttgctaatattggtgggcctgcattggggatggctgatttcgattcttctatgtcttattgtgtgaagggtttggaagatagtgtatcttcagttagagattcatttgccgaagcacttggtgccatacttgctcttgcagtgaatccagatgcccaggtgaagaaaggcgggaaaaaacaaactgcttctgcaaagaaaattgaagatggtgtgcagaagcatttgattgtgccatttgtcaaagcaaatggagcaaatgcaaaggaactccggattggtttgactttatcatgggtgttctttctgcatatgattcatatgaagtatggcaccccagatagcgaacttcaaaattatgccatacaaacgatggaaattctccaggggaatgattcccttgatccacatgcgctggcatgcgttctgtatgttcttcgagttggtgtcgcggatcagatgactgagctgacacaacgcgattttttgctatttctgggaagaaagctggagtctttgaactacacagctgcaacgagagtggcaacactacgcattttgtgttacctattgagaagcgttggtgaggttccagctgaattcaaggatgttcttgataacacagttgttgcagcattgtctcattcttctgctcatgttcgtgtggaggcagctttaacattgcgtgctttagcagaggttgatcctacttgtgtaggtggtttagtttcatatggtcttacaacattgcaagctctacgagagactgtatcatttgataagggcaaaagtttgaaccttgagctcgactcactacatggacaggccactgtgttagctgctcttgttgcaatatcaccaaagttgcttcttggttatcctgcgaggctgcccaagtctgtacttgaattatccaaaaaaatgctgaatggtttcagtcgaaatccagtggctgctattgcagagcgtgaagctggttggttgctattagcttctcttctagcatccatgccaaaagaggagctggaagaccaggtgtttgatgttcttttgctatgggcgggtccttttactggaaatcctgaatcttaccttcgtcatatacaggattgggcatcagaattgcgggttctgtcagttgcagttgaggcgcttactgccttcataagaagttttgtttatccatctatcacaactactgattgtggaatcttgcttaatcctgtacttgcctaccttggcggagctctatccctcatatcttcgttgagatctaaacaagtgcccaatgtaaggtctgcgctggacctactcacaactagaacattgatggcttattggtccctttcgaatccagtggtatataaaactgagcaccagcagatacttcagctatgctcaagtccgttcagtgatccttctggatgggaagaaagctcatgcttgaagtttttgttggataagagagatgcttcactgggcccatggatacctggaagggattcatttgaggatgaattacgtgcttttgatggtggtgctgatgggtttctaccgtgtgtgtgggatgatgaaatcagcaacttccctcagccagagtcaattcggaaaatgctcgtcaaccagatgcttctctgttatggttccatatttgcatgtcaggaaaacactgtcaagataagcctcttgaacaatcttgaccagtgcctgaagtctgggaagaagtacctgtggtttaagtttctcattacaaatgcatgtgttgctctattgtcagggttaaaggaattcctcgctttacgtggtgctcaatcattgccaattgatatattaagtatgattcagtccattttcaaggccattttagtagagcctgaaatttctacagcacagcggcgagcagcgtgcgagggtctcggtttattagcacgagctgggaatgatatctttacagcaaggatggctcgctctcttctcggagagctggtaacaacaacagatctgagctatacaacttctgttgcattttcattgggttgcatccatcgaagtgctggaggaatggcattatctactctggttaccccaactgtgagctcactatctcatttgagtaaaagctctaatttcaatctgcagttgtggtcactgcatgctcttcttttaacaattgaagctgctggcttgtcttatgtctcgcaagttcaggggacacttttccttgctatggagattctcctcttggaagaaaatggatatgttgatcttcgacaaggaattggtcatcttattaatgcaatagttgctgttattggtccagagcttgctcctgatagcacattcttttcacgatgcaagtctgttattgcagagataagttcatcaaatgaaatggctacacttttagaatcggttagattctcccagcagcttgtgctttttgctcctcaagctgttcctgtgcacttgcacgttcaaggtcttatcccaatgctttactcaagacagccaagtcttagatatttagcagtgtcgacactgcaccatctgattgaaagggacccggctgcaatgattgacgagaatattgaagagaatctgttcagtatgcttgatgaggagaccgattcagaaacagcgatgttggttcgtgcaactattattcgcttattgtatacatcatgtccagtatgtccatcacggtggctggcagttttacgaaatattgttcttgctacgtcaattagaagaaacacaggtgaagttctgtcatgttttgggcataatcctcctgatagtacatctgagaatgatgtgtactatggagaagatgaagacaacatgatttccagctcaaagcagcagcaaatccgctgtgctggttctatatccagccagtttcctccaaggaataaacacctcagatatcgtaccagggtttttgctgcagaatgcgttagccatgtaccaattgcagttggagcagaacctgctcattttgacctcttgttggcaaggagcgcaatatctcaaggcacttatttgtcaaatgattggctagtgcttaaactacaggaactggtctcactttcataccagattagtactgggcaatttgaaggaatgcaaccaataggtgtgaagcttttgtgtttgataatggacaagttcggcaaggcagtagatccggaatttcctggccatatcttgctggaacaatttcaggcccaacttgtttctgctgttagaatggctataagcactgcttctggtccacttcttttggaggctggacttgaactcgctacaagggttatgacgagcagcataattggtggggatagactagctcttagtcgcttgttttctctgataacacgcccgttaagtgacatagagggcctactatatccatcttttgctgactgggtagtgtgcaagataaaagttcgccttctaactgcccatgcagcagtcaagtgtaacacctatcaattcttgaggatgagggaaaatgctcctaatgaataccagcaattggcaccttcacttgtaaacagttcaactctattaggaaaatactggattcgagcactcaaggattatgtttctataagttttggtttgcactcaaaaatcaattacaagccattccttgatgggattcagtcattattagtcttgtccaaggtgcagaggtatcttgatgaagtttggttattaattcttaaagcaacagctcttgatgccgcgcctttggattttgatgagaataatcctaaaaatttactcgaacaaacatttatatctgggcattgtatggtcaaattggacagaactgaattccaatttctttgggggttatctatccttgtgctgttccattcctgccaatcaatgaagaataattctttgaagatcaaccttgactttaaacaagacaaaaactttggggaatttattgttcatggacttgatgacaaaagaccgtgtgatcaggtcttacgcgtgctttcgtccctcacaacagaagtctttttcagcaataattttatttcagtggatatttgccagcaactcctccaggcacttacatatgcagattgttcaagcgctcctatcatccacctattcacccagattatcagattctgccctgacaatttttttgaggttgaagcctttgtcttctctgcaatagagttattgtctcagtatctgggtctgatacttcaatggggatgggagttctcagaataattcaagtaacactttgatttctgagttgtctattgcaagcgagacgatggcttatcggatcaaaggagagtatttgtggaagctggtgatgttagtggtatctacttcacaccaatcatttcaacaagtttcaactaatttatgcttctcaaatattatatgcttcctccaaaatatcttccctttcatgaggaaaatttttagagaaagagtcgaatcagatggtgagtgcacaagtcctaaagttgtctttggtgctatggttggcctagtgggatacttctatgtagagtgtgataaaaagatctcattgctcgaaaacaagatttctgattcctacaagctgttgaataagatactacttttttgcttgggagaagccactgctcttgcaaaacttgttcctgagatcatttatcgaagtgaaaatgtaagtaacaatgatgtgctcctttggggcagcttcaggctgtgcgtacaggttattcaaggttcatttcgtagtaccaacatacaggtgcacatgctgggtctgcaagtactgagaagctatgcacagaaggagctaactgaaggttcagaaacaaagttggattcttttatgatgttgcttacggaattgttgggagacttgtttttggtgatggagactacattgaaggaatgttcaaacaaaaaatctgtcagtgtcgttgatgaatgtttgaaacttgttttcctcttccacacactagcacaatcaaagaaataccgacaagatgctacaactcttctgctggaggccttgctgatggttttctctctgtccagtgatactgtttcacaggagcttgctgaagtgaacaccatttccagaaagttgttctctcattttattcagattccgtctgtggctatacagatcaaagacataatgctttctgcaccagctgaaaggagactacagcttcaggacatggtccgagcttcagtcagtcaagggcagataacggtgccagtggctacgagtgcacactcagaacagaatattcaggatagttgcagtaaaaaccctgggtccacatctgaagcttctgattgtgttgcaactcacgggaataatgacaatgaagttgttgatgatgactgggatgacgattgggatgctttccaatctcttcctgcaattgcaaatgatggtgttgattctggagaaatctctcttacaactaggtacaatgaacagatccctcaagaaaatagcagttacggttcttgtaatgcggatattacagctcgtgctatggaagacataacttgtgtggacaaggaacttgaggagccctctgatttgcaattctcaagtactgaacaacagcctaaacatgatttaccagggtcatcccacgaaggttgtgctaaacttgaaagacatccatctgttgattgcaaagagcaattagctgatgatgagacagcagatgaactgcagcagcaggttcatgaagacactgatcatgtaaataaagatagcgaagttctctctgcagaaattcatggggttaaattggatatccttgatgaagatgttgaagatgattccccaatgaattcaaacaatctatcagatatcgcagaggaagagtcctagggttggtacaatgcaacgagggtggaccgcaagcttgtcgagatagtagagaagagctgtccggttcctctgatgctggcataccagattttagtatgtcaggacacgtgatgagcaagagcggaggaaatgagcaaaatgttattttgcctgtatcaatatatattgcacgagataaaaataatataaggttacaaccatgatttttattttgtgccttcctccgcccctccgcttctaaataaatagttacctttgaatgaatttcaagaaaacccaatcaagacttatgacatcaaattaatatcattaaatctaacatagaatatat

SEQ ID NO: 80167 - DNA, 7010 bp, Zea Mays
ccagagtccaaaatcaccctgctctacaccgcaagtcccagatctcggttgaacaagacaacactcgagcaccagtgacgcattccctctcccaccctctaggcccctaccctcccatggcgaagggcgtcggtggcggggatcccataccgctgtcgcggttcggcgcgctggtggcccagctggagtccgtagtggcatcggccaggcagaagacccccgacgcgctgctctgcttcgacctcctctccgagctctcctctgccatcgacgaggcccccaaggagaccatacaactttggcaaaggaaatgtgaggatgctctccaatccttgctcgtccttgggacacgacgtccagttcggcgcttggcgtcatcagcgatgggccgaattatcgagaaaggcgatgtgatatctgtatattcaagggcaagtaacttgcaggggtggttggtcgatgtgaaaagggctgaggccactgcatgtgcaggtgcagcacaatgtctgggggaaatttaccgtttatttggacgcaagattactgcagggctgattgagacatcaagcattgtagctaaactcatgaagtatcatgaggttgtatgcttcactgcgattctgactttgtgagacaagatgctcttctcttgcttgagaatgcattggaaggctcaggtggtggtggtgctgctgcagcttatcaagaggcttttcgtatcatcatgcgaggtgtaagtgataaatcgttcattgtcagagcagcggcagcacgttgcttgaaggcatttgctaatattggtgggcctgcattggggatggctgatttcgattcttctatgtcttattgtgtgaagggtttggaagatagtgtatcttcagttagagattcatttgccgaagcacttggtgccatacttgctcttgcagtgaatccagatgcccaggtgaagaaaggcgggaaaaaacaaactgcttctgcaaagaaaattgaagatggtgtgcagaagcatttgattgtgccatttgtcaaagcaaatggagcaaatgcaaaggaactccggattggtttgactttatcatgggtgttctttctgcatatgattcatatgaagtatggcaccccagatagcgaacttcaaaattatgccatacaaacgatggaaattctccaggggaatgattcccttgatccacatgcgctggcatgcgttctgtatgttcttcgagttggtgtcgcggatcagatgactgagctgacacaacgcgattttttgctatttctgggaagaaagctggagtctttgaactacacagctgcaacgagagtggcaacactacgcattttgtgttacctattgagaagcgttggtgaggttccagctgaattcaaggatgttcttgataacacagttgttgcagcattgtctcattcttctgctcatgttcgtgtggaggcagctttaacattgcgtgctttagcagaggttgatcctacttgtgtaggtggtttagtttcatatggtcttacaacattgcaagctctacgagagactgtatcatttgataagggcaaaagtttgaaccttgagctcgactcactacatggacaggccactgtgttagctgctcttgttgcaatatcaccaaagttgcttcttggttatcctgcgaggctgcccaagtctgtacttgaattatccaaaaaaatgctgaatggtttcagtcgaaatccagtggctgctattgcagagcgtgaagctggttggttgctattagcttctcttctagcatccatgccaaaagaggagctggaagaccaggtgtttgatgttcttttgctatgggcgggtccttttactggaaatcctgaatcttaccttcgtcatatacaggattgggcatcagaattgcgggttctgtcagttgcagttgaggcgcttactgccttcataagaagttttgtttatccatctatcacaactactgattgtggaatcttgcttaatcctgtacttgcctaccttggcggagctctatccctcatatcttcgttgagatctaaacaagtgcccaatgtaaggtctgcgctggacctactcacaactagaacattgatggcttattggtccctttcgaatccagtggtatataaaactgagcaccagcagatacttcagctatgctcaagtccgttcagtgatccttctggatgggaagaaagctcatgcttgaagtttttgttggataagagagatgcttcactgggcccatggatacctggaagggattcatttgaggatgaattacgtgcttttgatggtggtgctgatgggtttctaccgtgtgtgtgggatgatgaaatcagcaacttccctcagccagagtcaattcggaaaatgctcgtcaaccagatgcttctctgttatggttccatatttgcatgtcaggaaaacactgtcaagataagcctcttgaacaatcttgaccagtgcctgaagtctgggaagaagtacctgtggtttaagtttctcattacaaatgcatgtgttgctctattgtcagggttaaaggaattcctcgctttacgtggtgctcaatcattgccaattgatatattaagtatgattcagtccattttcaaggccattttagtagagcctgaaatttctacagcacagcggcgagcagcgtgcgagggtctcggtttattagcacgagctgggaatgatatctttacagcaaggatggctcgctctcttctcggagagctggtaacaacaacagatctgagctatacaacttctgttgcattttcattgggttgcatccatcgaagtgctggaggaatggcattatctactctggttaccccaactgtgagctcactatctcatttgagtaaaagctctaatttcaatctgcagttgtggtcactgcatgctcttcttttaacaattgaagctgctggcttgtcttatgtctcgcaagttcaggggacacttttccttgctatggagattctcctcttggaagaaaatggatatgttgatcttcgacaaggaattggtcatcttattaatgcaatagttgctgttattggtccagagcttgctcctgatagcacattcttttcacgatgcaagtctgttattgcagagataagttcatcaaatgaaatggctacacttttagaatcggttagattctcccagcagcttgtgctttttgctcctcaagctgttcctgtgcacttgcacgttcaaggtcttatcccaatgctttactcaagacagccaagtcttagatatttagcagtgtcgacactgcaccatctgattgaaagggacccggctgcaatgattgacgagaatattgaagagaatctgttcagtatgcttgatgaggagaccgattcagaaacagcgatgttggttcgtgcaactattattcgcttattgtatacatcatgtccagtatgtccatcacggtggctggcagttttacgaaatattgttcttgctacgtcaattagaagaaacacaggtgaagttctgtcatgttttgggcataatcctcctgatagtacatctgagaatgatgtgtactatggagaagatgaagacaacatgatttccagctcaaagcagcagcaaatccgctgtgctggttctatatccagccagtttcctccaaggaataaacacctcagatatcgtaccagggtttttgctgcagaatgcgttagccatgtaccaattgcagttggagcagaacctgctcattttgacctcttgttggcaaggagcgcaatatctcaaggcacttatttgtcaaatgattggctagtgcttaaactacaggaactggtctcactttcataccagattagtactgggcaatttgaaggaatgcaaccaataggtgtgaagcttttgtgtttgataatggacaagttcggcaaggcagtagatccggaatttcctggccatatcttgctggaacaatttcaggcccaacttgtttctgctgttagaatggctataagcactgcttctggtccacttcttttggaggctggacttgaactcgctacaagggttatgacgagcagcataattggtggggatagactagctcttagtcgcttgttttctctgataacacgcccgttaagtgacatagagggcctactatatccatcttttgctgactgggtagtgtgcaagataaaagttcgccttctaactgcccatgcagcagtcaagtgtaacacctatcaattcttgaggatgagggaaaatgctcctaatgaataccagcaattggcaccttcacttgtaaacagttcaactctattaggaaaatactggattcgagcactcaaggattatgtttctataagttttggtttgcactcaaaaatcaattacaagccattccttgatgggattcagtcattattagtcttgtccaaggtgcagaggtatcttgatgaagtttggttattaattcttaaagcaacagctcttgatgccgcgcctttggattttgatgagaataatcctaaaaatttactcgaacaaacatttatatctgggcattgtatggtcaaattggacagaactgaattccaatttctttgggggttatctatccttgtgctgttccattcctgccaatcaatgaagaataattctttgaagatcaaccttgactttaaacaagacaaaaactttggggaatttattgttcatggacttgatgacaaaagaccgtgtgatcaggtcttacgcgtgctttcgtccctcacaacagaagtctttttcagcaataattttatttcagtggatatttgccagcaactcctccaggcacttacatatgcagattgttcaagcgctcctatcatccacctattcacccagattatcagattctgccctgacaatttttttgaggttgaagcctttgtcttctctgcaatagagttattgtctcagtatctgggtctgatacttcaatgtagggatgggagttctcagaataattcaagtaacactttgatttctgagttgtctattgcaagcgagacgatggcttatcggatcaaaggagagtatttgtggaagctggtgatgttagtggtatctacttcacaccaatcatttcaacaagtttcaactaatttatgcttctcaaatattatatgcttcctccaaaatatcttccctttcatgaggaaaatttttagagaaagagtcgaatcagatggtgagtgcacaagtcctaaagttgtctttggtgctatggttggcctagtgggatacttctatgtagagtgtgataaaaagatctcattgctcgaaaacaagatttctgattcctacaagctgttgaataagatactacttttttgcttgggagaagccactgctcttgcaaaacttgttcctgagatcatttatcgaagtgaaaatgtaagtaacaatgatgtgctcctttggggcagcttcaggctgtgcgtacaggttattcaaggttcatttcgtagtaccaacatacaggtgcacatgctgggtctgcaagtactgagaagctatgcacagaaggagctaactgaaggttcagaaacaaagttggattcttttatgatgttgcttacggaattgttgggagacttgtttttggtgatggagactacattgaaggaatgttcaaacaaaaaatctgtcagtgtcgttgatgaatgtttgaaacttgttttcctcttccacacactagcacaatcaaagaaataccgacaagatgctacaactcttctgctggaggccttgctgatggttttctctctgtccagtgatactgtttcacaggagcttgctgaagtgaacaccatttccagaaagttgttctctcattttattcagattccgtctgtggctatacagatcaaagacataatgctttctgcaccagctgaaaggagactacagcttcaggacatggtccgagcttcagtcagtcaagggcagataacggtgccagtggctacgagtgcacactcagaacagaatattcaggatagttgcagtaaaaaccctgggtccacatctgaagcttctgattgtgttgcaactcacgggaataatgacaatgaagttgttgatgatgactgggatgacgattgggatgctttccaatctcttcctgcaattgcaaatgatggtgttgattctggagaaatctctcttacaactaggtacaatgaacagatccctcaagaaaatagcagttacggttcttgtaatgcggatattacagctcgtgctatggaagacataacttgtgtggacaaggaacttgaggagccctctgatttgcaattctcaagtactgaacaacagcctaaacatgatttaccagggtcatcccacgaaggttgtgctaaacttgaaagacatccatctgttgattgcaaagagcaattagctgatgatgagacagcagatgaactgcagcagcaggttcatgaagacactgatcatgtaaataaagatagcgaagttctctctgcagaaattcatggggttaaattggatatccttgatgaagatgttgaagatgattccccaatgaattcaaacaatctatcagatatcgcagaggaagagtcctagggttggtacaatgcaacgagggtggaccgcaagcttgtcgagatagtagagaagagctgtccggttcctctgatgctggcataccagattttagtatgtcaggacacgtgatgagcaagagcggaggaaatgagcaaaatgttattttgcctgtatcaatatatattgcacgagataaaaataatataaggttacaaccatgatttttattttgtgccttcctccgcccctccgcttctaaataaatagttacctttgaatgaatttcaagaaaacccaatcaagacttatgacatcaaattaatatcattaaatctaacatagaatatat

SEQ ID NO: 80168 - DNA, 6957 bp, Zea Mays
atggcgaagggcgtcggtggcggggatcccataccgctgtcgcggttcggcgcgctggtggcccagctggagtccgtagtggcatcggccaggcagaagacccccgacgcgctgctctgcttcgacctcctctccgagctctcctctgccatcgacgaggcccccaaggagaccatacaactttggcaaaggaaatgtgaggatgctctccaatccttgctcgtccttgggacacgacgtccagttcggcgcttggcgtcatcagcgatgggccgaattatcgagaaaggcgatgtgatatctgtatattcaagggcaagtaacttgcaggggtggttggtcgatgtgaaaagggctgaggccactgcatgtgcaggtgcagcacaatgtctgggggaaatttaccgtttatttggacgcaagattactgcagggctgattgagacatcaagcattgtagctaaactcatgaagtatcatgaggactttgtgagacaagatgctcttctcttgcttgagaatgcattggaaggctcaggtggtggtggtgctgctgcagcttatcaagaggcttttcgtatcatcatgcgaggtgtaagtgataaatcgttcattgtcagagcagcggcagcacgttgcttgaaggcatttgctaatattggtgggcctgcattggggatggctgatttcgattcttctatgtcttattgtgtgaagggtttggaagatagtgtatcttcagttagagattcatttgccgaagcacttggtgccatacttgctcttgcagtgaatccagatgcccaggtgaagaaaggcgggaaaaaacaaactgcttctgcaaagaaaattgaagatggtgtgcagaagcatttgattgtgccatttgtcaaagcaaatggagcaaatgcaaaggaactccggattggtttgactttatcatgggtgttctttctgcatatgattcatatgaagtatggcaccccagatagcgaacttcaaaattatgccatacaaacgatggaaattctccaggggaatgattcccttgatccacatgcgctggcatgcgttctgtatgttcttcgagttggtgtcgcggatcagatgactgagctgacacaacgcgattttttgctatttctgggaagaaagctggagtctttgaactacacagctgcaacgagagtggcaacactacgcattttgtgttacctattgagaagcgttggtgaggttccagctgaattcaaggatgttcttgataacacagttgttgcagcattgtctcattcttctgctcatgttcgtgtggaggcagctttaacattgcgtgctttagcagaggttgatcctacttgtgtaggtggtttagtttcatatggtcttacaacattgcaagctctacgagagactgtatcatttgataagggcaaaagtttgaaccttgagctcgactcactacatggacaggccactgtgttagctgctcttgttgcaatatcaccaaagttgcttcttggttatcctgcgaggctgcccaagtctgtacttgaattatccaaaaaaatgctgaatggtttcagtcgaaatccagtggctgctattgcagagcgtgaagctggttggttgctattagcttctcttctagcatccatgccaaaagaggagctggaagaccaggtgtttgatgttcttttgctatgggcgggtccttttactggaaatcctgaatcttaccttcgtcatatacaggattgggcatcagaattgcgggttctgtcagttgcagttgaggcgcttactgccttcataagaagttttgtttatccatctatcacaactactgattgtggaatcttgcttaatcctgtacttgcctaccttggcggagctctatccctcatatcttcgttgagatctaaacaagtgcccaatgtaaggtctgcgctggacctactcacaactagaacattgatggcttattggtccctttcgaatccagtggtatataaaactgagcaccagcagatacttcagctatgctcaagtccgttcagtgatccttctggatgggaagaaagctcatgcttgaagtttttgttggataagagagatgcttcactgggcccatggatacctggaagggattcatttgaggatgaattacgtgcttttgatggtggtgctgatgggtttctaccgtgtgtgtgggatgatgaaatcagcaacttccctcagccagagtcaattcggaaaatgctcgtcaaccagatgcttctctgttatggttccatatttgcatgtcaggaaaacactgtcaagataagcctcttgaacaatcttgaccagtgcctgaagtctgggaagaagtacctgtggtttaagtttctcattacaaatgcatgtgttgctctattgtcagggttaaaggaattcctcgctttacgtggtgctcaatcattgccaattgatatattaagtatgattcagtccattttcaaggccattttagtagagcctgaaatttctacagcacagcggcgagcagcgtgcgagggtctcggtttattagcacgagctgggaatgatatctttacagcaaggatggctcgctctcttctcggagagctggtaacaacaacagatctgagctatacaacttctgttgcattttcattgggttgcatccatcgaagtgctggaggaatggcattatctactctggttaccccaactgtgagctcactatctcatttgagtaaaagctctaatttcaatctgcagttgtggtcactgcatgctcttcttttaacaattgaagctgctggcttgtcttatgtctcgcaagttcaggggacacttttccttgctatggagattctcctcttggaagaaaatggatatgttgatcttcgacaaggaattggtcatcttattaatgcaatagttgctgttattggtccagagcttgctcctgatagcacattcttttcacgatgcaagtctgttattgcagagataagttcatcaaatgaaatggctacacttttagaatcggttagattctcccagcagcttgtgctttttgctcctcaagctgttcctgtgcacttgcacgttcaaggtcttatcccaatgctttactcaagacagccaagtcttagatatttagcagtgtcgacactgcaccatctgattgaaagggacccggctgcaatgattgacgagaatattgaagagaatctgttcagtatgcttgatgaggagaccgattcagaaacagcgatgttggttcgtgcaactattattcgcttattgtatacatcatgtccagtatgtccatcacggtggctggcagttttacgaaatattgttcttgctacgtcaattagaagaaacacaggtgaagttctgtcatgttttgggcataatcctcctgatagtacatctgagaatgatgtgtactatggagaagatgaagacaacatgatttccagctcaaagcagcagcaaatccgctgtgctggttctatatccagccagtttcctccaaggaataaacacctcagatatcgtaccagggtttttgctgcagaatgcgttagccatgtaccaattgcagttggagcagaacctgctcattttgacctcttgttggcaaggagcgcaatatctcaaggcacttatttgtcaaatgattggctagtgcttaaactacaggaactggtctcactttcataccagattagtactgggcaatttgaaggaatgcaaccaataggtgtgaagcttttgtgtttgataatggacaaggtctcagacatggaatatgagcaatcaacaattattttatttatattgagttgcatgcaccaatcagttcaactcaaaagcttaagttcggcaaggcagtagatccggaatttcctggccatatcttgctggaacaatttcaggcccaacttgtttctgctgttagaatggctataagcactgcttctggtccacttcttttggaggctggacttgaactcgctacaagggttatgacgagcagcataattggtggggatagactagctcttagtcgcttgttttctctgataacacgcccgttaagtgacatagagggcctactatatccatcttttgctgactgggtagtgtgcaagataaaagttcgccttctaactgcccatgcagcagtcaagtgtaacacctatcaattcttgaggatgagggaaaatgctcctaatgaataccagcaattggcaccttcacttgtaaacagttcaactctattaggaaaatactggattcgagcactcaaggattatgtttctataagttttggtttgcactcaaaaatcaattacaagccattccttgatgggattcagtcattattagtcttgtccaaggtgcagaggtatcttgatgaagtttggttattaattcttaaagcaacagctcttgatgccgcgcctttggattttgatgagaataatcctaaaaatttactcgaacaaacatttatatctgggcattgtatggtcaaattggacagaactgaattccaatttctttgggggttatctatccttgtgctgttccattcctgccaatcaatgaagaataattctttgaagatcaaccttgactttaaacaagacaaaaactttggggaatttattgttcatggacttgatgacaaaagaccgtgtgatcaggtcttacgcgtgctttcgtccctcacaacagaagtctttttcagcaataattttatttcagtggatatttgccagcaactcctccaggcacttacatatgcagattgttcaagcgctcctatcatccacctattcacccagattatcagattctgccctgacaatttttttgaggttgaagcctttgtcttctctgcaatagagttattgtctcagtatctgggtctgatacttcaatgtagggatgggagttctcagaataattcaagtaacactttgatttctgagttgtctattgcaagcgagacgatggcttatcggatcaaaggagagtatttgtggaagctggtgatgttagtggtatctacttcacaccaatcatttcaacaagtttcaactaatttatgcttctcaaatattatatgcttcctccaaaatatcttccctttcatgaggaaaatttttagagaaagagtcgaatcagatggtgagtgcacaagtcctaaagttgtctttggtgctatggttggcctagtgggatacttctatgtagagtgtgataaaaagatctcattgctcgaaaacaagatttctgattcctacaagctgttgaataagatactacttttttgcttgggagaagccactgctcttgcaaaacttgttcctgagatcatttatcgaagtgaaaatgtaagtaacaatgatgtgctcctttggggcagcttcaggctgtgcgtacaggttattcaaggttcatttcgtagtaccaacatacaggtgcacatgctgggtctgcaagtactgagaagctatgcacagaaggagctaactgaaggttcagaaacaaagttggattcttttatgatgttgcttacggaattgttgggagacttgtttttggtgatggagactacattgaaggaatgttcaaacaaaaaatctgtcagtgtcgttgatgaatgtttgaaacttgttttcctcttccacacactagcacaatcaaagaaataccgacaagatgctacaactcttctgctggaggccttgctgatggttttctctctgtccagtgatactgtttcacaggagcttgctgaagtgaacaccatttccagaaagttgttctctcattttattcagattccgtctgtggctatacagatcaaagacataatgctttctgcaccagctgaaaggagactacagcttcaggacatggtccgagcttcagtcagtcaagggcagataacggtgccagtggctacgagtgcacactcagaacagaatattcaggatagttgcagtaaaaaccctgggtccacatctgaagcttctgattgtgttgcaactcacgggaataatgacaatgaagttgttgatgatgactgggatgacgattgggatgctttccaatctcttcctgcaattgcaaatgatggtgttgattctggagaaatctctcttacaactaggtacaatgaacagatccctcaagaaaatagcagttacggttcttgtaatgcggatattacagctcgtgctatggaagacataacttgtgtggacaaggaacttgaggagccctctgatttgcaattctcaagtactgaacaacagcctaaacatgatttaccagggtcatcccacgaaggttgtgctaaacttgaaagacatccatctgttgattgcaaagagcaattagctgatgatgagacagcagatgaactgcagcagcaggttcatgaagacactgatcatgtaaataaagatagcgaagttctctctgcagaaattcatggggttaaattggatatccttgatgaagatgttgaagatgattccccaatgaattcaaacaatctatcagatatcgcagaggaagagtcctagggttggtacaatgcaacgagggtggaccgcaagcttgtcgagatagtagagaagagctgtccggttcctctgatgctggcataccagattttagtatgtcaggacacgtgatgagcaagagcggaggaaatgagcaaaatgttattttgcctgtatcaatatatattgcacgagataaaaataatataaggttacaaccatgatttttattttgtgccttcctccgcccctccgcttctaaataaatagttacctttgaatgaatttcaagaaaacccaatcaagacttatgacatcaaattaatatcattaaatctaacatagaatatat

SEQ ID NO: 80169 - DNA, 1320 bp, Zea Mays
atggactttgtgagacaagatgctcttctcttgcttgagaatgcattggaaggctcaggtggtggtggtgctgctgcagcttatcaagaggcttttcgtatcatcatgcgaggtgtaagtgataaatcgttcattgtcagagcagcggcagcacgttgcttgaaggcatttgctaatattggtgggcctgcattggggatggctgatttcgattcttctatgtcttattgtgtgaagggtttggaagatagtgtatcttcagttagagattcatttgccgaagcacttggtgccatacttgctcttgcagtgaatccagatgcccaggtgaagaaaggcgggaaaaaacaaactgcttctgcaaagaaaattgaagatggtgtgcagaagcatttgattgtgccatttgtcaaagcaaatggagcaaatgcaaaggaactccggattggtttgactttatcatgggtgttctttctgcatatgattcatatgaagtatggcaccccagatagcgaacttcaaaattatgccatacaaacgatggaaattctccaggggaatgattcccttgatccacatgcgctggcatgcgttctgtatgttcttcgagttggtgtcgcggatcagatgactgagctgacacaacgcgattttttgctatttctgggaagaaagaacacaatgggtaacaatgtgacatgggcagctgaaatcgaggacctagattggtggggcccaataaggcgctgggtcggactgggtccagtcaccgagggggtgggagacgttgagctggcccctggaaggggggtggaagccggcgaggggctggtggagaaggggttggggaggcgggcgcggttgggagctgaggagtccatgaacctagccattctaatagagacaaaacccaaaagtccaagactttgctcctgtgttccagctgaattcaaggatgttcttgataacacagttgttgcagcattgtctcattcttctgctcatgatatgcagctcttgcatgttcaagaaaaagacatgccaccacaatacaagaaagtcaatttttcattgatgttggtcggctgttcacattgtgcattaatgaaatgcaaacatgaaactggctacatgtcacatctatttttaatcatgttatcattttgttgtatcaagctggttcgtgtggaggcagctttaacattgcgtgctttagcagaggttgatcctacttgtgtaggtggtttagtttcatatggtcttacaacattgcaagctctacgagagactgtatcatttgataaggtcttctgcatataa

SEQ ID NO: 80170 - DNA, 3613 bp, Zea Mays
atggactttgtgagacaagatgctcttctcttgcttgagaatgcattggaaggctcaggtggtggtggtgctgctgcagcttatcaagaggcttttcgtatcatcatgcgaggtgtaagtgataaatcgttcattgtcagagcagcggcagcacgttgcttgaaggcatttgctaatattggtgggcctgcattggggatggctgatttcgattcttctatgtcttattgtgtgaagggtttggaagatagtgtatcttcagttagagattcatttgccgaagcacttggtgccatacttgctcttgcagtgaatccagatgcccaggtgaagaaaggcgggaaaaaacaaactgcttctgcaaagaaaattgaagatggtgtgcagaagcatttgattgtgccatttgtcaaagcaaatggagcaaatgcaaaggaactccggattggtttgactttatcatgggtgttctttctgcatatgattcatatgaagtatggcaccccagatagcgaacttcaaaattatgccatacaaacgatggaaattctccaggggaatgattcccttgatccacatgcgctggcatgcgttctgtatgttcttcgagttggtgtcgcggatcagatgactgagctgacacaacgcgattttttgctatttctgggaagaaagctggagtctttgaactacacagctgcaacgagagtggcaacactacgcattttgtgttacctattgagaagcgttggtgaggttccagctgaattcaaggatgttcttgataacacagttgttgcagcattgtctcattcttctgctcatgttcgtgtggaggcagctttaacattgcgtgctttagcagaggttgatcctacttgtgtaggtggtttagtttcatatggtcttacaacattgcaagctctacgagagactgtatcatttgataagggcaaaagtttgaaccttgagctcgactcactacatggacaggccactgtgttagctgctcttgttgcaatatcaccaaagttgcttcttggttatcctgcgaggctgcccaagtctgtacttgaattatccaaaaaaatgctgaatggtttcagtcgaaatccagtggctgctattgcagagcgtgaagctggttggttgctattagcttctcttctagcatccatgccaaaagaggagctggaagaccaggtgtttgatgttcttttgctatgggcgggtccttttactggaaatcctgaatcttaccttcgtcatatacaggattgggcatcagaattgcgggttctgtcagttgcagttgaggcgcttactgccttcataagaagttttgtttatccatctatcacaactactgattgtggaatcttgcttaatcctgtacttgcctaccttggcggagctctatccctcatatcttcgttgagatctaaacaagtgcccaatgtaaggtctgcgctggacctactcacaactagaacattgatggcttattggtccctttcgaatccagtggtatataaaactgagcaccagcagatacttcagctatgctcaagtccgttcagtgatccttctggatgggaagaaagctcatgcttgaagtttttgttggataagagagatgcttcactgggcccatggatacctggaagggattcatttgaggatgaattacgtgcttttgatggtggtgctgatgggtttctaccgtgtgtgtgggatgatgaaatcagcaacttccctcagccagagtcaattcggaaaatgctcgtcaaccagatgcttctctgttatggttccatatttgcatgtcaggaaaacactgtcaagataagcctcttgaacaatcttgaccagtgcctgaagtctgggaagaagtacctgtggtttaagtttctcattacaaatgcatgtgttgctctattgtcagggttaaaggaattcctcgctttacgtggtgctcaatcattgccaattgatatattaagtatgattcagtccattttcaaggccattttagtagagcctgaaatttctacagcacagcggcgagcagcgtgcgagggtctcggtttattagcacgagctgggaatgatatctttacagcaaggatggctcgctctcttctcggagagctggtaacaacaacagatctgagctatacaacttctgttgcattttcattgggttgcatccatcgaagtgctggaggaatggcattatctactctggttaccccaactgtgagctcactatctcatttgagtaaaagctctaatttcaatctgcagttgtggtcactgcatgctcttcttttaacaattgaagctgctggcttgtcttatgtctcgcaagttcaggggacacttttccttgctatggagattctcctcttggaagaaaatggatatgttgatcttcgacaaggaattggtcatcttattaatgcaatagttgctgttattggtccagagcttgctcctgatagcacattcttttcacgatgcaagtctgttattgcagagataagttcatcaaatgaaatggctacacttttagaatcggttagattctcccagcagcttgtgctttttgctcctcaagctgttcctgtgcacttgcacgttcaaggtcttatcccaatgctttactcaagacagccaagtcttagatatttagcagtgtcgacactgcaccatctgattgaaagggacccggctgcaatgattgacgagaatattgaagagaatctgttcagtatgcttgatgaggagaccgattcagaaacagcgatgttggttcgtgcaactattattcgcttattgtatacatcatgtccagtatgtccatcacggtggctggcagttttacgaaatattgttcttgctacgtcaattagaagaaacacaggtgaagttctgtcatgttttgggcataatcctcctgatagtacatctgagaatgatgtgtactatggagaagatgaagacaacatgatttccagctcaaagcagcagcaaatccgctgtgctggttctatatccagccagtttcctccaaggaataaacacctcagatatcgtaccagggtttttgctgcagaatgcgttagccatgtaccaattgcagttggagcagaacctgctcattttgacctcttgttggcaaggagcgcaatatctcaaggcacttatttgtcaaatgattggctagtgcttaaactacaggaactggtctcactttcataccagattagtactgggcaatttgaaggaatgcaaccaataggtgtgaagcttttgtgtttgataatggacaagttcggcaaggcagtagatccggaatttcctggccatatcttgctggaacaatttcaggcccaacttgtttctgctgttagaatggctataagcactgcttctggtccacttcttttggaggctggacttgaactcgctacaagggttatgacgagcagcataattggtggggatagactagctcttagtcgcttgttttctctgataacacgcccgttaagtgacatagagggcctactatatccatcttttgctgactgggtagtgtgcaagtgac

SEQ ID NO: 80171 - DNA, 6391 bp, Zea Mays
atggactttgtgagacaagatgctcttctcttgcttgagaatgcattggaaggctcaggtggtggtggtgctgctgcagcttatcaagaggcttttcgtatcatcatgcgaggtgtaagtgataaatcgttcattgtcagagcagcggcagcacgttgcttgaaggcatttgctaatattggtgggcctgcattggggatggctgatttcgattcttctatgtcttattgtgtgaagggtttggaagatagtgtatcttcagttagagattcatttgccgaagcacttggtgccatacttgctcttgcagtgaatccagatgcccaggtgaagaaaggcgggaaaaaacaaactgcttctgcaaagaaaattgaagatggtgtgcagaagcatttgattgtgccatttgtcaaagcaaatggagcaaatgcaaaggaactccggattggtttgactttatcatgggtgttctttctgcatatgattcatatgaagtatggcaccccagatagcgaacttcaaaattatgccatacaaacgatggaaattctccaggggaatgattcccttgatccacatgcgctggcatgcgttctgtatgttcttcgagttggtgtcgcggatcagatgactgagctgacacaacgcgattttttgctatttctgggaagaaagctggagtctttgaactacacagctgcaacgagagtggcaacactacgcattttgtgttacctattgagaagcgttggtgaggttccagctgaattcaaggatgttcttgataacacagttgttgcagcattgtctcattcttctgctcatgttcgtgtggaggcagctttaacattgcgtgctttagcagaggttgatcctacttgtgtaggtggtttagtttcatatggtcttacaacattgcaagctctacgagagactgtatcatttgataagggcaaaagtttgaaccttgagctcgactcactacatggacaggccactgtgttagctgctcttgttgcaatatcaccaaagttgcttcttggttatcctgcgaggctgcccaagtctgtacttgaattatccaaaaaaatgctgaatggtttcagtcgaaatccagtggctgctattgcagagcgtgaagctggttggttgctattagcttctcttctagcatccatgccaaaagaggagctggaagaccaggtgtttgatgttcttttgctatgggcgggtccttttactggaaatcctgaatcttaccttcgtcatatacaggattgggcatcagaattgcgggttctgtcagttgcagttgaggcgcttactgccttcataagaagttttgtttatccatctatcacaactactgattgtggaatcttgcttaatcctgtacttgcctaccttggcggagctctatccctcatatcttcgttgagatctaaacaagtgcccaatgtaaggtctgcgctggacctactcacaactagaacattgatggcttattggtccctttcgaatccagtggtatataaaactgagcaccagcagatacttcagctatgctcaagtccgttcagtgatccttctggatgggaagaaagctcatgcttgaagtttttgttggataagagagatgcttcactgggcccatggatacctggaagggattcatttgaggatgaattacgtgcttttgatggtggtgctgatgggtttctaccgtgtgtgtgggatgatgaaatcagcaacttccctcagccagagtcaattcggaaaatgctcgtcaaccagatgcttctctgttatggttccatatttgcatgtcaggaaaacactgtcaagataagcctcttgaacaatcttgaccagtgcctgaagtctgggaagaagtacctgtggtttaagtttctcattacaaatgcatgtgttgctctattgtcagggttaaaggaattcctcgctttacgtggtgctcaatcattgccaattgatatattaagtatgattcagtccattttcaaggccattttagtagagcctgaaatttctacagcacagcggcgagcagcgtgcgagggtctcggtttattagcacgagctgggaatgatatctttacagcaaggatggctcgctctcttctcggagagctggtaacaacaacagatctgagctatacaacttctgttgcattttcattgggttgcatccatcgaagtgctggaggaatggcattatctactctggttaccccaactgtgagctcactatctcatttgagtaaaagctctaatttcaatctgcagttgtggtcactgcatgctcttcttttaacaattgaagctgctggcttgtcttatgtctcgcaagttcaggggacacttttccttgctatggagattctcctcttggaagaaaatggatatgttgatcttcgacaaggaattggtcatcttattaatgcaatagttgctgttattggtccagagcttgctcctgatagcacattcttttcacgatgcaagtctgttattgcagagataagttcatcaaatgaaatggctacacttttagaatcggttagattctcccagcagcttgtgctttttgctcctcaagctgttcctgtgcacttgcacgttcaaggtcttatcccaatgctttactcaagacagccaagtcttagatatttagcagtgtcgacactgcaccatctgattgaaagggacccggctgcaatgattgacgagaatattgaagagaatctgttcagtatgcttgatgaggagaccgattcagaaacagcgatgttggttcgtgcaactattattcgcttattgtatacatcatgtccagtatgtccatcacggtggctggcagttttacgaaatattgttcttgctacgtcaattagaagaaacacaggtgaagttctgtcatgttttgggcataatcctcctgatagtacatctgagaatgatgtgtactatggagaagatgaagacaacatgatttccagctcaaagcagcagcaaatccgctgtgctggttctatatccagccagtttcctccaaggaataaacacctcagatatcgtaccagggtttttgctgcagaatgcgttagccatgtaccaattgcagttggagcagaacctgctcattttgacctcttgttggcaaggagcgcaatatctcaaggcacttatttgtcaaatgattggctagtgcttaaactacaggaactggtctcactttcataccagattagtactgggcaatttgaaggaatgcaaccaataggtgtgaagcttttgtgtttgataatggacaagttcggcaaggcagtagatccggaatttcctggccatatcttgctggaacaatttcaggcccaacttgtttctgctgttagaatggctataagcactgcttctggtccacttcttttggaggctggacttgaactcgctacaagggttatgacgagcagcataattggtggggatagactagctcttagtcgcttgttttctctgataacacgcccgttaagtgacatagagggcctactatatccatcttttgctgactgggtagtgtgcaagataaaagttcgccttctaactgcccatgcagcagtcaagtgtaacacctatcaattcttgaggatgagggaaaatgctcctaatgaataccagcaattggcaccttcacttgtaaacagttcaactctattaggaaaatactggattcgagcactcaaggattatgtttctataagttttggtttgcactcaaaaatcaattacaagccattccttgatgggattcagtcattattagtcttgtccaaggtgcagaggtatcttgatgaagtttggttattaattcttaaagcaacagctcttgatgccgcgcctttggattttgatgagaataatcctaaaaatttactcgaacaaacatttatatctgggcattgtatggtcaaattggacagaactgaattccaatttctttgggggttatctatccttgtgctgttccattcctgccaatcaatgaagaataattctttgaagatcaaccttgactttaaacaagacaaaaactttggggaatttattgttcatggacttgatgacaaaagaccgtgtgatcaggtcttacgcgtgctttcgtccctcacaacagaagtctttttcagcaataattttatttcagtggatatttgccagcaactcctccaggcacttacatatgcagattgttcaagcgctcctatcatccacctattcacccagattatcagattctgccctgacaatttttttgaggttgaagcctttgtcttctctgcaatagagttattgtctcagtatctgggtctgatacttcaatgtagggatgggagttctcagaataattcaagtaacactttgatttctgagttgtctattgcaagcgagacgatggcttatcggatcaaaggagagtatttgtggaagctggtgatgttagtggtatctacttcacaccaatcatttcaacaagtttcaactaatttatgcttctcaaatattatatgcttcctccaaaatatcttccctttcatgaggaaaatttttagagaaagagtcgaatcagatggtgagtgcacaagtcctaaagttgtctttggtgctatggttggcctagtgggatacttctatgtagagtgtgataaaaagatctcattgctcgaaaacaagatttctgattcctacaagctgttgaataagatactacttttttgcttgggagaagccactgctcttgcaaaacttgttcctgagatcatttatcgaagtgaaaatgtaagtaacaatgatgtgctcctttggggcagcttcaggctgtgcgtacaggttattcaaggttcatttcgtagtaccaacatacaggtgcacatgctgggtctgcaagtactgagaagctatgcacagaaggagctaactgaaggttcagaaacaaagttggattcttttatgatgttgcttacggaattgttgggagacttgtttttggtgatggagactacattgaaggaatgttcaaacaaaaaatctgtcagtgtcgttgatgaatgtttgaaacttgttttcctcttccacacactagcacaatcaaagaaataccgacaagatgctacaactcttctgctggaggccttgctgatggttttctctctgtccagtgatactgtttcacaggagcttgctgaagtgaacaccatttccagaaagttgttctctcattttattcagattccgtctgtggctatacagatcaaagacataatgctttctgcaccagctgaaaggagactacagcttcaggacatggtccgagcttcagtcagtcaagggcagataacggtgccagtggctacgagtgcacactcagaacagaatattcaggatagttgcagtaaaaaccctgggtccacatctgaagcttctgattgtgttgcaactcacgggaataatgacaatgaagttgttgatgatgactgggatgacgattgggatgctttccaatctcttcctgcaattgcaaatgatggtgttgattctggagaaatctctcttacaactaggtacaatgaacagatccctcaagaaaatagcagttacggttcttgtaatgcggatattacagctcgtgctatggaagacataacttgtgtggacaaggaacttgaggagccctctgatttgcaattctcaagtactgaacaacagcctaaacatgatttaccagggtcatcccacgaaggttgtgctaaacttgaaagacatccatctgttgattgcaaagagcaattagctgatgatgagacagcagatgaactgcagcagcaggttcatgaagacactgatcatgtaaataaagatagcgaagttctctctgcagaaattcatggggttaaattggatatccttgatgaagatgttgaagatgattccccaatgaattcaaacaatctatcagatatcgcagaggaagagtcctagggttggtacaatgcaacgagggtggaccgcaagcttgtcgagatagtagagaagagctgtccggttcctctgatgctggcataccagattttagtatgtcaggacacgtgatgagcaagagcggaggaaatgagcaaaatgttattttgcctgtatcaatatatattgcacgagataaaaataatataaggttacaaccatgatttttattttgtgccttcctccgcccctccgcttctaaataaatagttacctttgaatgaatttcaagaaaacccaatcaagacttatgacatcaaattaatatcattaaatctaacatagaatatat

SEQ ID NO: 80172 - DNA, 6387 bp, Zea Mays
atggactttgtgagacaagatgctcttctcttgcttgagaatgcattggaaggctcaggtggtggtggtgctgctgcagcttatcaagaggcttttcgtatcatcatgcgaggtgtaagtgataaatcgttcattgtcagagcagcggcagcacgttgcttgaaggcatttgctaatattggtgggcctgcattggggatggctgatttcgattcttctatgtcttattgtgtgaagggtttggaagatagtgtatcttcagttagagattcatttgccgaagcacttggtgccatacttgctcttgcagtgaatccagatgcccaggtgaagaaaggcgggaaaaaacaaactgcttctgcaaagaaaattgaagatggtgtgcagaagcatttgattgtgccatttgtcaaagcaaatggagcaaatgcaaaggaactccggattggtttgactttatcatgggtgttctttctgcatatgattcatatgaagtatggcaccccagatagcgaacttcaaaattatgccatacaaacgatggaaattctccaggggaatgattcccttgatccacatgcgctggcatgcgttctgtatgttcttcgagttggtgtcgcggatcagatgactgagctgacacaacgcgattttttgctatttctgggaagaaagctggagtctttgaactacacagctgcaacgagagtggcaacactacgcattttgtgttacctattgagaagcgttggtgaggttccagctgaattcaaggatgttcttgataacacagttgttgcagcattgtctcattcttctgctcatgttcgtgtggaggcagctttaacattgcgtgctttagcagaggttgatcctacttgtgtaggtggtttagtttcatatggtcttacaacattgcaagctctacgagagactgtatcatttgataagggcaaaagtttgaaccttgagctcgactcactacatggacaggccactgtgttagctgctcttgttgcaatatcaccaaagttgcttcttggttatcctgcgaggctgcccaagtctgtacttgaattatccaaaaaaatgctgaatggtttcagtcgaaatccagtggctgctattgcagagcgtgaagctggttggttgctattagcttctcttctagcatccatgccaaaagaggagctggaagaccaggtgtttgatgttcttttgctatgggcgggtccttttactggaaatcctgaatcttaccttcgtcatatacaggattgggcatcagaattgcgggttctgtcagttgcagttgaggcgcttactgccttcataagaagttttgtttatccatctatcacaactactgattgtggaatcttgcttaatcctgtacttgcctaccttggcggagctctatccctcatatcttcgttgagatctaaacaagtgcccaatgtaaggtctgcgctggacctactcacaactagaacattgatggcttattggtccctttcgaatccagtggtatataaaactgagcaccagcagatacttcagctatgctcaagtccgttcagtgatccttctggatgggaagaaagctcatgcttgaagtttttgttggataagagagatgcttcactgggcccatggatacctggaagggattcatttgaggatgaattacgtgcttttgatggtggtgctgatgggtttctaccgtgtgtgtgggatgatgaaatcagcaacttccctcagagtcaattcggaaaatgctcgtcaaccagatgcttctctgttatggttccatatttgcatgtcaggaaaacactgtcaagataagcctcttgaacaatcttgaccagtgcctgaagtctgggaagaagtacctgtggtttaagtttctcattacaaatgcatgtgttgctctattgtcagggttaaaggaattcctcgctttacgtggtgctcaatcattgccaattgatatattaagtatgattcagtccattttcaaggccattttagtagagcctgaaatttctacagcacagcggcgagcagcgtgcgagggtctcggtttattagcacgagctgggaatgatatctttacagcaaggatggctcgctctcttctcggagagctggtaacaacaacagatctgagctatacaacttctgttgcattttcattgggttgcatccatcgaagtgctggaggaatggcattatctactctggttaccccaactgtgagctcactatctcatttgagtaaaagctctaatttcaatctgcagttgtggtcactgcatgctcttcttttaacaattgaagctgctggcttgtcttatgtctcgcaagttcaggggacacttttccttgctatggagattctcctcttggaagaaaatggatatgttgatcttcgacaaggaattggtcatcttattaatgcaatagttgctgttattggtccagagcttgctcctgatagcacattcttttcacgatgcaagtctgttattgcagagataagttcatcaaatgaaatggctacacttttagaatcggttagattctcccagcagcttgtgctttttgctcctcaagctgttcctgtgcacttgcacgttcaaggtcttatcccaatgctttactcaagacagccaagtcttagatatttagcagtgtcgacactgcaccatctgattgaaagggacccggctgcaatgattgacgagaatattgaagagaatctgttcagtatgcttgatgaggagaccgattcagaaacagcgatgttggttcgtgcaactattattcgcttattgtatacatcatgtccagtatgtccatcacggtggctggcagttttacgaaatattgttcttgctacgtcaattagaagaaacacaggtgaagttctgtcatgttttgggcataatcctcctgatagtacatctgagaatgatgtgtactatggagaagatgaagacaacatgatttccagctcaaagcagcagcaaatccgctgtgctggttctatatccagccagtttcctccaaggaataaacacctcagatatcgtaccagggtttttgctgcagaatgcgttagccatgtaccaattgcagttggagcagaacctgctcattttgacctcttgttggcaaggagcgcaatatctcaaggcacttatttgtcaaatgattggctagtgcttaaactacaggaactggtctcactttcataccagattagtactgggcaatttgaaggaatgcaaccaataggtgtgaagcttttgtgtttgataatggacaagttcggcaaggcagtagatccggaatttcctggccatatcttgctggaacaatttcaggcccaacttgtttctgctgttagaatggctataagcactgcttctggtccacttcttttggaggctggacttgaactcgctacaagggttatgacgagcagcataattggtggggatagactagctcttagtcgcttgttttctctgataacacgcccgttaagtgacatagagggcctactatatccatcttttgctgactgggtagtgtgcaagataaaagttcgccttctaactgcccatgcagcagtcaagtgtaacacctatcaattcttgaggatgagggaaaatgctcctaatgaataccagcaattggcaccttcacttgtaaacagttcaactctattaggaaaatactggattcgagcactcaaggattatgtttctataagttttggtttgcactcaaaaatcaattacaagccattccttgatgggattcagtcattattagtcttgtccaaggtgcagaggtatcttgatgaagtttggttattaattcttaaagcaacagctcttgatgccgcgcctttggattttgatgagaataatcctaaaaatttactcgaacaaacatttatatctgggcattgtatggtcaaattggacagaactgaattccaatttctttgggggttatctatccttgtgctgttccattcctgccaatcaatgaagaataattctttgaagatcaaccttgactttaaacaagacaaaaactttggggaatttattgttcatggacttgatgacaaaagaccgtgtgatcaggtcttacgcgtgctttcgtccctcacaacagaagtctttttcagcaataattttatttcagtggatatttgccagcaactcctccaggcacttacatatgcagattgttcaagcgctcctatcatccacctattcacccagattatcagattctgccctgacaatttttttgaggttgaagcctttgtcttctctgcaatagagttattgtctcagtatctgggtctgatacttcaatgtagggatgggagttctcagaataattcaagtaacactttgatttctgagttgtctattgcaagcgagacgatggcttatcggatcaaaggagagtatttgtggaagctggtgatgttagtggtatctacttcacaccaatcatttcaacaagtttcaactaatttatgcttctcaaatattatatgcttcctccaaaatatcttccctttcatgaggaaaatttttagagaaagagtcgaatcagatggtgagtgcacaagtcctaaagttgtctttggtgctatggttggcctagtgggatacttctatgtagagtgtgataaaaagatctcattgctcgaaaacaagatttctgattcctacaagctgttgaataagatactacttttttgcttgggagaagccactgctcttgcaaaacttgttcctgagatcatttatcgaagtgaaaatgtaagtaacaatgatgtgctcctttggggcagcttcaggctgtgcgtacaggttattcaaggttcatttcgtagtaccaacatacaggtgcacatgctgggtctgcaagtactgagaagctatgcacagaaggagctaactgaaggttcagaaacaaagttggattcttttatgatgttgcttacggaattgttgggagacttgtttttggtgatggagactacattgaaggaatgttcaaacaaaaaatctgtcagtgtcgttgatgaatgtttgaaacttgttttcctcttccacacactagcacaatcaaagaaataccgacaagatgctacaactcttctgctggaggccttgctgatggttttctctctgtccagtgatactgtttcacaggagcttgctgaagtgaacaccatttccagaaagttgttctctcattttattcagattccgtctgtggctatacagatcaaagacataatgctttctgcaccagctgaaaggagactacagcttcaggacatggtccgagcttcagtcagtcaagggcagataacggtgccagtggctacgagtgcacactcagaacagaatattcaggatagttgcagtaaaaaccctgggtccacatctgaagcttctgattgtgttgcaactcacgggaataatgacaatgaagttgttgatgatgactgggatgacgattgggatgctttccaatctcttcctgcaattgcaaatgatggtgttgattctggagaaatctctcttacaactaggtacaatgaacagatccctcaagaaaatagcagttacggttcttgtaatgcggatattacagctcgtgctatggaagacataacttgtgtggacaaggaacttgaggagccctctgatttgcaattctcaagtactgaacaacagcctaaacatgatttaccagggtcatcccacgaaggttgtgctaaacttgaaagacatccatctgttgattgcaaagagcaattagctgatgatgagacagcagatgaactgcagcagcaggttcatgaagacactgatcatgtaaataaagatagcgaagttctctctgcagaaattcatggggttaaattggatatccttgatgaagatgttgaagatgattccccaatgaattcaaacaatctatcagatatcgcagaggaagagtcctagggttggtacaatgcaacgagggtggaccgcaagcttgtcgagatagtagagaagagctgtccggttcctctgatgctggcataccagattttagtatgtcaggacacgtgatgagcaagagcggaggaaatgagcaaaatgttattttgcctgtatcaatatatattgcacgagataaaaataatataaggttacaaccatgatttttattttgtgccttcctccgcccctccgcttctaaataaatagttacctttgaatgaatttcaagaaaacccaatcaagacttatgacatcaaattaatatcattaaatctaacatagaatatat

SEQ ID NO: 80173 - DNA, 6135 bp, Zea Mays
atggactttgtgagacaagatgctcttctcttgcttgagaatgcattggaaggctcaggtggtggtggtgctgctgcagcttatcaagaggcttttcgtatcatcatgcgaggtgtaagtgataaatcgttcattgtcagagcagcggcagcacgttgcttgaaggcatttgctaatattggtgggcctgcattggggatggctgatttcgattcttctatgtcttattgtgtgaagggtttggaagatagtgtatcttcagttagagattcatttgccgaagcacttggtgccatacttgctcttgcagtgaatccagatgcccaggtgaagaaaggcgggaaaaaacaaactgcttctgcaaagaaaattgaagatggtgtgcagaagcatttgattgtgccatttgtcaaagcaaatggagcaaatgcaaaggaactccggattggtttgactttatcatgggtgttctttctgcatatgattcatatgaagtatggcaccccagatagcgaacttcaaaattatgccatacaaacgatggaaattctccaggggaatgattcccttgatccacatgcgctggcatgcgttctgtatgttcttcgagttggtgtcgcggatcagatgactgagctgacacaacgcgattttttgctatttctgggaagaaagctggagtctttgaactacacagctgcaacgagagtggcaacactacgcattttgtgttacctattgagaagcgttggtgaggttccagctgaattcaaggatgttcttgataacacagttgttgcagcattgtctcattcttctgctcatgttcgtgtggaggcagctttaacattgcgtgctttagcagaggttgatcctacttgtgtaggtggtttagtttcatatggtcttacaacattgcaagctctacgagagactgtatcatttgataagggcaaaagtttgaaccttgagctcgactcactacatggacaggccactgtgttagctgctcttgttgcaatatcaccaaagttgcttcttggttatcctgcgaggctgcccaagtctgtacttgaattatccaaaaaaatgctgaatggtttcagtcgaaatccagtggctgctattgcagagcgtgaagctggttggttgctattagcttctcttctagcatccatgccaaaagaggagctggaagaccaggtgtttgatgttcttttgctatgggcgggtccttttactggaaatcctgaatcttaccttcgtcatatacaggattgggcatcagaattgcgggttctgtcagttgcagttgaggcgcttactgccttcataagaagttttgtttatccatctatcacaactactgattgtggaatcttgcttaatcctgtacttgcctaccttggcggagctctatccctcatatcttcgttgagatctaaacaagtgcccaatgtaaggtctgcgctggacctactcacaactagaacattgatggcttattggtccctttcgaatccagtggtatataaaactgagcaccagcagatacttcagctatgctcaagtccgttcagtgatccttctggatgggaagaaagctcatgcttgaagtttttgttggataagagagatgcttcactgggcccatggatacctggaagggattcatttgaggatgaattacgtgcttttgatggtggtgctgatgggtttctaccgtgtgtgtgggatgatgaaatcagcaacttccctcagccagagtcaattcggaaaatgctcgtcaaccagatgcttctctgttatggttccatatttgcatgtcaggaaaacactgtcaagataagcctcttgaacaatcttgaccagtgcctgaagtctgggaagaagtacctgtggtttaagtttctcattacaaatgcatgtgttgctctattgtcagggttaaaggaattcctcgctttacgtggtgctcaatcattgccaattgatatattaagtatgattcagtccattttcaaggccattttagtagagcctgaaatttctacagcacagcggcgagcagcgtgcgagggtctcggtttattagcacgagctgggaatgatatctttacagcaaggatggctcgctctcttctcggagagctggtaacaacaacagatctgagctatacaacttctgttgcattttcattgggttgcatccatcgaagtgctggaggaatggcattatctactctggttaccccaactgtgagctcactatctcatttgagtaaaagctctaatttcaatctgcagttgtggtcactgcatgctcttcttttaacaattgaagctgctggcttgtcttatgtctcgcaagttcaggggacacttttccttgctatggagattctcctcttggaagaaaatggatatgttgatcttcgacaaggaattggtcatcttattaatgcaatagttgctgttattggtccagagcttgctcctgatagcacattcttttcacgatgcaagtctgttattgcagagataagttcatcaaatgaaatggctacacttttagaatcggttagattctcccagcagcttgtgctttttgctcctcaagctgttcctgtgcacttgcacgttcaaggtcttatcccaatgctttactcaagacagccaagtcttagatatttagcagtgtcgacactgcaccatctgattgaaagggacccggctgcaatgattgacgagaatattgaagagaatctgttcagtatgcttgatgaggagaccgattcagaaacagcgatgttggttcgtgcaactattattcgcttattgtatacatcatgtccagtatgtccatcacggtggctggcagttttacgaaatattgttcttgctacgtcaattagaagaaacacaggtgaagttctgtcatgttttgggcataatcctcctgatagtacatctgagaatgatgtgtactatggagaagatgaagacaacatgatttccagctcaaagcagcagcaaatccgctgtgctggttctatatccagccagtttcctccaaggaataaacacctcagatatcgtaccagggtttttgctgcagaatgcgttagccatgtaccaattgcagttggagcagaacctgctcattttgacctcttgttggcaaggagcgcaatatctcaaggcacttatttgtcaaatgattggctagtgcttaaactacaggaactggtctcactttcataccagattagtactgggcaatttgaaggaatgcaaccaataggtgtgaagcttttgtgtttgataatggacaagttcggcaaggcagtagatccggaatttcctggccatatcttgctggaacaatttcaggcccaacttgtttctgctgttagaatggctataagcactgcttctggtccacttcttttggaggctggacttgaactcgctacaagggttatgacgagcagcataattggtggggatagactagctcttagtcgcttgttttctctgataacacgcccgttaagtgacatagagggcctactatatccatcttttgctgactgggtagtgtgcaagataaaagttcgccttctaactgcccatgcagcagtcaagtgtaacacctatcaattcttgaggatgagggaaaatgctcctaatgaataccagcaattggcaccttcacttgtaaacagttcaactctattaggaaaatactggattcgagcactcaaggattatgtttctataagttttggtttgcactcaaaaatcaattacaagccattccttgatgggattcagtcattattagtcttgtccaaggtgcagaggtatcttgatgaagtttggttattaattcttaaagcaacagctcttgatgccgcgcctttggattttgatgagaataatcctaaaaatttactcgaacaaacatttatatctgggcattgtatggtcaaattggacagaactgaattccaatttctttgggggttatctatccttgtgctgttccattcctgccaatcaatgaagaataattctttgaagatcaaccttgactttaaacaagacaaaaactttggggaatttattgttcatggacttgatgacaaaagaccgtgtgatcaggtcttacgcgtgctttcgtccctcacaacagaagtctttttcagcaataattttatttcagtggatatttgccagcaactcctccaggcacttacatatgcagattgttcaagcgctcctatcatccacctattcacccagattatcagattctgccctgacaatttttttgaggttgaagcctttgtcttctctgcaatagagttattgtctcagtatctgggtctgatacttcaatgtagggatgggagttctcagaataattcaagtaacactttgatttctgagttgtctattgcaagcgagacgatggcttatcggatcaaaggagagtatttgtggaagctggtgatgttagtggtatctacttcacaccaatcatttcaacaagtttcaactaatttatgcttctcaaatattatatgcttcctccaaaatatcttccctttcatgaggaaaatttttagagcttcaggctgtgcgtacaggttattcaaggttcatttcgtagtaccaacatacaggtgcacatgctgggtctgcaagtactgagaagctatgcacagaaggagctaactgaaggttcagaaacaaagttggattcttttatgatgttgcttacggaattgttgggagacttgtttttggtgatggagactacattgaaggaatgttcaaacaaaaaatctgtcagtgtcgttgatgaatgtttgaaacttgttttcctcttccacacactagcacaatcaaagaaataccgacaagatgctacaactcttctgctggaggccttgctgatggttttctctctgtccagtgatactgtttcacaggagcttgctgaagtgaacaccatttccagaaagttgttctctcattttattcagattccgtctgtggctatacagatcaaagacataatgctttctgcaccagctgaaaggagactacagcttcaggacatggtccgagcttcagtcagtcaagggcagataacggtgccagtggctacgagtgcacactcagaacagaatattcaggatagttgcagtaaaaaccctgggtccacatctgaagcttctgattgtgttgcaactcacgggaataatgacaatgaagttgttgatgatgactgggatgacgattgggatgctttccaatctcttcctgcaattgcaaatgatggtgttgattctggagaaatctctcttacaactaggtacaatgaacagatccctcaagaaaatagcagttacggttcttgtaatgcggatattacagctcgtgctatggaagacataacttgtgtggacaaggaacttgaggagccctctgatttgcaattctcaagtactgaacaacagcctaaacatgatttaccagggtcatcccacgaaggttgtgctaaacttgaaagacatccatctgttgattgcaaagagcaattagctgatgatgagacagcagatgaactgcagcagcaggttcatgaagacactgatcatgtaaataaagatagcgaagttctctctgcagaaattcatggggttaaattggatatccttgatgaagatgttgaagatgattccccaatgaattcaaacaatctatcagatatcgcagaggaagagtcctagggttggtacaatgcaacgagggtggaccgcaagcttgtcgagatagtagagaagagctgtccggttcctctgatgctggcataccagattttagtatgtcaggacacgtgatgagcaagagcggaggaaatgagcaaaatgttattttgcctgtatcaatatatattgcacgagataaaaataatataaggttacaaccatgatttttattttgtgccttcctccgcccctccgcttctaaataaatagttacctttgaatgaatttcaagaaaacccaatcaagacttatgacatcaaattaatatcattaaatctaacatagaatatat

SEQ ID NO: 80174 - DNA, 6790 bp, Zea Mays
atggggagaatggcggcggtaggcgcggcgggagagagcgctgcccacacagggggggtgggaggtggctggctcaaggttgtccatgtggctgctattgcagagcgtgaagctggttggttgctattagcttctcttctagcatccatgccaaaagaggagctggaagaccaggtgtttgatgttcttttgctatgggcgggtccttttactggaaatcctgaatcttaccttcgtcatatacaggattgggcatcagaattgcgggttctgtcagttgcagttgaggcgcttactgccttcataagaagttttgtttatccatctatcacaactactgattgtggaatcttgcttaatcctgtacttgcctaccttggcggagctctatccctcatatcttcgttgagatctaaacaagtgcccaatgtaaggtctgcgctggacctactcacaactagaacattgatggcttattggtccctttcgaatccagtggtatataaaactgagcaccagcagatacttcagctatgctcaagtccgttcagtgatccttctggatgggaagaaagctcatgcttgaagtttttgttggataagagagatgcttcactgggcccatggatacctggaagggattcatttgaggatgaattacgtgcttttgatggtggtgctgatgggtttctaccgtgtgtgtgggatgatgaaatcagcaacttccctcagccagagtcaattcggaaaatgctcgtcaaccagatgcttctctgttatggttccatatttgcatgtcaggaaaacactgtcaagataagcctcttgaacaatcttgaccagtgcctgaagtctgggaagaagtacctgtggtttaagtttctcattacaaatgcatgtgttgctctattgtcagggttaaaggaattcctcgctttacgtggtgctcaatcattgccaattgatatattaagtatgattcagtccattttcaaggccattttagtagagcctgaaatttctacagcacagcggcgagcagcgtgcgagggtctcggtttattagcacgagctgggaatgatatctttacagcaaggatggctcgctctcttctcggagagctggtaacaacaacagatctgagctatacaacttctgttgcattttcattgggttgcatccatcgaaggtaagtttcatacctgaagatatttcgttgtattaattctgaatctcaaaataccagttaatagtctccatgggtgtatagtgtccatttgtttcagttttataattctttgttgacatggcctactatttccattgtttactttgagattttttttcttgagtactttgtattgacgtaggtgttctcctgttcctattgggaagtcatttgtgtccccattacttgttcgaacactagccacaacattgttgtatatgcaccttaatgagtccaacgtagctcttttgagaatttatgtttgtccaacgcccaccacataacatttcttggtattttgtattaaaccttctactagacggtgaagaccatgtatatgtccttattttgctccctatattgctccattacttgtcttattgagaaaatgactttcatggttgacctttcagacataaaccaaattggtttaggggcatcgtggacgtagaagaaaatagcatgcaattaaggtaggaagggtcattgttaagccgccatggatgaagcatacattgtggttggcaggctcgagaatgcgtcgtgactggaggctgtgcaccgggttgtactaggtagagggccccaaccatataccaatgtttaaggaaacggttgagcgatcctcaacgatgattgcaacgcgtagaacatcgggggtagaaggtgctaggtgtagcctgctgttgtcggattagacaaattagatgtgaaacagatgtggttgtgctagacgaggttaggtcaagcagtgtgtggatgatagtagatgtacctacttagaggttaggcatgcctgaagttagtggtccggacgcaaggtacacgtgtcgtcaatgcatagcatacgatgatgtagatgctgcagtgagtgccatcttggatagaggcatgcttgtgagagtgtgtcctttggtggataccattggaagtggtgttgtgactcgaggaggcgacacaacaatagcagcgctattgtttggagtggatgcgtgtagtactttgctaacttcacatgagctaggaggaccgtgcataatcagttggttgatcaagtatgcatgatgtgggatgctaatggaagaaatcggtggtggtgtcctcatttatggtggcgatgatgaaccaacgataatcatgggtcgttgtgggattgggatatagagggcaacattgctagaatcatgacacaattatgacatcatgctctagtgctatgtttgtcccgcttgagcctcaagttcgagccaagcatagttgtcatttggcaatgagtccaatgcacccgcacaagaggagtctggactcctgtgcgctcgtgtgacatgctagctgagacaacatccttgtgatatacaactgcaggccatggatgaaataagaagagagtgctggaggaatggcattatctactctggttaccccaactgtgagctcactatctcatttgagtaaaagctctaatttcaatctgcagttgtggtcactgcatgctcttcttttaacaattgaagctgctggcttgtcttatgtctcgcaagttcaggggacacttttccttgctatggagattctcctcttggaagaaaatggatatgttgatcttcgacaaggaattggtcatcttattaatgcaatagttgctgttattggtccagagcttgctcctgatagcacattcttttcacgatgcaagtctgttattgcagagataagttcatcaaatgaaatggctacacttttagaatcggttagattctcccagcagcttgtgctttttgctcctcaagctgttcctgtgcacttgcacgttcaaggtcttatcccaatgctttactcaagacagccaagtcttagatatttagcagtgtcgacactgcaccatctgattgaaagggacccggctgcaatgattgacgagaatattgaagagaatctgttcagtatgcttgatgaggagaccgattcagaaacagcgatgttggttcgtgcaactattattcgcttattgtatacatcatgtccagtatgtccatcacggtggctggcagttttacgaaatattgttcttgctacgtcaattagaagaaacacaggtgaagttctgtcatgttttgggcataatcctcctgatagtacatctgagaatgatgtgtactatggagaagatgaagacaacatgatttccagctcaaagcagcagcaaatccgctgtgctggttctatatccagccagtttcctccaaggaataaacacctcagatatcgtaccagggtttttgctgcagaatgcgttagccatgtaccaattgcagttggagcagaacctgctcattttgacctcttgttggcaaggagcgcaatatctcaaggcacttatttgtcaaatgattggctagtgcttaaactacaggaactggtctcactttcataccagattagtactgggcaatttgaaggaatgcaaccaataggtgtgaagcttttgtgtttgataatggacaagttcggcaaggcagtagatccggaatttcctggccatatcttgctggaacaatttcaggcccaacttgtttctgctgttagaatggctataagcactgcttctggtccacttcttttggaggctggacttgaactcgctacaagggttatgacgagcagcataattggtggggatagactagctcttagtcgcttgttttctctgataacacgcccgttaagtgacatagagggcctactatatccatcttttgctgactgggtagtgtgcaagataaaagttcgccttctaactgcccatgcagcagtcaagtgtaacacctatcaattcttgaggatgagggaaaatgctcctaatgaataccagcaattggcaccttcacttgtaaacagttcaactctattaggaaaatactggattcgagcactcaaggattatgtttctataagttttggtttgcactcaaaaatcaattacaagccattccttgatgggattcagtcattattagtcttgtccaaggtgcagaggtatcttgatgaagtttggttattaattcttaaagcaacagctcttgatgccgcgcctttggattttgatgagaataatcctaaaaatttactcgaacaaacatttatatctgggcattgtatggtcaaattggacagaactgaattccaatttctttgggggttatctatccttgtgctgttccattcctgccaatcaatgaagaataattctttgaagatcaaccttgactttaaacaagacaaaaactttggggaatttattgttcatggacttgatgacaaaagaccgtgtgatcaggtcttacgcgtgctttcgtccctcacaacagaagtctttttcagcaataattttatttcagtggatatttgccagcaactcctccaggcacttacatatgcagattgttcaagcgctcctatcatccacctattcacccagattatcagattctgccctgacaatttttttgaggttgaagcctttgtcttctctgcaatagagttattgtctcagtatctgggtctgatacttcaatgtagggatgggagttctcagaataattcaagtaacactttgatttctgagttgtctattgcaagcgagacgatggcttatcggatcaaaggagagtatttgtggaagctggtgatgttagtggtatctacttcacaccaatcatttcaacaagtttcaactaatttatgcttctcaaatattatatgcttcctccaaaatatcttccctttcatgaggaaaatttttagagaaagagtcgaatcagatggtgagtgcacaagtcctaaagttgtctttggtgctatggttggcctagtgggatacttctatgtagagtgtgataaaaagatctcattgctcgaaaacaagatttctgattcctacaagctgttgaataagatactacttttttgcttgggagaagccactgctcttgcaaaacttgttcctgagatcatttatcgaagtgaaaatgtaagtaacaatgatgtgctcctttggggcagcttcaggctgtgcgtacaggttattcaaggttcatttcgtagtaccaacatacaggtgcacatgctgggtctgcaagtactgagaagctatgcacagaaggagctaactgaaggttcagaaacaaagttggattcttttatgatgttgcttacggaattgttgggagacttgtttttggtgatggagactacattgaaggaatgttcaaacaaaaaatctgtcagtgtcgttgatgaatgtttgaaacttgttttcctcttccacacactagcacaatcaaagaaataccgacaagatgctacaactcttctgctggaggccttgctgatggttttctctctgtccagtgatactgtttcacaggagcttgctgaagtgaacaccatttccagaaagttgttctctcattttattcagattccgtctgtggctatacagatcaaagacataatgctttctgcaccagctgaaaggagactacagcttcaggacatggtccgagcttcagtcagtcaagggcagataacggtgccagtggctacgagtgcacactcagaacagaatattcaggatagttgcagtaaaaaccctgggtccacatctgaagcttctgattgtgttgcaactcacgggaataatgacaatgaagttgttgatgatgactgggatgacgattgggatgctttccaatctcttcctgcaattgcaaatgatggtgttgattctggagaaatctctcttacaactaggtacaatgaacagatccctcaagaaaatagcagttacggttcttgtaatgcggatattacagctcgtgctatggaagacataacttgtgtggacaaggaacttgaggagccctctgatttgcaattctcaagtactgaacaacagcctaaacatgatttaccagggtcatcccacgaaggttgtgctaaacttgaaagacatccatctgttgattgcaaagagcaattagctgatgatgagacagcagatgaactgcagcagcaggttcatgaagacactgatcatgtaaataaagatagcgaagttctctctgcagaaattcatggggttaaattggatatccttgatgaagatgttgaagatgattccccaatgaattcaaacaatctatcagatatcgcagaggaagagtcctagggttggtacaatgcaacgagggtggaccgcaagcttgtcgagatagtagagaagagctgtccggttcctctgatgctggcataccagattttagtatgtcaggacacgtgatgagcaagagcggaggaaatgagcaaaatgttattttgcctgtatcaatatatattgcacgagataaaaataatataaggttacaaccatgatttttattttgtgccttcctccgcccctccgcttctaaataaatagttacctttgaatgaatttcaagaaaacccaatcaagacttatgacatcaaattaatatcattaaatctaacatagaatatat

SEQ ID NO: 80175 - DNA, 6509 bp, Zea Mays
atggggagaatggcggcggtaggcgcggcgggagagagcgctgcccacacagggggggtgggaggtggctggctcaaggttgtccatgtggctgctattgcagagcgtgaagctggttggttgctattagcttctcttctagcatccatgccaaaagaggagctggaagaccaggtgtttgatgttcttttgctatgggcgggtccttttactggaaatcctgaatcttaccttcgtcatatacaggattgggcatcagaattgcgggttctgtcagttgcagttgaggcgcttactgccttcataagaagttttgtttatccatctatcacaactactgattgtggaatcttgcttaatcctgtacttgcctaccttggcggagctctatccctcatatcttcgttgagatctaaacaagtgcccaatgtaaggtctgcgctggacctactcacaactagaacattgatggcttattggtccctttcgaatccagtggtatataaaactgagcaccagcagatacttcagctatgctcaagtccgttcagtgatccttctggatgggaagaaagctcatgcttgaagtttttgttggataagagagatgcttcactgggcccatggatacctggaagggattcatttgaggatgaattacgtgcttttgatggtggtgctgatgggtttctaccgtgtgtgtgggatgatgaaatcagcaacttccctcagccagagtcaattcggaaaatgctcgtcaaccagatgcttctctgttatggttccatatttgcatgtcaggaaaacactgtcaagataagcctcttgaacaatcttgaccagtgcctgaagtctgggaagaagtacctgtggtttaagtttctcattacaaatgcatgtgttgctctattgtcagggttaaaggaattcctcgctttacgtggtgctcaatcattgccaattgatatattaagtatgattcagtccattttcaaggccattttagtagagcctgaaatttctacagcacagcggcgagcagcgtgcgagggtctcggtttattagcacgagctgggaatgatatctttacagcaaggatggctcgctctcttctcggagagctggtaacaacaacagatctgagctatacaacttctgttgcattttcattgggttgcatccatcgaagtgctggaggaatggcattatctactctggttaccccaactgtgagctcactatctcatttgagtaaaagctctaatttcaatctgcagttgtggtcactgcatgctcttcttttaacaattgaagctgctggcttgtcttatgtctcgcaagttcaggggacacttttccttgctatggagattctcctcttggaagaaaatggatatgttgatcttcgacaaggaattggtcatcttattaatgcaatagttgctgttattggtccagagcttgctcctgatagcacattcttttcacgatgcaagtctgttattgcagagataagttcatcaaatgaaatggctacacttttagaatcggttagattctcccagcagcttgtgctttttgctcctcaagctgttcctgtgcacttgcacgttcaaggtcttatcccaatgctttactcaagacagccaagtcttagatatttagcagtgtcgacactgcaccatctgattgaaagggacccggctgcaatgattgacgagaatattgaagagaatctgttcagtatgcttgatgaggagaccgattcagaaacagcgatgttggttcgtgcaactattattcgcttattgtatacatcatgtccagtatgtccatcacggtggctggcagttttacgaaatattgttcttgctacgtcaattagaagaaacacaggtgaagttctgtcatgttttgggcataatcctcctgatagtacatctgagaatgatgtgtactatggagaagatgaagacaacatgatttccagctcaaagcagcagcaaatccgctgtgctggttctatatccagccagtttcctccaaggaataaacacctcagatatcgtaccagggtttttgctgcagaatgcgttagccatgtaccaattgcagttggagcagaacctgctcattttgacctcttgttggcaaggagcgcaatatctcaaggcacttatttgtcaaatgattggctagtgcttaaactacaggaactggtctcactttcataccagattagtactgggcaatttgaaggaatgcaaccaataggtgtgaagcttttgtgtttgataatggacaagttcggcaaggcagtagatccggaatttcctggccatatcttgctggaacaatttcaggcccaacttgtttctgctgttagaatggctataagcactgcttctggtccacttcttttggaggctggacttgaactcgctacaagggttatgacgagcagcataattggtggggatagactagctcttagtcgcttgttttctctgataacacgcccgttaagtgacatagagggcctactatatccatcttttgctgactgggtagtgtgcaagataaaagttcgccttctaactgcccatgcagcagtcaagtgtaacacctatcaattcttgaggatgagggaaaatgctcctaatgaataccagcaattggcaccttcacttgtaaacagttcaactctattaggaaaatactggattcgagcactcaaggattatgtttctataagttttggtttgcactcaaaaatcaattacaagccattccttgatgggattcagtcattattagtcttgtccaaggtgcagaggtatcttgatgaagtttggttattaattcttaaagcaacagctcttgatgccgcgcctttggattttgatgagaataatcctaaaaatttactcgaacaaacatttatatctgggcattgtatggtcaaattggacagaactgaattccaatttctttgggggttatctatccttgtgctgttccattcctgccaatcaatgaagaataattctttgaagatcaaccttgactttaaacaagacaaaaactttggggaatttattgttcatggacttgatgacaaaagaccgtgtgatcaggtcttacgcgtgctttcgtccctcacaacagaagtctttttcagcaataattttatttcagtggatatttgccagcaactcctccaggcacttacatatgcagattgttcaagcgctcctatcatccacctattcacccaggtaaggttattccagtgataactaatagcagttcatgttagatcaatcaatcatatttgagttctaaatttttattaataaaagggtaaccaattgcatggattttcttcttctgaaaatgcttatgcattaatatagtccacaaggcccaattgtctcatgtgataagataaatatggttccaataaaaaagggcccaaaatcttgtgccatgtaggtcattagacatgcgacccacaaccatgctgccctgccaaagggatctgagggagctggtgatgttgcctgcagacaaactcagggaagcaccacctcaactggtggggtactcgagaagaagtcaaccccccctccccctgtttgcgcagctgtcacacaagatgccgccagtggccaatgccacccatctgctacggatagtctgtctctaacatcagctgtaataccccttaccggtgaggaacgcactaggcccaaatatttacaccgatacaggatagagactgtgtggaacaaggactctaacaaagactatatatgagaacgaaaacaaggacacatggacatgcatctaacaaggaaaggttcctggattattttcctagtgtttttttacataagcgtctccctgatatatggtcttataagcaagagcggacggctacaagtgaggtccccacacacatccatgtattaattatcaatgaacacatgtccccttaaaatatcccacattgcgctactggtccattacttcacttgcctctagttgattttcatggtgcgcctgcagctgcaggtgtagcttacatggtaggcagtgagtgggataaaatgatacaatggaagaaagaggtgcacagtgggaaagtatcccaggttgattgactactgttttgtagcttagggaaagtagatcttttactcccttcagtcttgatgctggaatgagattaactaatgtgaacttgtgtagttgcaagtattgcttctctcttttttcttgaagggctaatattgtctctggtttgattccttttgcctctatgttagcaatatttaaggataatacagtaacaaagttttattcattgcatgttgcttatttttaatgagactactgcctaacttttgtttcaccatgaagattatcagattctgccctgacaatttttttgaggttgaagcctttgtcttctctgcaatagagttattgtctcagtatctgggtctgatacttcaatgtagggatgggagttctcagaataattcaagtaacactttgatttctgagttgtctattgcaagcgagacgatggcttatcggatcaaaggagagtatttgtggaagctggtgatgttagtggtatctacttcacaccaatcatttcaacaagtttcaactaatttatgcttctcaaatattatatgcttcctccaaaatatcttccctttcatgaggaaaatttttagagaaagagtcgaatcagatggtgagtgcacaagtcctaaagttgtctttggtgctatggttggcctagtgggatacttctatgtagagtgtgataaaaagatctcattgctcgaaaacaagatttctgattcctacaagctgttgaataagatactacttttttgcttgggagaagccactgctcttgcaaaacttgttcctgagatcatttatcgaagtgaaaatgtaagtaacaatgatgtgctcctttggggcagcttcaggctgtgcgtacaggttattcaaggttcatttcgtagtaccaacatacaggtgcacatgctgggtctgcaagtactgagaagctatgcacagaaggagctaactgaaggttcagaaacaaagttggattcttttatgatgttgcttacggaattgttgggagacttgtttttggtgatggagactacattgaaggaatgttcaaacaaaaaatctgtcagtgtcgttgatgaatgtttgaaacttgttttcctcttccacacactagcacaatcaaagaaataccgacaagatgctacaactcttctgctggaggccttgctgatggttttctctctgtccagtgatactgtttcacaggagcttgctgaagtgaacaccatttccagaaagttgttctctcattttattcagattccgtctgtggctatacagatcaaagacataatgctttctgcaccagctgaaaggagactacagcttcaggacatggtccgagcttcagtcagtcaagggcagataacggtgccagtggctacgagtgcacactcagaacagaatattcaggatagttgcagtaaaaaccctgggtccacatctgaagcttctgattgtgttgcaactcacgggaataatgacaatgaagttgttgatgatgactgggatgacgattgggatgctttccaatctcttcctgcaattgcaaatgatggtgttgattctggagaaatctctcttacaactaggtacaatgaacagatccctcaagaaaatagcagttacggttcttgtaatgcggatattacagctcgtgctatggaagacataacttgtgtggacaaggaacttgaggagccctctgatttgcaattctcaagtactgaacaacagcctaaacatgatttaccagggtcatcccacgaaggttgtgctaaacttgaaagacatccatctgttgattgcaaagagcaattagctgatgatgagacagcagatgaactgcagcagcaggttcatgaagacactgatcatgtaaataaagatagcgaagttctctctgcagaaattcatggggttaaattggatatccttgatgaagatgttgaagatgattccccaatgaattcaaacaatctatcagatatcgcagaggaagagtcctagggttggtacaatgcaacgagggtggaccgcaagcttgtcgagatagtagagaagagctgtccggttcctctgatgctggcataccagattttagtatgtcaggacacgtgatgagcaagagcggaggaaatgagcaaaatgttattttgcctgtatcaatatatattgcacgagataaaaataatataaggttacaaccatgatttttattttgtgccttcctccgcccctccgcttctaaataaatagttacctttgaatgaatttcaagaaaacccaatcaagacttatgacatcaaattaatatcattaaatctaacatagaatatat

SEQ ID NO: 80176 - DNA, 5358 bp, Zea Mays
atggggagaatggcggcggtaggcgcggcgggagagagcgctgcccacacagggggggtgggaggtggctggctcaaggttgtccatgtggctgctattgcagagcgtgaagctggttggttgctattagcttctcttctagcatccatgccaaaagaggagctggaagaccaggtgtttgatgttcttttgctatgggcgggtccttttactggaaatcctgaatcttaccttcgtcatatacaggattgggcatcagaattgcgggttctgtcagttgcagttgaggcgcttactgccttcataagaagttttgtttatccatctatcacaactactgattgtggaatcttgcttaatcctgtacttgcctaccttggcggagctctatccctcatatcttcgttgagatctaaacaagtgcccaatgtaaggtctgcgctggacctactcacaactagaacattgatggcttattggtccctttcgaatccagtggtatataaaactgagcaccagcagatacttcagctatgctcaagtccgttcagtgatccttctggatgggaagaaagctcatgcttgaagtttttgttggataagagagatgcttcactgggcccatggatacctggaagggattcatttgaggatgaattacgtgcttttgatggtggtgctgatgggtttctaccgtgtgtgtgggatgatgaaatcagcaacttccctcagagtcaattcggaaaatgctcgtcaaccagatgcttctctgttatggttccatatttgcatgtcaggaaaacactgtcaagataagcctcttgaacaatcttgaccagtgcctgaagtctgggaagaagtacctgtggtttaagtttctcattacaaatgcatgtgttgctctattgtcagggttaaaggaattcctcgctttacgtggtgctcaatcattgccaattgatatattaagtatgattcagtccattttcaaggccattttagtagagcctgaaatttctacagcacagcggcgagcagcgtgcgagggtctcggtttattagcacgagctgggaatgatatctttacagcaaggatggctcgctctcttctcggagagctggtaacaacaacagatctgagctatacaacttctgttgcattttcattgggttgcatccatcgaagtgctggaggaatggcattatctactctggttaccccaactgtgagctcactatctcatttgagtaaaagctctaatttcaatctgcagttgtggtcactgcatgctcttcttttaacaattgaagctgctggcttgtcttatgtctcgcaagttcaggggacacttttccttgctatggagattctcctcttggaagaaaatggatatgttgatcttcgacaaggaattggtcatcttattaatgcaatagttgctgttattggtccagagcttgctcctgatagcacattcttttcacgatgcaagtctgttattgcagagataagttcatcaaatgaaatggctacacttttagaatcggttagattctcccagcagcttgtgctttttgctcctcaagctgttcctgtgcacttgcacgttcaaggtcttatcccaatgctttactcaagacagccaagtcttagatatttagcagtgtcgacactgcaccatctgattgaaagggacccggctgcaatgattgacgagaatattgaagagaatctgttcagtatgcttgatgaggagaccgattcagaaacagcgatgttggttcgtgcaactattattcgcttattgtatacatcatgtccagtatgtccatcacggtggctggcagttttacgaaatattgttcttgctacgtcaattagaagaaacacaggtgaagttctgtcatgttttgggcataatcctcctgatagtacatctgagaatgatgtgtactatggagaagatgaagacaacatgatttccagctcaaagcagcagcaaatccgctgtgctggttctatatccagccagtttcctccaaggaataaacacctcagatatcgtaccagggtttttgctgcagaatgcgttagccatgtaccaattgcagttggagcagaacctgctcattttgacctcttgttggcaaggagcgcaatatctcaaggcacttatttgtcaaatgattggctagtgcttaaactacaggaactggtctcactttcataccagattagtactgggcaatttgaaggaatgcaaccaataggtgtgaagcttttgtgtttgataatggacaagttcggcaaggcagtagatccggaatttcctggccatatcttgctggaacaatttcaggcccaacttgtttctgctgttagaatggctataagcactgcttctggtccacttcttttggaggctggacttgaactcgctacaagggttatgacgagcagcataattggtggggatagactagctcttagtcgcttgttttctctgataacacgcccgttaagtgacatagagggcctactatatccatcttttgctgactgggtagtgtgcaagataaaagttcgccttctaactgcccatgcagcagtcaagtgtaacacctatcaattcttgaggatgagggaaaatgctcctaatgaataccagcaattggcaccttcacttgtaaacagttcaactctattaggaaaatactggattcgagcactcaaggattatgtttctataagttttggtttgcactcaaaaatcaattacaagccattccttgatgggattcagtcattattagtcttgtccaaggtgcagaggtatcttgatgaagtttggttattaattcttaaagcaacagctcttgatgccgcgcctttggattttgatgagaataatcctaaaaatttactcgaacaaacatttatatctgggcattgtatggtcaaattggacagaactgaattccaatttctttgggggttatctatccttgtgctgttccattcctgccaatcaatgaagaataattctttgaagatcaaccttgactttaaacaagacaaaaactttggggaatttattgttcatggacttgatgacaaaagaccgtgtgatcaggtcttacgcgtgctttcgtccctcacaacagaagtctttttcagcaataattttatttcagtggatatttgccagcaactcctccaggcacttacatatgcagattgttcaagcgctcctatcatccacctattcacccagattatcagattctgccctgacaatttttttgaggttgaagcctttgtcttctctgcaatagagttattgtctcagtatctgggtctgatacttcaatgtagggatgggagttctcagaataattcaagtaacactttgatttctgagttgtctattgcaagcgagacgatggcttatcggatcaaaggagagtatttgtggaagctggtgatgttagtggtatctacttcacaccaatcatttcaacaagtttcaactaatttatgcttctcaaatattatatgcttcctccaaaatatcttccctttcatgaggaaaatttttagagaaagagtcgaatcagatggtgagtgcacaagtcctaaagttgtctttggtgctatggttggcctagtgggatacttctatgtagagtgtgataaaaagatctcattgctcgaaaacaagatttctgattcctacaagctgttgaataagatactacttttttgcttgggagaagccactgctcttgcaaaacttgttcctgagatcatttatcgaagtgaaaatgtaagtaacaatgatgtgctcctttggggcagcttcaggctgtgcgtacaggttattcaaggttcatttcgtagtaccaacatacaggtgcacatgctgggtctgcaagtactgagaagctatgcacagaaggagctaactgaaggttcagaaacaaagttggattcttttatgatgttgcttacggaattgttgggagacttgtttttggtgatggagactacattgaaggaatgttcaaacaaaaaatctgtcagtgtcgttgatgaatgtttgaaacttgttttcctcttccacacactagcacaatcaaagaaataccgacaagatgctacaactcttctgctggaggccttgctgatggttttctctctgtccagtgatactgtttcacaggagcttgctgaagtgaacaccatttccagaaagttgttctctcattttattcagattccgtctgtggctatacagatcaaagacataatgctttctgcaccagctgaaaggagactacagcttcaggacatggtccgagcttcagtcagtcaagggcagataacggtgccagtggctacgagtgcacactcagaacagaatattcaggatagttgcagtaaaaaccctgggtccacatctgaagcttctgattgtgttgcaactcacgggaataatgacaatgaagttgttgatgatgactgggatgacgattgggatgctttccaatctcttcctgcaattgcaaatgatggtgttgattctggagaaatctctcttacaactaggtacaatgaacagatccctcaagaaaatagcagttacggttcttgtaatgcggatattacagctcgtgctatggaagacataacttgtgtggacaaggaacttgaggagccctctgatttgcaattctcaagtactgaacaacagcctaaacatgatttaccagggtcatcccacgaaggttgtgctaaacttgaaagacatccatctgttgattgcaaagagcaattagctgatgatgagacagcagatgaactgcagcagcaggttcatgaagacactgatcatgtaaataaagatagcgaagttctctctgcagaaattcatggggttaaattggatatccttgatgaagatgttgaagatgattccccaatgaattcaaacaatctatcagatatcgcagaggaagagtcctagggttggtacaatgcaacgagggtggaccgcaagcttgtcgagatagtagagaagagctgtccggttcctctgatgctggcataccagattttagtatgtcaggacacgtgatgagcaagagcggaggaaatgagcaaaatgttattttgcctgtatcaatatatattgcacgagataaaaataatataaggttacaaccatgatttttattttgtgccttcctccgcccctccgcttctaaataaatagttacctttgaatgaatttcaagaaaacccaatcaagacttatgacatcaaattaatatcattaaatctaacatagaatatat

SEQ ID NO: 80177 - DNA, 5114 bp, Zea Mays
atggggagaatggcggcggtaggcgcggcgggagagagcgctgcccacacagggggggtgggaggtggctggctcaaggttgtccatgtggctgctattgcagagcgtgaagctggttggttgctattagcttctcttctagcatccatgccaaaagaggagctggaagaccaggtgtttgatgttcttttgctatgggcgggtccttttactggaaatcctgaatcttaccttcgtcatatacaggattgggcatcagaattgcgggttctgtcagttgcagttgaggcgcttactgccttcataagaagttttgtttatccatctatcacaactactgattgtggaatcttgcttaatcctgtacttgcctaccttggcggagctctatccctcatatcttcgttgagatctaaacaagtgcccaatgtaaggtctgcgctggacctactcacaactagaacattgatggcttattggtccctttcgaatccagtggtatataaaactgagcaccagcagatacttcagctatgctcaagtccgttcagtgatccttctggatgggaagaaagctcatgcttgaagtttttgttggataagagagatgcttcactgggcccatggatacctggaagggattcatttgaggatgaattacgtgcttttgatggtggtgctgatgggtttctaccgtgtgtgtgggatgatgaaatcagcaacttccctcagccagagtcaattcggaaaatgctcgtcaaccagatgcttctctgttatggttccatatttgcatgtcaggaaaacactgtcaagataagcctcttgaacaatcttgaccagtgcctgaagtctgggaagaagtacctgtggtttaagtttctcattacaaatgcatgtgttgctctattgtcagggttaaaggaattcctcgctttacgtggtgctcaatcattgccaattgatatattaagtatgattcagtccattttcaaggccattttagtagagcctgaaatttctacagcacagcggcgagcagcgtgcgagggtctcggtttattagcacgagctgggaatgatatctttacagcaaggatggctcgctctcttctcggagagctggtaacaacaacagatctgagctatacaacttctgttgcattttcattgggttgcatccatcgaagtgctggaggaatggcattatctactctggttaccccaactgtgagctcactatctcatttgagtaaaagctctaatttcaatctgcagttgtggtcactgcatgctcttcttttaacaattgaagctgctggcttgtcttatgtctcgcaagttcaggggacacttttccttgctatggagattctcctcttggaagaaaatggatatgttgatcttcgacaaggaattggtcatcttattaatgcaatagttgctgttattggtccagagcttgctcctgatagcacattcttttcacgatgcaagtctgttattgcagagataagttcatcaaatgaaatggctacacttttagaatcggttagattctcccagcagcttgtgctttttgctcctcaagctgttcctgtgcacttgcacgttcaaggtcttatcccaatgctttactcaagacagccaagtcttagatatttagcagtgtcgacactgcaccatctgattgaaagggacccggctgcaatgattgacgagaatattgaagagaatctgttcagtatgcttgatgaggagaccgattcagaaacagcgatgttggttcgtgcaactattattcgcttattgtatacatcatgtccagtatgtccatcacggtggctggcagttttacgaaatattgttcttgctacgtcaattagaagaaacacaggtgaagttctgtcatgttttgggcataatcctcctgatagtacatctgagaatgatgtgtactatggagaagatgaagacaacatgatttccagctcaaagcagcagcaaatccgctgtgctggttctatatccagccagtttcctccaaggaataaacacctcagatatcgtaccagggtttttgctgcagaatgcgttagccatgtaccaattgcagttggagcagaacctgctcattttgacctcttgttggcaaggagcgcaatatctcaaggcacttatttgtcaaatgattggctagtgcttaaactacaggaactggtctcactttcataccagattagtactgggcaatttgaaggaatgcaaccaataggtgtgaagcttttgtgtttgataatggacaagttcggcaaggcagtagatccggaatttcctggccatatcttgctggaacaatttcaggcccaacttgtttctgctgttagaatggctataagcactgcttctggtccacttcttttggaggctggacttgaactcgctacaagggttatgacgagcagcataattggtggggatagactagctcttagtcgcttgttttctctgataacacgcccgttaagtgacatagagggcctactatatccatcttttgctgactgggtagtgtgcaagataaaagttcgccttctaactgcccatgcagcagtcaagtgtaacacctatcaattcttgaggatgagggaaaatgctcctaatgaataccagcaattggcaccttcacttgtaaacagttcaactctattaggaaaatactggattcgagcactcaaggattatgtttctataagttttggtttgcactcaaaaatcaatgtaagacagtcaaacaagcctcaacaattcatttctaaggatcatataatcatataatggtttatattctatcctctgttacagtacaagccattccttgatgggattcagtcattattagtcttgtccaaggtgcagaggtatcttgatgaagtttggttattaattcttaaagcaacagctcttgatgccgcgcctttggattttgatgagaataatcctaaaaatttactcgaacaaacatttatatctgggcattgtatggtcaaattggacagaactgaattccaatttctttgggggttatctatccttgtgctgttccattcctgccaatcaatgaagaataattctttgaagatcaaccttgactttaaacaagacaaaaactttggggaatttattgttcatggacttgatgacaaaagaccgtgtgatcaggtcttacgcgtgctttcgtccctcacaacagaagtctttttcagcaataattttatttcagtggatatttgccagcaactcctccaggcacttacatatgcagattgttcaagcgctcctatcatccacctattcacccagattatcagattctgccctgacaatttttttgaggttgaagcctttgtcttctctgcaatagagttattgtctcagtatctgggtctgatacttcaatgggatgggagttctcagaataattcaagtaacactttgatttctgagttgtctattgcaagcgagacgatggcttatcggatcaaaggagagtatttgtggaagctggtgatgttagtggtatctacttcacaccaatcatttcaacaagtttcaactaatttatgcttctcaaatattatatgcttcctccaaaatatcttccctttcatgaggaaaatttttagagcttcaggctgtgcgtacaggttattcaaggttcatttcgtagtaccaacatacaggtgcacatgctgggtctgcaagtactgagaagctatgcacagaaggagctaactgaaggttcagaaacaaagttggattcttttatgatgttgcttacggaattgttgggagacttgtttttggtgatggagactacattgaagcacaatcaaagaaataccgacaagatgctacaactcttctgctggaggccttgctgatggttttctctctgtccagtgatactgtttcacaggagcttgctgaagtgaacaccatttccagaaagttgttctctcattttattcagattccgtctgtggctatacagatcaaagacataatgctttctgcaccagctgaaaggagactacagcttcaggacatggtccgagcttcagtcagtcaagggcagataacggtgccagtggctacgagtgcacactcagaacagaatattcaggatagttgcagtaaaaaccctgggtccacatctgaagcttctgattgtgttgcaactcacgggaataatgacaatgaagttgttgatgatgactgggatgacgattgggatgctttccaatctcttcctgcaattgcaaatgatggtgttgattctggagaaatctctcttacaactaggtacaatgaacagatccctcaagaaaatagcagttacggttcttgtaatgcggatattacagctcgtgctatggaagacataacttgtgtggacaaggaacttgaggagccctctgatttgcaattctcaagtactgaacaacagcctaaacatgatttaccagggtcatcccacgaaggttgtgctaaacttgaaagacatccatctgttgattgcaaagagcaattagctgatgatgagacagcagatgaactgcagcagcaggttcatgaagacactgatcatgtaaataaagatagcgaagttctctctgcagaaattcatggggttaaattggatatccttgatgaagatgttgaagatgattccccaatgaattcaaacaatctatcagatatcgcagaggaagagtcctagggttggtacaatgcaacgagggtggaccgcaagcttgtcgagatagtagagaagagctgtccggttcctctgatgctggcataccagattttagtatgtcaggacacgtgatgagcaagagcggaggaaatgagcaaaatgttattttgcctgtatcaatatatattgcacgagataaaaataatataaggttacaaccatgatttttattttgtgccttcctccgcccctccgcttctaaataaatagttacctttgaatgaatttcaagaaaacccaatcaagacttatgacatcaaattaatatcattaaatctaacatagaatatat

SEQ ID NO: 80178 - DNA, 4670 bp, Zea Mays
agaaaattgcccaactcatagtgtcatactttcgatgagaccagagtcaattcggaaaatgctcgtcaaccagatgcttctctgttatggttccatatttgcatgtcaggaaaacactgtcaagataagcctcttgaacaatcttgaccagtgcctgaagtctgggaagaagtacctgtggtttaagtttctcattacaaatgcatgtgttgctctattgtcagggttaaaggaattcctcgctttacgtggtgctcaatcattgccaattgatatattaagtatgattcagtccattttcaaggccattttagtagagcctgaaatttctacagcacagcggcgagcagcgtgcgagggtctcggtttattagcacgagctgggaatgatatctttacagcaaggatggctcgctctcttctcggagagctggtaacaacaacagatctgagctatacaacttctgttgcattttcattgggttgcatccatcgaagtgctggaggaatggcattatctactctggttaccccaactgtgagctcactatctcatttgagtaaaagctctaatttcaatctgcagttgtggtcactgcatgctcttcttttaacaattgaagctgctggcttgtcttatgtctcgcaagttcaggggacacttttccttgctatggagattctcctcttggaagaaaatggatatgttgatcttcgacaaggaattggtcatcttattaatgcaatagttgctgttattggtccagagcttgctcctgatagcacattcttttcacgatgcaagtctgttattgcagagataagttcatcaaatgaaatggctacacttttagaatcggttagattctcccagcagcttgtgctttttgctcctcaagctgttcctgtgcacttgcacgttcaaggtcttatcccaatgctttactcaagacagccaagtcttagatatttagcagtgtcgacactgcaccatctgattgaaagggacccggctgcaatgattgacgagaatattgaagagaatctgttcagtatgcttgatgaggagaccgattcagaaacagcgatgttggttcgtgcaactattattcgcttattgtatacatcatgtccagtatgtccatcacggtggctggcagttttacgaaatattgttcttgctacgtcaattagaagaaacacaggtgaagttctgtcatgttttgggcataatcctcctgatagtacatctgagaatgatgtgtactatggagaagatgaagacaacatgatttccagctcaaagcagcagcaaatccgctgtgctggttctatatccagccagtttcctccaaggaataaacacctcagatatcgtaccagggtttttgctgcagaatgcgttagccatgtaccaattgcagttggagcagaacctgctcattttgacctcttgttggcaaggagcgcaatatctcaaggcacttatttgtcaaatgattggctagtgcttaaactacaggaactggtctcactttcataccagattagtactgggcaatttgaaggaatgcaaccaataggtgtgaagcttttgtgtttgataatggacaagttcggcaaggcagtagatccggaatttcctggccatatcttgctggaacaatttcaggcccaacttgtttctgctgttagaatggctataagcactgcttctggtccacttcttttggaggctggacttgaactcgctacaagggttatgacgagcagcataattggtggggatagactagctcttagtcgcttgttttctctgataacacgcccgttaagtgacatagagggcctactatatccatcttttgctgactgggtagtgtgcaagataaaagttcgccttctaactgcccatgcagcagtcaagtgtaacacctatcaattcttgaggatgagggaaaatgctcctaatgaataccagcaattggcaccttcacttgtaaacagttcaactctattaggaaaatactggattcgagcactcaaggattatgtttctataagttttggtttgcactcaaaaatcaattacaagccattccttgatgggattcagtcattattagtcttgtccaaggtgcagaggtatcttgatgaagtttggttattaattcttaaagcaacagctcttgatgccgcgcctttggattttgatgagaataatcctaaaaatttactcgaacaaacatttatatctgggcattgtatggtcaaattggacagaactgaattccaatttctttgggggttatctatccttgtgctgttccattcctgccaatcaatgaagaataattctttgaagatcaaccttgactttaaacaagacaaaaactttggggaatttattgttcatggacttgatgacaaaagaccgtgtgatcaggtcttacgcgtgctttcgtccctcacaacagaagtctttttcagcaataattttatttcagtggatatttgccagcaactcctccaggcacttacatatgcagattgttcaagcgctcctatcatccacctattcacccagattatcagattctgccctgacaatttttttgaggttgaagcctttgtcttctctgcaatagagttattgtctcagtatctgggtctgatacttcaatgtagggatgggagttctcagaataattcaagtaacactttgatttctgagttgtctattgcaagcgagacgatggcttatcggatcaaaggagagtatttgtggaagctggtgatgttagtggtatctacttcacaccaatcatttcaacaagtttcaactaatttatgcttctcaaatattatatgcttcctccaaaatatcttccctttcatgaggaaaatttttagagaaagagtcgaatcagatggtgagtgcacaagtcctaaagttgtctttggtgctatggttggcctagtgggatacttctatgtagagtgtgataaaaagatctcattgctcgaaaacaagatttctgattcctacaagctgttgaataagatactacttttttgcttgggagaagccactgctcttgcaaaacttgttcctgagatcatttatcgaagtgaaaatgtaagtaacaatgatgtgctcctttggggcagcttcaggctgtgcgtacaggttattcaaggttcatttcgtagtaccaacatacaggtgcacatgctgggtctgcaagtactgagaagctatgcacagaaggagctaactgaaggttcagaaacaaagttggattcttttatgatgttgcttacggaattgttgggagacttgtttttggtgatggagactacattgaaggaatgttcaaacaaaaaatctgtcagtgtcgttgatgaatgtttgaaacttgttttcctcttccacacactagcacaatcaaagaaataccgacaagatgctacaactcttctgctggaggccttgctgatggttttctctctgtccagtgatactgtttcacaggagcttgctgaagtgaacaccatttccagaaagttgttctctcattttattcagattccgtctgtggctatacagatcaaagacataatgctttctgcaccagctgaaaggagactacagcttcaggacatggtccgagcttcagtcagtcaagggcagataacggtgccagtggctacgagtgcacactcagaacagaatattcaggatagttgcagtaaaaaccctgggtccacatctgaagcttctgattgtgttgcaactcacgggaataatgacaatgaagttgttgatgatgactgggatgacgattgggatgctttccaatctcttcctgcaattgcaaatgatggtgttgattctggagaaatctctcttacaactaggtacaatgaacagatccctcaagaaaatagcagttacggttcttgtaatgcggatattacagctcgtgctatggaagacataacttgtgtggacaaggaacttgaggagccctctgatttgcaattctcaagtactgaacaacagcctaaacatgatttaccagggtcatcccacgaaggttgtgctaaacttgaaagacatccatctgttgattgcaaagagcaattagctgatgatgagacagcagatgaactgcagcagcaggttcatgaagacactgatcatgtaaataaagatagcgaagttctctctgcagaaattcatggggttaaattggatatccttgatgaagatgttgaagatgattccccaatgaattcaaacaatctatcagatatcgcagaggaagagtcctagggttggtacaatgcaacgagggtggaccgcaagcttgtcgagatagtagagaagagctgtccggttcctctgatgctggcataccagattttagtatgtcaggacacgtgatgagcaagagcggaggaaatgagcaaaatgttattttgcctgtatcaatatatattgcacgagataaaaataatataaggttacaaccatgatttttattttgtgccttcctccgcccctccgcttctaaataaatagttacctttgaatgaatttcaagaaaacccaatcaagacttatgacatcaaattaatatcattaaatctaacatagaatatat

SEQ ID NO: 80179 - DNA, 3473 bp, Zea Mays
aaaaaaatgcctgtcatcatcacaataaactcaatgaagaccaccacgaccccatgcgcagaaagagacataaccgaagacgacaccatatgcgaagactacaaaatgcagatgagtctcctcattgtgtacacaagaaagaacatccatcagagagacgcaaggatgatgagcgagcagctgagcacgaagggctcaaactcgtcatgaagccgggtcaagtagtcataggttcttgctacgtcaattagaagaaacacaggtgaagttctgtcatgttttgggcataatcctcctgatagtacatctgagaatgatgtgtactatggagaagatgaagacaacatgatttccagctcaaagcagcagcaaatccgctgtgctggttctatatccagccagtttcctccaaggaataaacacctcagatatcgtaccagggtttttgctgcagaatgcgttagccatgtaccaattgcagttggagcagaacctgctcattttgacctcttgttggcaaggagcgcaatatctcaaggcacttatttgtcaaatgattggctagtgcttaaactacaggaactggtctcactttcataccagattagtactgggcaatttgaaggaatgcaaccaataggtgtgaagcttttgtgtttgataatggacaagttcggcaaggcagtagatccggaatttcctggccatatcttgctggaacaatttcaggcccaacttgtttctgctgttagaatggctataagcactgcttctggtccacttcttttggaggctggacttgaactcgctacaagggttatgacgagcagcataattggtggggatagactagctcttagtcgcttgttttctctgataacacgcccgttaagtgacatagagggcctactatatccatcttttgctgactgggtagtgtgcaagataaaagttcgccttctaactgcccatgcagcagtcaagtgtaacacctatcaattcttgaggatgagggaaaatgctcctaatgaataccagcaattggcaccttcacttgtaaacagttcaactctattaggaaaatactggattcgagcactcaaggattatgtttctataagttttggtttgcactcaaaaatcaattacaagccattccttgatgggattcagtcattattagtcttgtccaaggtgcagaggtatcttgatgaagtttggttattaattcttaaagcaacagctcttgatgccgcgcctttggattttgatgagaataatcctaaaaatttactcgaacaaacatttatatctgggcattgtatggtcaaattggacagaactgaattccaatttctttgggggttatctatccttgtgctgttccattcctgccaatcaatgaagaataattctttgaagatcaaccttgactttaaacaagacaaaaactttggggaatttattgttcatggacttgatgacaaaagaccgtgtgatcaggtcttacgcgtgctttcgtccctcacaacagaagtctttttcagcaataattttatttcagtggatatttgccagcaactcctccagaggcacttacatatgcagattgttcaagcgctcctatcatccacctattcacccagattatcagattctgccctgacaatttttttgaggttgaagcctttgtcttctctgcaatagagttattgtctcagtatctgggtctgatacttcaatgtagggatgggagttctcagaataattcaagtaacactttgatttctgagttgtctattgcaagcgagacgatggcttatcggatcaaaggagagtatttgtggaagctggtgatgttagtggtatctacttcacaccaatcatttcaacaagtttcaactaatttatgcttctcaaatattatatgcttcctccaaaatatcttccctttcatgaggaaaatttttagagcttcaggctgtgcgtacaggttattcaaggttcatttcgtagtaccaacatacaggtgcacatgctgggtctgcaagtactgagaagctatgcacagaaggagctaactgaaggttcagaaacaaagttggattcttttatgatgttgcttacggaattgttgggagacttgtttttggtgatggagactacattgaaggaatgttcaaacaaaaaatctgtcagtgtcgttgatgaatgtttgaaacttgttttcctcttccacacactagcacaatcaaagaaataccgacaagatgctacaactcttctgctggaggccttgctgatggttttctctctgtccagtgatactgtttcacaggagcttgctgaagtgaacaccatttccagaaagttgttctctcattttattcagattccgtctgtggctatacagatcaaagacataatgctttctgcaccagctgaaaggagactacagcttcaggacatggtccgagcttcagtcagtcaagggcagataacggtgccagtggctacgagtgcacactcagaacagaatattcaggatagttgcagtaaaaaccctgggtccacatctgaagcttctgattgtgttgcaactcacgggaataatgacaatgaagttgttgatgatgactgggatgacgattgggatgctttccaatctcttcctgcaattgcaaatgatggtgttgattctggagaaatctctcttacaactaggtacaatgaacagatccctcaagaaaatagcagttacggttcttgtaatgcggatattacagctcgtgctatggaagacataacttgtgtggacaaggaacttgaggagccctctgatttgcaattctcaagtactgaacaacagcctaaacatgatttaccagggtcatcccacgaaggttgtgctaaacttgaaagacatccatctgttgattgcaaagagcaattagctgatgatgagacagcagatgaactgcagcagcaggttcatgaagacactgatcatgtaaataaagatagcgaagttctctctgcagaaattcatggggttaaattggatatccttgatgaagatgttgaagatgattccccaatgaattcaaacaatctatcagatatcgcagaggaagagtcctagggttggtacaatgcaacgagggtggaccgcaagcttgtcgagatagtagagaagagctgtccggttcctctgatgctggcataccagattttagtatgtcaggacacgtgatgagcaagagcggaggaaatgagcaaaatgttattttgcctgtatcaatatatattgcacgagataaaaataatataaggttacaaccatgatttttattttgtgccttcctccgcccctccgcttctaaataaatagttacctttgaatgaatttcaagaaaacccaatcaagacttatgacatcaaattaatatcattaaatctaacatagaatatat

SEQ ID NO: 80180 - DNA, 3517 bp, Zea Mays
aaagaacatccatcagagagacgcaaggatgatgagcgagcagctgagcacgaagggctcaaactcgtcatgaagccgggtcaagtagtcataggttcttgctacgtcaattagaagaaacacaggtgaagttctgtcatgttttgggcataatcctcctgatagtacatctgagaatgatgtgtactatggagaagatgaagacaacatgatttccagctcaaagcagcagcaaatccgctgtgctggttctatatccagccagtttcctccaaggaataaacacctcagatatcgtaccagggtttttgctgcagaatgcgttagccatgtaccaattgcagttggagcagaacctgctcattttgacctcttgttggcaaggagcgcaatatctcaaggcacttatttgtcaaatgattggctagtgcttaaactacaggaactggtctcactttcataccagattagtactgggcaatttgaaggaatgcaaccaataggtgtgaagcttttgtgtttgataatggacaagttcggcaaggcagtagatccggaatttcctggccatatcttgctggaacaatttcaggcccaacttgtttctgctgttagaatggctataagcactgcttctggtccacttcttttggaggctggacttgaactcgctacaagggttatgacgagcagcataattggtggggatagactagctcttagtcgcttgttttctctgataacacgcccgttaagtgacatagagggcctactatatccatcttttgctgactgggtagtgtgcaagataaaagttcgccttctaactgcccatgcagcagtcaagtgtaacacctatcaattcttgaggatgagggaaaatgctcctaatgaataccagcaattggcaccttcacttgtaaacagttcaactctattaggaaaatactggattcgagcactcaaggattatgtttctataagttttggtttgcactcaaaaatcaattacaagccattccttgatgggattcagtcattattagtcttgtccaaggtgcagaggtatcttgatgaagtttggttattaattcttaaagcaacagctcttgatgccgcgcctttggattttgatgagaataatcctaaaaatttactcgaacaaacatttatatctgggcattgtatggtcaaattggacagaactgaattccaatttctttgggggttatctatccttgtgctgttccattcctgccaatcaatgaagaataattctttgaagatcaaccttgactttaaacaagacaaaaactttggggaatttattgttcatggacttgatgacaaaagaccgtgtgatcaggtcttacgcgtgctttcgtccctcacaacagaagtctttttcagcaataattttatttcagtggatatttgccagcaactcctccaggcacttacatatgcagattgttcaagcgctcctatcatccacctattcacccagattatcagattctgccctgacaatttttttgaggttgaagcctttgtcttctctgcaatagagttattgtctcagtatctgggtctgatacttcaatgtagggatgggagttctcagaataattcaagtaacactttgatttctgagttgtctattgcaagcgagacgatggcttatcggatcaaaggagagtatttgtggaagctggtgatgttagtggtatctacttcacaccaatcatttcaacaagtttcaactaatttatgcttctcaaatattatatgcttcctccaaaatatcttccctttcatgaggaaaatttttagagaaagagtcgaatcagatggtgagtgcacaagtcctaaagttgtctttggtgctatggttggcctagtgggatacttctatgtagagtgtgataaaaagatctcattgctcgaaaacaagatttctgattcctacaagctgttgaataagatactacttttttgcttgggagaagccactgctcttgcaaaacttgttcctgagatcatttatcgaagtgaaaatgtaagtaacaatgatgtgctcctttggggcagcttcaggctgtgcgtacaggttattcaaggttcatttcgtagtaccaacatacaggtgcacatgctgggtctgcaagtactgagaagctatgcacagaaggagctaactgaaggttcagaaacaaagttggattcttttatgatgttgcttacggaattgttgggagacttgtttttggtgatggagactacattgaagcacaatcaaagaaataccgacaagatgctacaactcttctgctggaggccttgctgatggttttctctctgtccagtgatactgtttcacaggagcttgctgaagtgaacaccatttccagaaagttgttctctcattttattcagattccgtctgtggctatacagatcaaagacataatgctttctgcaccagctgaaaggagactacagcttcaggacatggtccgagcttcagtcagtcaagggcagataacggtgccagtggctacgagtgcacactcagaacagaatattcaggatagttgcagtaaaaaccctgggtccacatctgaagcttctgattgtgttgcaactcacgggaataatgacaatgaagttgttgatgatgactgggatgacgattgggatgctttccaatctcttcctgcaattgcaaatgatggtgttgattctggagaaatctctcttacaactaggtacaatgaacagatccctcaagaaaatagcagttacggttcttgtaatgcggatattacagctcgtgctatggaagacataacttgtgtggacaaggaacttgaggagccctctgatttgcaattctcaagtactgaacaacagcctaaacatgatttaccagggtcatcccacgaaggttgtgctaaacttgaaagacatccatctgttgattgcaaagagcaattagctgatgatgagacagcagatgaactgcagcagcaggttcatgaagacactgatcatgtaaataaagatagcgaagttctctctgcagaaattcatggggttaaattggatatccttgatgaagatgttgaagatgattccccaatgaattcaaacaatctatcagatatcgcagaggaagagtcctagggttggtacaatgcaacgagggtggaccgcaagcttgtcgagatagtagagaagagctgtccggttcctctgatgctggcataccagattttagtatgtcaggacacgtgatgagcaagagcggaggaaatgagcaaaatgttattttgcctgtatcaatatatattgcacgagataaaaataatataaggttacaaccatgatttttattttgtgccttcctccgcccctccgcttctaaataaatagttacctttgaatgaatttcaagaaaacccaatcaagacttatgacatcaaattaatatcattaaatctaacatagaatatat

SEQ ID NO: 80181 - DNA, 3527 bp, Zea Mays
ctcgtcatgaagccgggtcaagtagtcataggttcttgctacgtcaattagaagaaacacaggtgaagttctgtcatgttttgggcataatcctcctgatagtacatctgagaatgatgtgtactatggagaagatgaagacaacatgatttccagctcaaagcagcagcaaatccgctgtgctggttctatatccagccagtttcctccaaggaataaacacctcagatatcgtaccagggtttttgctgcagaatgcgttagccatgtaccaattgcagttggagcagaacctgctcattttgacctcttgttggcaaggagcgcaatatctcaaggcacttatttgtcaaatgattggctagtgcttaaactacaggaactggtctcactttcataccagattagtactgggcaatttgaaggaatgcaaccaataggtgtgaagcttttgtgtttgataatggacaagttcggcaaggcagtagatccggaatttcctggccatatcttgctggaacaatttcaggcccaacttgtttctgctgttagaatggctataagcactgcttctggtccacttcttttggaggctggacttgaactcgctacaagggttatgacgagcagcataattggtggggatagactagctcttagtcgcttgttttctctgataacacgcccgttaagtgacatagagggcctactatatccatcttttgctgactgggtagtgtgcaagataaaagttcgccttctaactgcccatgcagcagtcaagtgtaacacctatcaattcttgaggatgagggaaaatgctcctaatgaataccagcaattggcaccttcacttgtaaacagttcaactctattaggaaaatactggattcgagcactcaaggattatgtttctataagttttggtttgcactcaaaaatcaattacaagccattccttgatgggattcagtcattattagtcttgtccaaggtgcagaggtatcttgatgaagtttggttattaattcttaaagcaacagctcttgatgccgcgcctttggattttgatgagaataatcctaaaaatttactcgaacaaacatttatatctgggcattgtatggtcaaattggacagaactgaattccaatttctttgggggttatctatccttgtgctgttccattcctgccaatcaatgaagaataattctttgaagatcaaccttgactttaaacaagacaaaaactttggggaatttattgttcatggacttgatgacaaaagaccgtgtgatcaggtcttacgcgtgctttcgtccctcacaacagaagtctttttcagcaataattttatttcagtggatatttgccagcaactcctccaggcacttacatatgcagattgttcaagcgctcctatcatccacctattcacccagattatcagattctgccctgacaatttttttgaggttgaagcctttgtcttctctgcaatagagttattgtctcagtatctgggtctgatacttcaatgtagggatgggagttctcagaataattcaagtaacactttgatttctgagttgtctattgcaagcgagacgatggcttatcggatcaaaggagagtatttgtggaagctggtgatgttagtggtatctacttcacaccaatcatttcaacaagtttcaactaatttatgcttctcaaatattatatgcttcctccaaaatatcttccctttcatgaggaaaatttttagagaaagagtcgaatcagatggtgagtgcacaagtcctaaagttgtctttggtgctatggttggcctagtgggatacttctatgtagagtgtgataaaaagatctcattgctcgaaaacaagatttctgattcctacaagctgttgaataagatactacttttttgcttgggagaagccactgctcttgcaaaacttgttcctgagatcatttatcgaagtgaaaatgtaagtaacaatgatgtgctcctttggggcagcttcaggctgtgcgtacaggttattcaaggttcatttcgtagtaccaacatacaggtgcacatgctgggtctgcaagtactgagaagctatgcacagaaggagctaactgaaggttcagaaacaaagttggattcttttatgatgttgcttacggaattgttgggagacttgtttttggtgatggagactacattgaaggaatgttcaaacaaaaaatctgtcagtgtcgttgatgaatgtttgaaacttgttttcctcttccacacactagcacaatcaaagaaataccgacaagatgctacaactcttctgctggaggccttgctgatggttttctctctgtccagtgatactgtttcacaggagcttgctgaagtgaacaccatttccagaaagttgttctctcattttattcagattccgtctgtggctatacagatcaaagacataatgctttctgcaccagctgaaaggagactacagcttcaggacatggtccgagcttcagtcagtcaagggcagataacggtgccagtggctacgagtgcacactcagaacagaatattcaggatagttgcagtaaaaaccctgggtccacatctgaagcttctgattgtgttgcaactcacgggaataatgacaatgaagttgttgatgatgactgggatgacgattgggatgctttccaatctcttcctgcaattgcaaatgatggtgttgattctggagaaatctctcttacaactaggtacaatgaacagatccctcaagaaaatagcagttacggttcttgtaatgcggatattacagctcgtgctatggaagacataacttgtgtggacaaggaacttgaggagccctctgatttgcaattctcaagtactgaacaacagcctaaacatgatttaccagggtcatcccacgaaggttgtgctaaacttgaaagacatccatctgttgattgcaaagagcaattagctgatgatgagacagcagatgaactgcagcagcaggttcatgaagacactgatcatgtaaataaagatagcgaagttctctctgcagaaattcatggggttaaattggatatccttgatgaagatgttgaagatgattccccaatgaattcaaacaatctatcagatatcgcagaggaagagtcctagggttggtacaatgcaacgagggtggaccgcaagcttgtcgagatagtagagaagagctgtccggttcctctgatgctggcataccagattttagtatgtcaggacacgtgatgagcaagagcggaggaaatgagcaaaatgttattttgcctgtatcaatatatattgcacgagataaaaataatataaggttacaaccatgatttttattttgtgccttcctccgcccctccgcttctaaataaatagttacctttgaatgaatttcaagaaaacccaatcaagacttatgacatcaaattaatatcattaaatctaacatagaatatat

SEQ ID NO: 80182 - DNA, 3096 bp, Zea Mays
atggcctggagataaattaattttctagtgtgtaccatgatttcggcaaggcagtagatccggaatttcctggccatatcttgctggaacaatttcaggcccaacttgtttctgctgttagaatggctataagcactgcttctggtccacttcttttggaggctggacttgaactcgctacaagggttatgacgagcagcataattggtggggatagactagctcttagtcgcttgttttctctgataacacgcccgttaagtgacatagagggcctactatatccatcttttgctgactgggtagtgtgcaagataaaagttcgccttctaactgcccatgcagcagtcaagtgtaacacctatcaattcttgaggatgagggaaaatgctcctaatgaataccagcaattggcaccttcacttgtaaacagttcaactctattaggaaaatactggattcgagcactcaaggattatgtttctataagttttggtttgcactcaaaaatcaattacaagccattccttgatgggattcagtcattattagtcttgtccaaggtgcagaggtatcttgatgaagtttggttattaattcttaaagcaacagctcttgatgccgcgcctttggattttgatgagaataatcctaaaaatttactcgaacaaacatttatatctgggcattgtatggtcaaattggacagaactgaattccaatttctttgggggttatctatccttgtgctgttccattcctgccaatcaatgaagaataattctttgaagatcaaccttgactttaaacaagacaaaaactttggggaatttattgttcatggacttgatgacaaaagaccgtgtgatcaggtcttacgcgtgctttcgtccctcacaacagaagtctttttcagcaataattttatttcagtggatatttgccagcaactcctccaggcacttacatatgcagattgttcaagcgctcctatcatccacctattcacccagattatcagattctgccctgacaatttttttgaggttgaagcctttgtcttctctgcaatagagttattgtctcagtatctgggtctgatacttcaatgtagggatgggagttctcagaataattcaagtaacactttgatttctgagttgtctattgcaagcgagacgatggcttatcggatcaaaggagagtatttgtggaagctggtgatgttagtggtatctacttcacaccaatcatttcaacaagtttcaactaatttatgcttctcaaatattatatgcttcctccaaaatatcttccctttcatgaggaaaatttttagagaaagagtcgaatcagatggtgagtgcacaagtcctaaagttgtctttggtgctatggttggcctagtgggatacttctatgtagagtgtgataaaaagatctcattgctcgaaaacaagatttctgattcctacaagctgttgaataagatactacttttttgcttgggagaagccactgctcttgcaaaacttgttcctgagatcatttatcgaagtgaaaatgtaagtaacaatgatgtgctcctttggggcagcttcaggctgtgcgtacaggttattcaaggttcatttcgtagtaccaacatacaggtgcacatgctgggtctgcaagtactgagaagctatgcacagaaggagctaactgaaggttcagaaacaaagttggattcttttatgatgttgcttacggaattgttgggagacttgtttttggtgatggagactacattgaaggaatgttcaaacaaaaaatctgtcagtgtcgttgatgaatgtttgaaacttgttttcctcttccacacactagcacaatcaaagaaataccgacaagatgctacaactcttctgctggaggccttgctgatggttttctctctgtccagtgatactgtttcacaggagcttgctgaagtgaacaccatttccagaaagttgttctctcattttattcagattccgtctgtggctatacagatcaaagacataatgctttctgcaccagctgaaaggagactacagcttcaggacatggtccgagcttcagtcagtcaagggcagataacggtgccagtggctacgagtgcacactcagaacagaatattcaggatagttgcagtaaaaaccctgggtccacatctgaagcttctgattgtgttgcaactcacgggaataatgacaatgaagttgttgatgatgactgggatgacgattgggatgctttccaatctcttcctgcaattgcaaatgatggtgttgattctggagaaatctctcttacaactaggtacaatgaacagatccctcaagaaaatagcagttacggttcttgtaatgcggatattacagctcgtgctatggaagacataacttgtgtggacaaggaacttgaggagccctctgatttgcaattctcaagtactgaacaacagcctaaacatgatttaccagggtcatcccacgaaggttgtgctaaacttgaaagacatccatctgttgattgcaaagagcaattagctgatgatgagacagcagatgaactgcagcagcaggttcatgaagacactgatcatgtaaataaagatagcgaagttctctctgcagaaattcatggggttaaattggatatccttgatgaagatgttgaagatgattccccaatgaattcaaacaatctatcagatatcgcagaggaagagtcctagggttggtacaatgcaacgagggtggaccgcaagcttgtcgagatagtagagaagagctgtccggttcctctgatgctggcataccagattttagtatgtcaggacacgtgatgagcaagagcggaggaaatgagcaaaatgttattttgcctgtatcaatatatattgcacgagataaaaataatataaggttacaaccatgatttttattttgtgccttcctccgcccctccgcttctaaataaatagttacctttgaatgaatttcaagaaaacccaatcaagacttatgacatcaaattaatatcattaaatctaacatagaatatat

SEQ ID NO: 80183 - DNA, 3088 bp, Zea Mays
ctggagataaattaattttctagtgtgtaccatgatttcggcaaggcagtagatccggaatttcctggccatatcttgctggaacaatttcaggcccaacttgtttctgctgttagaatggctataagcactgcttctggtccacttcttttggaggctggacttgaactcgctacaagggttatgacgagcagcataattggtggggatagactagctcttagtcgcttgttttctctgataacacgcccgttaagtgacatagagggcctactatatccatcttttgctgactgggtagtgtgcaagataaaagttcgccttctaactgcccatgcagcagtcaagtgtaacacctatcaattcttgaggatgagggaaaatgctcctaatgaataccagcaattggcaccttcacttgtaaacagttcaactctattaggaaaatactggattcgagcactcaaggattatgtttctataagttttggtttgcactcaaaaatcaattacaagccattccttgatgggattcagtcattattagtcttgtccaaggtgcagaggtatcttgatgaagtttggttattaattcttaaagcaacagctcttgatgccgcgcctttggattttgatgagaataatcctaaaaatttactcgaacaaacatttatatctgggcattgtatggtcaaattggacagaactgaattccaatttctttgggggttatctatccttgtgctgttccattcctgccaatcaatgaagaataattctttgaagatcaaccttgactttaaacaagacaaaaactttggggaatttattgttcatggacttgatgacaaaagaccgtgtgatcaggtcttacgcgtgctttcgtccctcacaacagaagtctttttcagcaataattttatttcagtggatatttgccagcaactcctccaggcacttacatatgcagattgttcaagcgctcctatcatccacctattcacccagattatcagattctgccctgacaatttttttgaggttgaagcctttgtcttctctgcaatagagttattgtctcagtatctgggtctgatacttcaatgggatgggagttctcagaataattcaagtaacactttgatttctgagttgtctattgcaagcgagacgatggcttatcggatcaaaggagagtatttgtggaagctggtgatgttagtggtatctacttcacaccaatcatttcaacaagtttcaactaatttatgcttctcaaatattatatgcttcctccaaaatatcttccctttcatgaggaaaatttttagagaaagagtcgaatcagatggtgagtgcacaagtcctaaagttgtctttggtgctatggttggcctagtgggatacttctatgtagagtgtgataaaaagatctcattgctcgaaaacaagatttctgattcctacaagctgttgaataagatactacttttttgcttgggagaagccactgctcttgcaaaacttgttcctgagatcatttatcgaagtgaaaatgtaagtaacaatgatgtgctcctttggggcagcttcaggctgtgcgtacaggttattcaaggttcatttcgtagtaccaacatacaggtgcacatgctgggtctgcaagtactgagaagctatgcacagaaggagctaactgaaggttcagaaacaaagttggattcttttatgatgttgcttacggaattgttgggagacttgtttttggtgatggagactacattgaaggaatgttcaaacaaaaaatctgtcagtgtcgttgatgaatgtttgaaacttgttttcctcttccacacactagcacaatcaaagaaataccgacaagatgctacaactcttctgctggaggccttgctgatggttttctctctgtccagtgatactgtttcacaggagcttgctgaagtgaacaccatttccagaaagttgttctctcattttattcagattccgtctgtggctatacagatcaaagacataatgctttctgcaccagctgaaaggagactacagcttcaggacatggtccgagcttcagtcagtcaagggcagataacggtgccagtggctacgagtgcacactcagaacagaatattcaggatagttgcagtaaaaaccctgggtccacatctgaagcttctgattgtgttgcaactcacgggaataatgacaatgaagttgttgatgatgactgggatgacgattgggatgctttccaatctcttcctgcaattgcaaatgatggtgttgattctggagaaatctctcttacaactaggtacaatgaacagatccctcaagaaaatagcagttacggttcttgtaatgcggatattacagctcgtgctatggaagacataacttgtgtggacaaggaacttgaggagccctctgatttgcaattctcaagtactgaacaacagcctaaacatgatttaccagggtcatcccacgaaggttgtgctaaacttgaaagacatccatctgttgattgcaaagagcaattagctgatgatgagacagcagatgaactgcagcagcaggttcatgaagacactgatcatgtaaataaagatagcgaagttctctctgcagaaattcatggggttaaattggatatccttgatgaagatgttgaagatgattccccaatgaattcaaacaatctatcagatatcgcagaggaagagtcctagggttggtacaatgcaacgagggtggaccgcaagcttgtcgagatagtagagaagagctgtccggttcctctgatgctggcataccagattttagtatgtcaggacacgtgatgagcaagagcggaggaaatgagcaaaatgttattttgcctgtatcaatatatattgcacgagataaaaataatataaggttacaaccatgatttttattttgtgccttcctccgcccctccgcttctaaataaatagttacctttgaatgaatttcaagaaaacccaatcaagacttatgacatcaaattaatatcattaaatctaacatagaatatat

SEQ ID NO: 80184 - DNA, 2839 bp, Zea Mays
attttctagtgtgtaccatgatttcggcaaggcagtagatccggaatttcctggccatatcttgctggaacaatttcaggcccaacttgtttctgctgttagaatggctataagcactgcttctggtccacttcttttggaggctggacttgaactcgctacaagggttatgacgagcagcataattggtggggatagactagctcttagtcgcttgttttctctgataacacgcccgttaagtgacatagagggcctactatatccatcttttgctgactgggtagtgtgcaagataaaagttcgccttctaactgcccatgcagcagtcaagtgtaacacctatcaattcttgaggatgagggaaaatgctcctaatgaataccagcaattggcaccttcacttgtaaacagttcaactctattaggaaaatactggattcgagcactcaaggattatgtttctataagttttggtttgcactcaaaaatcaattacaagccattccttgatgggattcagtcattattagtcttgtccaaggtgcagaggtatcttgatgaagtttggttattaattcttaaagcaacagctcttgatgccgcgcctttggattttgatgagaataatcctaaaaatttactcgaacaaacatttatatctgggcattgtatggtcaaattggacagaactgaattccaatttctttgggggttatctatccttgtgctgttccattcctgccaatcaatgaagaataattctttgaagatcaaccttgactttaaacaagacaaaaactttggggaatttattgttcatggacttgatgacaaaagaccgtgtgatcaggtcttacgcgtgctttcgtccctcacaacagaagtctttttcagcaataattttatttcagtggatatttgccagcaactcctccaggcacttacatatgcagattgttcaagcgctcctatcatccacctattcacccagattatcagattctgccctgacaatttttttgaggttgaagcctttgtcttctctgcaatagagttattgtctcagtatctgggtctgatacttcaatgtagggatgggagttctcagaataattcaagtaacactttgatttctgagttgtctattgcaagcgagacgatggcttatcggatcaaaggagagtatttgtggaagctggtgatgttagtggtatctacttcacaccaatcatttcaacaagtttcaactaatttatgcttctcaaatattatatgcttcctccaaaatatcttccctttcatgaggaaaatttttagagaaagagtcgaatcagatgcttcaggctgtgcgtacaggttattcaaggttcatttcgtagtaccaacatacaggtgcacatgctgggtctgcaagtactgagaagctatgcacagaaggagctaactgaaggttcagaaacaaagttggattcttttatgatgttgcttacggaattgttgggagacttgtttttggtgatggagactacattgaaggaatgttcaaacaaaaaatctgtcagtgtcgttgatgaatgtttgaaacttgttttcctcttccacacactagcacaatcaaagaaataccgacaagatgctacaactcttctgctggaggccttgctgatggttttctctctgtccagtgatactgtttcacaggagcttgctgaagtgaacaccatttccagaaagttgttctctcattttattcagattccgtctgtggctatacagatcaaagacataatgctttctgcaccagctgaaaggagactacagcttcaggacatggtccgagcttcagtcagtcaagggcagataacggtgccagtggctacgagtgcacactcagaacagaatattcaggatagttgcagtaaaaaccctgggtccacatctgaagcttctgattgtgttgcaactcacgggaataatgacaatgaagttgttgatgatgactgggatgacgattgggatgctttccaatctcttcctgcaattgcaaatgatggtgttgattctggagaaatctctcttacaactaggtacaatgaacagatccctcaagaaaatagcagttacggttcttgtaatgcggatattacagctcgtgctatggaagacataacttgtgtggacaaggaacttgaggagccctctgatttgcaattctcaagtactgaacaacagcctaaacatgatttaccagggtcatcccacgaaggttgtgctaaacttgaaagacatccatctgttgattgcaaagagcaattagctgatgatgagacagcagatgaactgcagcagcaggttcatgaagacactgatcatgtaaataaagatagcgaagttctctctgcagaaattcatggggttaaattggatatccttgatgaagatgttgaagatgattccccaatgaattcaaacaatctatcagatatcgcagaggaagagtcctagggttggtacaatgcaacgagggtggaccgcaagcttgtcgagatagtagagaagagctgtccggttcctctgatgctggcataccagattttagtatgtcaggacacgtgatgagcaagagcggaggaaatgagcaaaatgttattttgcctgtatcaatatatattgcacgagataaaaataatataaggttacaaccatgatttttattttgtgccttcctccgcccctccgcttctaaataaatagttacctttgaatgaatttcaagaaaacccaatcaagacttatgacatcaaattaatatcattaaatctaacatagaatatat

SEQ ID NO: 80185 - DNA, 2136 bp, Zea Mays
cccatctgctacggatagtctgtctctaacatcagctgtaataccccttaccgattatcagattctgccctgacaatttttttgaggttgaagcctttgtcttctctgcaatagagttattgtctcagtatctgggtctgatacttcaatgtagggatgggagttctcagaataattcaagtaacactttgatttctgagttgtctattgcaagcgagacgatggcttatcggatcaaaggagagtatttgtggaagctggtgatgttagtggtatctacttcacaccaatcatttcaacaagtttcaactaatttatgcttctcaaatattatatgcttcctccaaaatatcttccctttcatgaggaaaatttttagagaaagagtcgaatcagatggtgagtgcacaagtcctaaagttgtctttggtgctatggttggcctagtgggatacttctatgtagagtgtgataaaaagatctcattgctcgaaaacaagatttctgattcctacaagctgttgaataagatactacttttttgcttgggagaagccactgctcttgcaaaacttgttcctgagatcatttatcgaagtgaaaatgtaagtaacaatgatgtgctcctttggggcagcttcaggctgtgcgtacaggttattcaaggttcatttcgtagtaccaacatacaggtgcacatgctgggtctgcaagtactgagaagctatgcacagaaggagctaactgaaggttcagaaacaaagttggattcttttatgatgttgcttacggaattgttgggagacttgtttttggtgatggagactacattgaaggaatgttcaaacaaaaaatctgtcagtgtcgttgatgaatgtttgaaacttgttttcctcttccacacactagcacaatcaaagaaataccgacaagatgctacaactcttctgctggaggccttgctgatggttttctctctgtccagtgatactgtttcacaggagcttgctgaagtgaacaccatttccagaaagttgttctctcattttattcagattccgtctgtggctatacagatcaaagacataatgctttctgcaccagctgaaaggagactacagcttcaggacatggtccgagcttcagtcagtcaagggcagataacggtgccagtggctacgagtgcacactcagaacagaatattcaggatagttgcagtaaaaaccctgggtccacatctgaagcttctgattgtgttgcaactcacgggaataatgacaatgaagttgttgatgatgactgggatgacgattgggatgctttccaatctcttcctgcaattgcaaatgatggtgttgattctggagaaatctctcttacaactaggtacaatgaacagatccctcaagaaaatagcagttacggttcttgtaatgcggatattacagctcgtgctatggaagacataacttgtgtggacaaggaacttgaggagccctctgatttgcaattctcaagtactgaacaacagcctaaacatgatttaccagggtcatcccacgaaggttgtgctaaacttgaaagacatccatctgttgattgcaaagagcaattagctgatgatgagacagcagatgaactgcagcagcaggttcatgaagacactgatcatgtaaataaagatagcgaagttctctctgcagaaattcatggggttaaattggatatccttgatgaagatgttgaagatgattccccaatgaattcaaacaatctatcagatatcgcagaggaagagtcctagggttggtacaatgcaacgagggtggaccgcaagcttgtcgagatagtagagaagagctgtccggttcctctgatgctggcataccagattttagtatgtcaggacacgtgatgagcaagagcggaggaaatgagcaaaatgttattttgcctgtatcaatatatattgcacgagataaaaataatataaggttacaaccatgatttttattttgtgccttcctccgcccctccgcttctaaataaatagttacctttgaatgaatttcaagaaaacccaatcaagacttatgacatcaaattaatatcattaaatctaacatagaatatat

SEQ ID NO: 80186 - DNA, 1587 bp, Zea Mays
atgatgctgctttgctagcccttcctagactcatcaatattgtcacacccggatttagggggccaaacctgggcgcgattcacatgtgtgctaggatcaagtctcacacatatgataactcatggtacagaaatgaatgtaacatcatttatatataatggagttctatacaaaatagttaagtaattacatcatacgaagacaacgatccagcaaccaaagttgactgggagacgatggcctagaccactcatgaactcatcacagcatccttcatgcgcctcatcctacggtacctattcttgacctggggggatctgagtacagcaagggtgagctcacatacgttcatcgctcaacaagttgtggggaataatgtgcatgaactcatcgaaggtgggatctcatgtgaagtgtaaggcttaccaaaggagatggttaaagctaagcattgcttttagagttggtcagaattttattagcatttactatgcataagtagataccaacccaattaaataaaagatcacaattgataataacacccacgacgcaatgcatctaacagattaagtttagttccataagttaatcatgcgagagtcctgagtcgctcttgaccgtgagcatggctgatataccagttttacactctgcagaggttgcgccctttacccacaagtcgtgtatcccgtctagccagggtttcaaggctcttagacacttccgaggtgaatggctagggatccactatgaggcctttacaaagttccactagctttagaaaacccgctacggtttctaagaagggcaatataggaatccctcgtccgaaaagccatcgcagcatgatcgacccgagaacctccctatacacagctcctctatcgcccttgccccttttggttaaggtagtgctccactagctttcctaattagtcgaccaagggcgtcccattccacccttgtggtatcatggatatctcaagttaagctccatgttcggatgttccaatcaacacaatgatcttgtcatgaacaataattaaaacaacagcataactgggaacaggatcataatgtaacattaatcccaaaaccaggtagagcaatagcaaaactacccaaaagttcagtggtaaacaaggtgtgggataaacaaatctagggaacctattaggtcccataaaattaacctgagcatgtcatagtgattaattggaacattattgggtaaagagaaaagtgatcaagggcacaacttgccttagactcaagattcctaggtatttcaccaacttggtcttcaagtgactcgttaacctcgctgctactctggtaatacaaacaaacatggtgtaggagaaattaacatcacaccaaacataagaacaaactgcataataatgttctacacgtcgtaactagatcctaggttcgagaatcactaaattcagagttatggtcataaagttatgattttacgaaggtttaagtgtctactataaaacaaataaggtacaagattttaaccacaggtttcatggtaatacaaggttactagatgataaacaatattaatacaag

SEQ ID NO: 80187 - DNA, 899 bp, Zea Mays
ttgtaattacttttggcttgaggtggacggcaggttcattatacaatagcttagggtctcttatgaatatattccgcggtgaaggggtatcatacgatttcggccattagatggtccaccaacgccccagattaattcgctcataactctacacaagtaagcaacacattccatcggatcaatgatcggtggttaagatttaaaatcacctagttggctctagactgtttactttcggatcaacctgctagatcgattaactcgaaacgttacccggttctaatcccatccatccgttgaagatccaacggtcgtcgagcgcaaccccttttctcgtctcctcttcgactaacctaggcgcgtcggcgcccacacgacccacggcggcaccatcgccagagcaagtccacttcgcagccaggtgcccccaacctccaaacgaaccagcgcaaataagccaaacgactttttgtgaagcttgggaagcgaatcataccagagaatacgctgcaaggagcctacgagcggcgctcgaggaactctgtcgagtgattcagctgttcctcgagagatagtgcgggacgagatcgacggtagcagcgttgttctctctttcttctcctctctgctcacatgatgcactcggctttggcacagacggatgagtggagggaggccgtggcctcaaatatacatccctaggggcgcccagattccgggccaagtccaagaacggccagcgtggtttctgggcgatcgagggccagttacaacaatctcggatagggatggtcgagatgaggagaacaatacagagaagatatttggggtgggattctgtgttttttgtccaaagccagcccccgaggtcagggatagagctgaccagcgggccccct

SEQ ID NO: 80188 - DNA, 690 bp, Zea Mays
cacactcccagccatagccgttggcctcgcctagggcttggcatccggctctctctgctggccaagccccagcaccggatctcgtccatccgtggccgctcccatcgatggcaagctccgccagccggtctgcatctccctcttcgggcgtcggccgtctccatcctccagccgccgagcttccccctgcatggacgcgtctgcgatggtcttctcccatggactgaacgtccatccccctgcagcttggccagggcacgccctctgttgggtccgccagcgatgagcgccgggaagggagggtggggggcatcgcccaaacttcacctctgagcccctgcatcaggttcctgacagcgaaagcctagcacctgctgcaacctacctgctcgatggaatgctcaacctctcgccggatctgtgcagctcttacgcgatgtcgttgaacccggtgaagatgtaggcctgctgatgatggtggataagtgtcagtgtgctcgaccttctatatagttttctcatccctgctatttctagaggaactgtcactaagctagcatgtatttcaaaattataattacatttataatgtataaagttatattccttcaaaccaggttttgtacttactctcatctccgtattgtaaacttattgtaatattattttcgcagccaaaaacttcggtat

SEQ ID NO: 80189 - DNA, 782 bp, Zea Mays
cagccatagccgttggcctcgcctagggcttggcatccggctctctctgctggccaagccccagcaccggatctcgtccatccgtggccgctcccatcgatggcaagctccgccagccggtctgcatctccctcttcgggcgtcggccgtctccatcctccagccgccgagcttccccctgcatggacgcgtctgcgatggtcttctcccatggactgaacgtccatccccctgcagcttggccagggcacgccctctgttgggtccgccagcgatgagcgccgggaagggagggtggggggcatcgcccaaacttcacctctgagcccctgcatcaggttcctgacagcgaaagcctagcacctgctgcaacctacctgctcgatggaatgctcaacctctcgccggatctgtgcagctcttacgcgatgtcgttgaacccgctagttgttgacactgctcctcgtgcatcgcttattcgacaaaaatcccaagcccatggacagcacacgcgacatgcgcaacccaaatccgatcgaccaggtgaagatgtaggcctgctgatgatggtggataagtgtcagtgtgctcgaccttctatatagttttctcatccctgctatttctagaggaactgtcactaagctagcatgtatttcaaaattataattacatttataatgtataaagttatattccttcaaaccaggttttgtacttactctcatctccgtattgtaaacttattgtaatattattttcgcagccaaaaacttcggtat

SEQ ID NO: 80190 - DNA, 1477 bp, Zea Mays
aacaaaaatcacgtttccatccatcctggcgcacaagaggaagcggagagcgctctctctctcccgcccgcaatatcatggcgagagcacacctagccctggtcagcttcttcgctgcctcaattattggtgcggcgtccaagtcgttcaccatcgccaacaactgcgagcacacggtgtggccggggatcctctcgagcgccgggtccgcgggggtggacaccacaggcttcgcgctggcgccgggggagtcgcgcgctctgagcgtgccgtcggggtggtcgggccggctgtggggccgcacgctctgctccaccgacgcggccacgggccggttcgcctgcgtgaccggcgactgcggctcgggcaggcaggactgcggcggcggcggggccgccccgccggccacgctggccgagttcaccatggacggcagcgggggcatggacttctacgacgtgagcctggtggacgggtacaacctgccgatgctggtggcgccgcagggcgcggccgctgccgcggggggcagctgcgtgcccaccggctgcatggcggacctcaacggcgcgtgccccgccgacctgcgcgtggcggcttcgacgacgtcctccggcggcggcggcgtggcctgcaagagcgcgtgcgaggcgttcgggtcggcgcagtactgctgcaacggcgactacgggaaccccagcacctgcaagccgtcggcgtactcgcagttcttcaagaacgcgtgcccccgggcgtacagctacgcctacgacgacgccacctccaccttcacctgcgccggcgacaccgcctacgccatcaccttctgccccagcacgaccaggtcaaggcggccggaggtagcccgcaggcgcaaggagccctgccgctgatgaacgccaccatggtgtacctcggcggcgaccaggtcggatccgccacagccgcggcccggctgccgagcggcctcctccaccacgtcgtggtcctcgccgttgtgtccctcgcgctagcaggggctctgtactgatggtgagccccactgcacagtgacgacgcgacgccacgcgggagacaatcgtgctcctacagatcgaagaacaaaaattgcaggacagaaacgagaaatggacgcatcacctgcctgccggtgtggacggcggtggtcctcgcggtccagcgagccccgacgacggtgtgattattcacccgtgccgagagagacgtgtgtagcggcgatgcagatttgattgaagacattattgtgcgttttcttagatatttattaattacacgataatacaaacatgtatttttatagcagttgagctcttttgtttgtgtaaaggctagacatcctctttttcttccattttctatatataagtcagtggttacgataataataaggatactaggtatatgcccgtgcttcgctacgtaagttaacaattagtccacttattcggtgctgatt

SEQ ID NO: 80191 - DNA, 1523 bp, Zea Mays
tttaacaaggagaagatataagtatttgtgtggccttggcaatattggccttgttattcgatgataacgagatgttacaaagttggagatgaggaggaggctggtattcatctgtaaatttgctgtaaacgcacggccatctagaggaaacttgaaacaggtgtatggtttcctcagcagtcaaaaggaactgctgtcatgtttgacatagcttggtcttctgtgatgtagatgaggtatcagttctgatctgctgcttgagtgataggtgtggagtacgagctggggcttctgagtttgtctttcacacagtctgttgatcagatggtgcattacgatcatgcccagaggttttcattggaattgccaccatggcaatgatctcattctgggatcagtatctcaagccaacgtcaatcaacatttatttggagaagaatgaacacaaactttggtagagtgtgattgcaaagacaagctgatggcttggataacctagcgatgattcgagtattatcaatctgtgataaaatatagaagaaactaagttaaggacgtgcctgccagattggaaagtcattagtgcttaatagaattatgagggaaataatagtgagaagttatcttatttattttgcggtcttttttatctgcaaatcatgtttagcaaccatttccaatcgctttgttttagaaactggaccaactttcaaattgaagcgcatgacaaaaagcaagtgggcacttgaagaaaatgcatatcttacgaacttttctatgacaatgaatgggacaaattttctgttgagacatgtaaatagtagcagtaaaagtttcatttctaaactttacccttgcagttgtactgatagttccaaagttcatttcaggactataatgaaagctagaagtgttttagtgggctgctcagctgctgggactggaactactatcccaaaatgtcatcacacgtttaaacacccgttagggcacccacagcagtaaggtttcaagacaacaataatattaactttgaacatataaagcataatatagtctcaaatgatcttcatgtatatgtataatactaactctaggtcaagaggcattttttgggtctcctattagcgaaagggtctgttagacggcttgagttgcatttctcacgtcatgggtgcgagttgacatgtgcctcctctgtataggtggggtaagaggagttttttttatgtcatcttaatgtaatgtccagaaaatgatgctacagtcgccattgatgatgcccttattaattgagtaagcaatcaaaatctattactagagtaagatgctaacagttaggcctagtttgggaacttcatttatctaaggaattcctatttttctaagggaaaatgaactaatttcccttgggaaaatagaaatcccttagggctagtttggcagcaacgtgggaaaaatgctagggaagatatccaccaacaggattttagatgccactaaattttctgggtggattttcc

SEQ ID NO: 80192 - DNA, 3428 bp, Zea Mays
gatttacaatatcgtgtgtataaatatttcatgtttttcactttatttgttttgcggtaccaaacatataacgatttcatgtgtttcccgtggcaacgcacgggcatagacctagtgatgaattaaggaagaaacattgtggtttctggtttgtgaaacaatggaataatgtttgaatccttttttgtcagcttcgtttgggtgggccaaaaatccgggaggattcgcgttgatgggacactagtttgaattgatctagaatttggcccatcttgtctagatgattaagggcttggactagatgggccaaattctagactagaagtccaaatccgcagctcccatctctctccccatggccgcggcggcgccggaggctgcggacgaggttgcgccgtcggcgacgctgagcgtctacaaggcggcacggtgcatcaagcggcgggcgagcacgctgtacaacgcgctgcggagcgtggcggaggacgcggccttcgtggcggaggtcgcggcgctgtggccctcgctgccgctggtggccaacctccgctgcggtctctggtacgccccgccccgtgccttcgcagccacctgctacttcaagtccacggatggccacgccgggaactggtccttctcaactgcccgcctcaacctccacctcgccctcctcgctggggagagaggagggtgcataatagttgattcaacaaggagagggaaacgattccctgatagcatgtcaaagaccatacccatttggtgctctgtcttgaaccgagcgattgagaggcatcggctgcaggctatccacaaaagtgccgaagtgaattatcagtcgtctaccctgctgaatggagatgcagaaaacaactctgatctatctaattgggatagctcagtgcaccttcctgtatgggttctaggcacagagaaaaatgctatagaggggcgtattgatgaatggacagaccaatttgaatcatgtggtgcagatattcattctcttgcgttgctacacaaaggatgtcttcagaattcagttggcactatattcctggagcaggagatgatgaagagagttgggcacgtggtctaactcctaccttattctggaaacattcatatgaccttattgatgctggaccagatcgttgtaaccagatagttgctgatattgttgaaaaagatagggtttatcgtgcacagagaggtgaacattgtcctcaaattacatgtaagtctctgaggagccttgctggtgccaaatgtaatgatgatcagacaaccgagatgtgtgctatgaacttggatcattgtaccagtacaatggatgcacactgttctaataatggccttctactcttttggattggaacatcaaaccttgcagtatcatctactttccatggtgccttagttggtgtggactgcatactgaactgtgacagcacgtcgaagctacctgctagttcatcagaaaattcttaccttgagctatctattgttggctcaaaggatgaccgattttcattgatgagaaaccttccaaaagcagttgactttgcaaagaggaatttgatggctgggagaaaaattctcgtgtgctgtcaaaatggagaagatataagtatttgtgtggccttggcaatattggccttgttattcgatgataacggtaagtataataatgttgattgtcttgtgaaactgctacacaaggatttgaggctcttcctaatttgcattagtgcttgagattattagttcccacagatgcacttttgttatgccatgtcaagaaacataatgatgcgtgctctagatttgttgatgagtagttgtgccctcaggtcctactttcttgtgtctatactttaagtatgtcaagtatggttgcatcatgaattaataagtaataactaattgtttctttcaaggatgctttgactatggaaattattttgtcaaaagagatgttacaaagttggagatgaggaggaggctggtattcatctgtaaatttgctgtaaacgcacggccatctagaggaaacttgaaacaggtgtatggtttcctcagcagtcaaaaggaactgctgtcatgtttgacatagcttggtcttctgtgatgtagatgaggtatcagttctgatctgctgcttgagtgataggtgtggagtacgagctggggcttctgagtttgtctttcacacagtctgttgatcagatggtgcattacgatcatgcccagaggttttcattggaattgccaccatggcaatgatctcattctgggatcagtatctcaagccaacgtcaatcaacatttatttggagaagaatgaacacaaactttggtagagtgtgattgcaaagacaagctgatggcttggataacctagcgatgattcgagtattatcaatctgtgataaaatatagaagaaactaagttaaggacgtgcctgccagattggaaagtcattagtgcttaatagaattatgagggaaataatagtgagaagttatcttatttattttgcggtcttttttatctgcaaatcatgtttagcaaccatttccaatcgctttgttttagaaactggaccaactttcaaattgaagcgcatgacaaaaagcaagtgggcacttgaagaaaatgcatatcttacgaacttttctatgacaatgaatgggacaaattttctgttgagacatgtaaatagtagcagtaaaagtttcatttctaaactttacccttgcagttgtactgatagttccaaagttcatttcaggactataatgaaagctagaagtgttttagtgggctgctcagctgctgggactggaactactatcccaaaatgtcatcacacgtttaaacacccgttagggcacccacagcagtaaggtttcaagacaacaataatattaactttgaacatataaagcataatatagtctcaaatgatcttcatgtatatgtataatactaactctaggtcaagaggcattttttgggtctcctattagcgaaagggtctgttagacggcttgagttgcatttctcacgtcatgggtgcgagttgacatgtgcctcctctgtataggtggggtaagaggagttttttttatgtcatcttaatgtaatgtccagaaaatgatgctacagtcgccattgatgatgcccttattaattgagtaagcaatcaaaatctattactagagtaagatgctaacagttaggcctagtttgggaacttcatttatctaaggaattcctatttttctaagggaaaatgaactaatttcccttgggaaaatagaaatcccttagggctagtttggcagcaacgtgggaaaaatgctagggaagatatccaccaacaggattttagatgccactaaattttctgggtggattttcc

SEQ ID NO: 80193 - DNA, 3293 bp, Zea Mays
gatttacaatatcgtgtgtataaatatttcatgtttttcactttatttgttttgcggtaccaaacatataacgatttcatgtgtttcccgtggcaacgcacgggcatagacctagtgatgaattaaggaagaaacattgtggtttctggtttgtgaaacaatggaataatgtttgaatccttttttgtcagcttcgtttgggtgggccaaaaatccgggaggattcgcgttgatgggacactagtttgaattgatctagaatttggcccatcttgtctagatgattaagggcttggactagatgggccaaattctagactagaagtccaaatccgcagctcccatctctctccccatggccgcggcggcgccggaggctgcggacgaggttgcgccgtcggcgacgctgagcgtctacaaggcggcacggtgcatcaagcggcgggcgagcacgctgtacaacgcgctgcggagcgtggcggaggacgcggccttcgtggcggaggtcgcggcgctgtggccctcgctgccgctggtggccaacctccgctgcggtctctggtacgccccgccccgtgccttcgcagccacctgctacttcaagtccacggatggccacgccgggaactggtccttctcaactgcccgcctcaacctccacctcgccctcctcgctggggagagaggagggtgcataatagttgattcaacaaggagagggaaacgattccctgatagcatgtcaaagaccatacccatttggtgctctgtcttgaaccgagcgattgagaggcatcggctgcaggctatccacaaaagtgccgaagtgaattatcagtcgtctaccctgctgaatggagatgcagaaaacaactctgatctatctaattgggatagctcagtgcaccttcctgtatgggttctaggcacagagaaaaatgctatagaggggcgtattgatgaatggacagaccaatttgaatcatgtggtgcagatattcattctcttgcggtaggtttgcaaaaaccgctacgtcctctatggatctcacaaaggacacgtatatggttaaatgaagtgccggagcttgagtcatgggatttcactcctataattctaatttctgcatctgatgcagttgctacacaaaggatgtcttcagaattcagttggcactatattcctggagcaggagatgatgaagagagttgggcacgtggtctaactcctaccttattctggaaacattcatatgaccttattgatgctggaccagatcgttgtaaccagatagttgctgatattgttgaaaaagatagggtttatcgtgcacagagaggtgaacattgtcctcaaattacatgtaagtctctgaggagccttgctggtgccaaatgtaatgatgatcagacaaccgagatgtgtgctatgaacttggatcattgtaccagtacaatggatgcacactgttctaataatggccttctactcttttggattggaacatcaaaccttgcagtatcatctactttccatggtgccttagttggtgtggactgcatactgaactgtgacagcacgtcgaagctacctgctagttcatcagaaaattcttaccttgagctatctattgttggctcaaaggatgaccgattttcattgatgagaaaccttccaaaagcagttgactttgcaaagaggaatttgatggctgggagaaaaattctcgtgtgctgtcaaaatggagaagatataagtatttgtgtggccttggcaatattggccttgttattcgatgataacggatgctttgactatggaaattattttgtcaaaagagatgttacaaagttggagatgaggaggaggctggtattcatctgtaaatttgctgtaaacgcacggccatctagaggaaacttgaaacaggtgtatggtttcctcagcagtcaaaaggaactgctgtcatgtttgacatagcttggtcttctgtgatgtagatgaggtatcagttctgatctgctgcttgagtgataggtgtggagtacgagctggggcttctgagtttgtctttcacacagtctgttgatcagatggtgcattacgatcatgcccagaggttttcattggaattgccaccatggcaatgatctcattctgggatcagtatctcaagccaacgtcaatcaacatttatttggagaagaatgaacacaaactttggtagagtgtgattgcaaagacaagctgatggcttggataacctagcgatgattcgagtattatcaatctgtgataaaatatagaagaaactaagttaaggacgtgcctgccagattggaaagtcattagtgcttaatagaattatgagggaaataatagtgagaagttatcttatttattttgcggtcttttttatctgcaaatcatgtttagcaaccatttccaatcgctttgttttagaaactggaccaactttcaaattgaagcgcatgacaaaaagcaagtgggcacttgaagaaaatgcatatcttacgaacttttctatgacaatgaatgggacaaattttctgttgagacatgtaaatagtagcagtaaaagtttcatttctaaactttacccttgcagttgtactgatagttccaaagttcatttcaggactataatgaaagctagaagtgttttagtgggctgctcagctgctgggactggaactactatcccaaaatgtcatcacacgtttaaacacccgttagggcacccacagcagtaaggtttcaagacaacaataatattaactttgaacatataaagcataatatagtctcaaatgatcttcatgtatatgtataatactaactctaggtcaagaggcattttttgggtctcctattagcgaaagggtctgttagacggcttgagttgcatttctcacgtcatgggtgcgagttgacatgtgcctcctctgtataggtggggtaagaggagttttttttatgtcatcttaatgtaatgtccagaaaatgatgctacagtcgccattgatgatgcccttattaattgagtaagcaatcaaaatctattactagagtaagatgctaacagttaggcctagtttgggaacttcatttatctaaggaattcctatttttctaagggaaaatgaactaatttcccttgggaaaatagaaatcccttagggctagtttggcagcaacgtgggaaaaatgctagggaagatatccaccaacaggattttagatgccactaaattttctgggtggattttcc

SEQ ID NO: 80194 - DNA, 2317 bp, Zea Mays
atggcaaggaggtcgaagcacctggggcagggcgtggtggagacgaacctcccgtattgcttctttaggttgggcatgtcgtggcccctagaattcgacgaccaacaatcccggggaatgggagggcgggggtggccgcggaccatcaccacttccttggatgtagcacaggatctgggaggtgaatggagagcacgagatctgggaggtgaaggggatcgcgggggcaatcccgttgattgtgggggcgaccgcggacgtggggatgagcggaggatgtcgcgggtgggagtgggaggcagaaccgtggctgctcgtccgccagaaccaagcaggtgtaaacatgcttcatcattcaaatagccggaaccaaaggaacaggggatcaagaatcaaaactctactccaagcgaccttgctttcaggtgttgtcttttggctcctgtatcaggtgaagcattcctatgataagaaaaacgagtacttggatgatgctgaggaccagcttacccataatgatagaagcatattccaggcgaggaaacaaaaggcaggtagttacagtgatagcaacgtccaaatggttgtcgacaattctgatgtaacaactaaaccagaggaaggtgatgtagatcatcattctgatacttttgatcataacgagaagactgtagaaactgtgttcgataaagatagtactaacctgcatgaagatgacaagagaaacactgagagttcagaagcggaaggacaagtcaacagtggagatagtaatacagaagctaataataataagaatgaagatgaaaccaccagtcttgtagaaggacgcaagcatgatactgaatccaactctgctgctgagagtaaaagtgaagtcaattcaactggagatgaattgtcccaaaacaatcatgcacaagaggaaaacactagggaggcaagtggaatgtctcatgatgaagtagcgcatggtgacgaatcaaccagtgcaagtggaacttggaatggatcagatggagaaggtgagaaaaaggaggcagttgatactcaaactggttctgaaacccttcctgacgatgccaagaccgaagcaactgatgaccgtggtactaacagcctttctgacgaaacagggaacataccatcagttcatactgataattcacaaaatgatgccagtgaaaaccaaggagatgcaacatccactacctcagattcatctgagcatggcatcagtgaggctgtccatattgaaactggattggaacatggaagtgcaacaacatcatctgttactggatctggtgatgacagggataactcatctgatagctcctctgcaggaaaaaatacggagactctatctggtgatgataagaccaactccagcagcactccgcatgcggctccggatccgtattttgcggagtctagcacactattcatcagtccagcaggctccgtatccggctccgtaaaacgcacggcgtgtacccagactccccatttccacgctttctctctcctctccgcagctctctcgcgggcgcgcgtgcctgctggcgggccccaggtgtcatagactgcatgcggagtgggatggggagtgttgctggaaacggagccggatacggagaggagagagaatgtgtcggccgcgcgttttagggatacggagtcgcacactgctggagttggtctaagggcatggaaacaggtacaaccactgaagcgtcatattccaaagaagagaactctgagaacagcagtgtctcaactgaagcagagaactcccgaggagattcttccattggagtgaatggttcttcagaaacgtctaccaatggtgagcaggtggatcccaagactgaaactagcacatccaccagtaacgtgcacaatgaatctcaaggggctgatggcagttctggatcaaataactcaattggtaacggccctgaacaaaccggtaaaactgaaaggcagtgataccactatctagacacgaacattgttttagtataaagatttgtttcctggagattgaagaggctagtactgaaccaagaaaaactgttcacattgtggcttatggtgattttagttgatactgctgaagtacaattgtgcacatcgcaagatcggttgtctgctatgcttattgcttatgccatgatttctcgtcaagttgtatcagaacgagtcattatagctgtacggttattaatctctactagtacaatgcccgtcccttctgttgcaatgcaaggacacacaaattattcaaatataatattagtcaaattattcaaat

SEQ ID NO: 80195 - DNA, 2367 bp, Zea Mays
gccggcaggagcacgagggggggtcacgagcgacgaatccaaggcgcgaccgcaaccacgccgcaggcagcggtccggccgcccggccgaggccggcagctcatcacgagtgccagatccagtcgtggccaacgccaacacagcgccccctccccacgacgctgaagtcccagatctaaccacacagacacaacccaccacgtcgccaccaccaactaacccattaatccatcaacgccggtcctccacggtcacgcggaagtcaccgccgctctgccgcgctctcccgtagtcccgtaccgcatcgcgttcttcgctggcctcgctgtcgtctcatcgccattggcgtttcgcctgcagctgctcgtccgccagaaccaagcaggtgtaaacatgcttcatcattcaaatagccggaaccaaaggaacaggggatcaagaatcaaaactctactccaagcgaccttgctttcaggtgttgtcttttggctcctgtatcaggtgaagcattcctatgataagaaaaacgagtacttggatgatgctgaggaccagcttacccataatgatagaagcatattccaggcgaggaaacaaaaggcaggtagttacagtgatagcaacgtccaaatggttgtcgacaattctgatgtaacaactaaaccagaggaaggtgatgtagatcatcattctgatacttttgatcataacgagaagactgtagaaactgtgttcgataaagatagtactaacctgcatgaagatgacaagagaaacactgagagttcagaagcggaaggacaagtcaacagtggagatagtaatacagaagctaataataataagaatgaagatgaaaccaccagtcttgtagaaggacgcaagcatgatactgaatccaactctgctgctgagagtaaaagtgaagtcaattcaactggagatgaattgtcccaaaacaatcatgcacaagaggaaaacactagggaggcaagtggaatgtctcatgatgaagtagcgcatggtgacgaatcaaccagtgcaagtggaacttggaatggatcagatggagaaggtgagaaaaaggaggcagttgatactcaaactggttctgaaacccttcctgacgatgccaagaccgaagcaactgatgaccgtggtactaacagcctttctgacgaaacagggaacataccatcagttcatactgataattcacaaaatgatgccagtgaaaaccaaggagatgcaacatccactacctcagattcatctgagcatggcatcagtgaggctgtccatattgaaactggattggaacatggaagtgcaacaacatcatctgttactggatctggtgatgacagggataactcatctgatagctcctctgcaggaaaaaatacggagactctatctggtgatgataagaccaactccagcagcactccgcatgcggctccggatccgtattttgcggagtctagcacactattcatcagtccagcaggctccgtatccggctccgtaaaacgcacggcgtgtacccagactccccatttccacgctttctctctcctctccgcagctctctcgcgggcgcgcgtgcctgctggcgggccccaggtgtcatagactgcatgcggagtgggatggggagtgttgctggaaacggagccggatacggagaggagagagaatgtgtcggccgcgcgttttagggatacggagtcgcacactgctggagttggtctaagggcatggaaacaggtacaaccactgaagcgtcatattccaaagaagagaactctgagaacagcagtgtctcaactgaagcagagaactcccgaggagattcttccattggagtgaatggttcttcagaaacgtctaccaatggtgagcaggtggatcccaagactgaaactagcacatccaccagtaacgtgcacaatgaatctcaaggggctgatggcagttctggatcaaataactcaattggtaacggccctgaacaaaccggtaaaactgaaaggcagtgataccactatctagacacgaacattgttttagtataaagatttgtttcctggagattgaagaggctagtactgaaccaagaaaaactgttcacattgtggcttatggtgattttagttgatactgctgaagtacaattgtgcacatcgcaagatcggttgtctgctatgcttattgcttatgccatgatttctcgtcaagttgtatcagaacgagtcattatagctgtacggttattaatctctactagtacaatgcccgtcccttctgttgcaatgcaaggacacacaaattattcaaatataatattagtcaaattattcaaat

SEQ ID NO: 80196 - DNA, 2425 bp, Zea Mays
gccggcaggagcacgagggggggtcacgagcgacgaatccaaggcgcgaccgcaaccacgccgcaggcagcggtccggccgcccggccgaggccggcagctcatcacgagtgccagatccagtcgtggccaacgccaacacagcgccccctccccacgacgctgaagtcccagatctaaccacacagacacaacccaccacgtcgccaccaccaactaacccattaatccatcaacgccggtcctccacggtcacgcggaagtcaccgccgctctgccgcgctctcccgtagtcccgtaccgcatcgcgttcttcgctggcctcgctgtcgtctcatcgccattggcgtttcgcctgcagctgctcgtccgccagaaccaagcaggttcgtcccttcctagcccgcccgccgcctcgacgctcatctgagctgcgctccccctccaacgtcgtactactcgcgtggcgctttatctcgtaggtctgaatcgggcctccaccgagtgtgtgactctcgcgcggacgattttgcgtactgcgtagcatccatgcgcgattacctgcgcgctcgctgccaagcgcgcaaatgtgtcccgccgctcgcttagctgattccgcgccgcgttacatctgcctcctctgtctgctactctgcttcgctcgttctccagggggactttcgtggacagcagttgtcactatgtgacaagggtctgccggtctggagatgtttctgtgctgaatttgcttgttccgcacaagtggatcggtgtaaacatgcttcatcattcaaatagccggaaccaaaggaacaggggatcaagaatcaaaactctactccaagcgaccttgctttcaggtgttgtcttttggctcctgtatcaggtgaagcattcctatgataagaaaaacgagtacttggatgatgctgaggaccagcttacccataatgatagaagcatattccaggcgaggaaacaaaaggcaggtagttacagtgatagcaacgtccaaatggttgtcgacaattctgatgtaacaactaaaccagaggaaggtgatgtagatcatcattctgatacttttgatcataacgagaagactgtagaaactgtgttcgataaagatagtactaacctgcatgaagatgacaagagaaacactgagagttcagaagcggaaggacaagtcaacagtggagatagtaatacagaagctaataataataagaatgaagatgaaaccaccagtcttgtagaaggacgcaagcatgatactgaatccaactctgctgctgagagtaaaagtgaagtcaattcaactggagatgaattgtcccaaaacaatcatgcacaagaggaaaacactagggaggcaagtggaatgtctcatgatgaagtagcgcatggtgacgaatcaaccagtgcaagtggaacttggaatggatcagatggagaaggtgagaaaaaggaggcagttgatactcaaactggttctgaaacccttcctgacgatgccaagaccgaagcaactgatgaccgtggtactaacagcctttctgacgaaacagggaacataccatcagttcatactgataattcacaaaatgatgccagtgaaaaccaaggagatgcaacatccactacctcagattcatctgagcatggcatcagtgaggctgtccatattgaaactggattggaacatggaagtgcaacaacatcatctgttactggatctggtgatgacagggataactcatctgatagctcctctgcaggaaaaaatacggagactctatctggtgatgataagggcatggaaacaggtacaaccactgaagcgtcatattccaaagaagagaactctgagaacagcagtgtctcaactgaagcagagaactcccgaggagattcttccattggagtgaatggttcttcagaaacgtctaccaatggtgagcaggtggatcccaagactgaaactagcacatccaccagtaacgtgcacaatgaatctcaaggggctgatggcagttctggatcaaataactcaattggtaacggccctgaacaaaccggtaaaactgaaaggcagtgataccactatctagacacgaacattgttttagtataaagatttgtttcctggagattgaagaggctagtactgaaccaagaaaaactgttcacattgtggcttatggtgattttagttgatactgctgaagtacaattgtgcacatcgcaagatcggttgtctgctatgcttattgcttatgccatgatttctcgtcaagttgtatcagaacgagtcattatagctgtacggttattaatctctactagtacaatgcccgtcccttctgttgcaatgcaaggacacacaaattattcaaatataatattagtcaaattattcaaat

SEQ ID NO: 80197 - DNA, 1337 bp, Zea Mays
tattgatggcctgatagctttcgtaggtgctagctactaccatataccatatactctcacacaaagattagtacagctagcatggctaatgactccttgacgaggggccacataatcggggatgtcttagacccgtttactagctcagtgtctctaagtgtcctgtatgatggcagaccagtgtttgatgggatggagtttcgggcgtcggcggtgtcggtgaaacctagagttgagattggaggtgatgattttcgagtggcctataccctagtaagccatcacgtactccgcagatcgagtccatttggcgcgcggtaggccatatctatggccaagatgtctcgactactctccaaactctcatgtccaagtgacatccatggcttttggctcactgtgtgtgacggctaaatcagtctcctcgatcgtgcccatagctcggttgactacaaagattggctcatgctaataaatatatagtagtattatacactgagagagacactaacacccccccccccaaaaaaaaagtgcagggatttctgatcagcccagccccgaaaaaatgctcaggtttacttttaattccctaacatgttgaccatgtgtttgtgttaatgtaaatatattaggttatggtggatcctgatgcgcctaatcccagcaaccctagcctgcgggaatacttgcattggatggttactgacatcccagcatcaacagatgatagcttcggccgagagctcataccatatgagagcccaagccccaccatgggcatccaccgtcttgtgttggtgctctaccagcaattggggcggggcacggtgtttgcgccgcaagttcgtcagaacttcaacttgcgtaatttcgcacgccgtttcaacctcggcaagcctgtggccgcgacgtacttcaactgtcagcggcaaacaggcacaggtgggagaaggttcacttgtgtttttgatcatgtcgttcaaggtgaaggccggcaagcttgaacctactactactagtaacgttcgcgtgtgcttatatggccgtatcggcgtacactacgtagcatgaaagctagctagaaataaataaagatgtatttctttcgcacatgtagctaggcttttataaaggcgtacctccaagggtattatgtccggcttttaattaataatcgcgtgataagggtggttagtataccgagtttgtactgctgtgatatttctgtcacaccttggcaataattgatatatatatatatatatatatatatatatatggatctctgttatttgattcttaaacttaacaaaataagtattttttaaggccct

SEQ ID NO: 80198 - DNA, 2217 bp, Zea Mays
caacaatgctacttcagtttgtgtctcgctaatgtgctaaagtttgggtccttataagataagagccaagtctgcctgcataccacgaaattttaacttgttgcttctctccctcttctgttctgtctcgtccccttcacgaatcacgacagtattgaagcaattcctgattgctgatcctccacaatttctcccgtggattggagcgatctgaattggagccgtttactgctgacatggcgggaactgatcgcctctaccctgaaattgggacgtatgacctggagcccccgcaggtcccagcctccgccgggggcagcggcgaggaggaggccggggtttgcgacgcactggtgatgtgggacgacgaatccgacgcgtgtccctcccatgaagcggcccccatcatatttgagaagggcactagggatcctcctcctaaagttttcaaggaagaaaggcttgatgttgtccattattcagagttcagcgatgagatggcgactgagaaggaattcggagaaaacaactatgacagtttcccttcttgtgaacaaacaggcatcatatgggtgcctccctctgttccacctatgccaaaacatgatcacgatgagtggcaaaagggctttggttacaatagtccgtgcttcccagaggaagaatataagtgggatattgacgaagaaaatttggagatgacaatgtgggatgtgctctctgagatggttgttgcaggaaaggataaaatattatccattgcatcatttgatttaggaatgtatggcacgtctatgatttcagatttttgccttgaagagactttgaaggataaggcccaaacacttaaagatgtcagtgctggttctgaacatgctctccttgagacagaactaacaaagtggttgcctgatagtgcttcaacttcctgtatgctttgtggagcacgttttcatccaataatttgtgctcgccatcattgccgattttgtggtgggatattttgtggtggctgttcaaagggtagaagcttgatgcccccaaagttcatgaactcagatcctcaaagggtctgtgatgtttgtggagtgcgtcttgagtgtatacaaccttatttgatgaatcgattcagtcgtgcttgtcaacttccaactcaagacttgactgacctaagcaccttgaggtcatggataaacaccccatgggcagtcagaatggagtatgagatctacaaagcggcaaattccatacatggctattgtaaggtgggagagctgaaacctgagaagtcgatccctgattcaattctcagacaagcaaaagggcttgcaatcatcactgaggtaaaggttggagtgatgcttacatacaaaatcggtactggattggttgttgctcggagaggtgatggttcttggtcccctccttcagccatctctacttgtggtcttggatatggagttcaggctggaggtgagttggctgactacatcattgttcttaggaacaaagatgccatcaaaacttttagtggaaatgcacatatgtcaattggggctggtgttagtgcttctgctggtcattttggacgagtggcagaggctgatttccgtgctggtgatggtggttatgctgcctgttacacatacagttgtagcaaaggtgcctttgtgggctgtgcgctcaatggaagtgtggtgtccactcgagactcggtaaatgcccggttttacggtggtccgattaaggcctcagaaatccttcttgggtcgctgccaaaaccgcctgctgccgcaactctatacaaggctttatctgtattatttgataagatcgagaagtgaatctcctgatccttctctttagtttgcgacacgcagggtagcatggtgaattgaattatttatgggtcattggttcgctctatttaccttatcctagttggtgatgatgcaagtgtacacctgacgatccactgttttccatcaaactgaggttggagagtggacaagagagtatgtgtacgagagtggagaagaggtcaaggtttcagccaaagcagtgtgtagaggttcccaatttctgcaaggccttcgtgcagtaaaggaccggtatgaaagaggctagggtattttaggggcttttgatatacgggctaatcacgtgtaaagggtgattagttcccgttactaaagtttagtctatgccacattatat

SEQ ID NO: 80199 - DNA, 1600 bp, Zea Mays
accacgaaattttaacttgttgcttctctccctcttctgttctgtctcgtccccttcacgaatcacgacagtattgaagcaattcctgattgctgatcctccacaatttctcccgtggattggagcgatctgaattggagccgtttactgctgacatggcgggaactgatcgcctctaccctgaaattgggacgtatgacctggagcccccgcaggtcccagcctccgccgggggcagcggcgaggaggaggccggggtttgcgacgcactggtgatgtgggacgacgaatccgacgcgtgtccctcccatgaagcggcccccatcatatttgagaagggcactagggatcctcctcctaaagttttcaaggaagaaaggcttgatgttgtccattattcagagttcagcgatgagatggcgactgagaaggaattcggagaaaacaactatgacagtttcccttcttgtgaacaaacaggcatcatatgggtgcctccctctgttccacctatgccaaaacatgatcacgatgagtggcaaaagggctttggttacaatagtccgtgcttcccagaggaagaatataagtgggatattgacgaagaaaatttggagatgacaatgtgggatgtgctctctgagatggttgttgcaggaaaggataaaatattatccattgcatcatttgatttaggaatgtatggcacgtctatgatttcagatttttgccttgaagagactttgaaggataaggcccaaacacttaaagatgtcagtgctggttctgaacatgctctccttgagacagaactaacaaagtggttgcctgatagtgcttcaacttcctgtatgctttgtggagcacgttttcatccaataatttgtgctcgccatcattgccgattttgtggtgggatattttgtggtggctgttcaaagggtagaagcttgatgcccccaaagttcatgaactcagatcctcaaagggtctgtgatgtttgtggagtgcgtcttgagtgtatacaaccttatttgatgaatcgattcagtcgtgcttgtcaacttccaactcaagacttgactgacctaagcaccttgaggtcatggataaacaccccatgggcagtcagaatggagtatgagatctacaaagcggcaaattccatacatggctattgtaaggtgggagagctgaaacctgagaagtcgatccctgattcaattctcagacaagcaaaagggcttgcaatcatcactgaggtaaaggttggagtgatgcttacatacaaaatcggtactggattggttgttgctcggagaggtgatggttcttggtcccctccttcagccatctctacttgtggtcttggatatggagttcaggctggaggtgagttggctgactacatcattgttcttaggaacaaagatgccatcaaaacttttagtggaaatgcacatatgtcaattggggctggtgttagtgcttctgctggtcattttggacgagtggcagaggctgatttccgtgctggtgatggtggttatgctgcctgttacacatacagttgtagcaaagctatgtcctcctggatccc

SEQ ID NO: 80200 - DNA, 1986 bp, Zea Mays
accacgaaattttaacttgttgcttctctccctcttctgttctgtctcgtccccttcacgaatcacgacagtattgaagcaattcctgattgctgatcctccacaatttctcccgtggattggagcgatctgaattggagccgtttactgctgacatggcgggaactgatcgcctctaccctgaaattgggacgtatgacctggagcccccgcaggtcccagcctccgccgggggcagcggcgaggaggaggccggggtttgcgacgcactggtgatgtgggacgacgaatccgacgcgtgtccctcccatgaagcggcccccatcatatttgagaagggcactagggatcctcctcctaaagttttcaaggaagaaaggcttgatgttgtccattattcagagttcagcgatgagatggcgactgagaaggaattcggagaaaacaactatgacagtttcccttcttgtgaacaaacaggcatcatatgggtgcctccctctgttccacctatgccaaaacatgatcacgatgagtggcaaaagggctttggttacaatagtccgtgcttcccagaggaagaatataagtgggatattgacgaagaaaatttggagatgacaatgtgggatgtgctctctgagatggttgttgcaggaaaggataaaatattatccattgcatcatttgatttaggaatgtatggcacgtctatgatttcagatttttgccttgaagagactttgaaggataaggcccaaacacttaaagatgtcagtgctggttctgaacatgctctccttgagacagaactaacaaagtggttgcctgatagtgcttcaacttcctgtatgctttgtggagcacgttttcatccaataatttgtgctcgccatcattgccgattttgtggtgggatattttgtggtggctgttcaaagggtagaagcttgatgcccccaaagttcatgaactcagatcctcaaagggtctgtgatgtttgtggagtgcgtcttgagtgtatacaaccttatttgatgaatcgattcagtcgtgcttgtcaacttccaactcaagacttgactgacctaagcaccttgaggtcatggataaacaccccatgggcagtcagaatggagtatgagatctacaaagcggcaaattccatacatggctattgtgggagagctgaaacctgagaagtcgatccctgattcaattctcagacaagcaaaagggcttgcaatcatcactgaggtaaaggttggagtgatgcttacatacaaaatcggtactggattggttgttgctcggagaggtgatggttcttggtcccctccttcagccatctctacttgtggtcttggatatggagttcaggctggaggtgagttggctgactacatcattgttcttaggaacaaagatgccatcaaaacttttagtggaaatgcacatatgtcaattggggctggtgttagtgcttctgctggtcattttggacgagtggcagaggctgatttccgtgctggtgatggtggttatgctgcctgttacacatacagttgtagcaaaggtgcctttgtgggctgtgcgctcaatggaagtgtggtgtccactcgagactcggtaaatgcccggttttacggtggtccgattaaggcctcagaaatccttcttgggtcgctgccaaaaccgcctgctgccgcaactctatacaaggctttatctgtattatttgataagatcgagaagtgaatctcctgatccttctctttagtttgcgacacgcagggtagcatggtgaattgaattatttatgggtcattggttcgctctatttaccttatcctagttggtgatgatgcaagtgtacacctgacgatccactgttttccatcaaactgaggtatttggaaccacaaaccactctgtaaattttgtagacaattctcgttagaaatgaaaaggaaaccattttttcaa

SEQ ID NO: 80201 - DNA, 838 bp, Zea Mays
tgccacagtgccgcggcccacgcggtgaaaacggaaaccaaactaaccaaaatcccccacccccccactgctctctctcgccccaaaaccagatcgccacgacaagggcagagggccccggaggggcgcgtagcaatggcggcaggctaccgggccgaggacgattacgattacctcttcaaggtggtcctgatcggcgactccggcgtcggcaagtccaacttgctctcacgcttcacgcgcaacgagttcagcctcgagtccaagtccaccatcggcgtcgagttcgccacccgctctctccaggtcgacggcaaggtcgtcaaggcccagatttgggacaccgccggccaggaacgttcaaaccgacgaaggaaaagcattcgcagagagggaatcgttgtacttcatggagacctctgcgcttgagtcgaccaacgttgagaatgcatttgcagaagtcctagctcagatctaccgtattgtggacaagagagccgttgaagcaggtgaagatgcagcatctgggcctggcaggggcgagaagataaacataaaggatgacgtctcggcagtgaagaagggtggctgctgctctagctgagctgccgtgctgtaatttttttggggagttgtgggatgtagcttatgttatggcattttcagcgactggaaattggtagtggcatttagcagcctctattacctagagaggttattgtcaaactgaaaaaaactgaaggttagatcagtttagagctctgttactgtattgtgtatccggcaataggcatagtattttttatttttttatttttgctgtgaatctactctatcg

SEQ ID NO: 80202 - DNA, 1042 bp, Zea Mays
cagacgagctcctgttctccgtccatggcgtcctggcgagaagcttcccttctcctgatccatggcaccgtcgttcttcatcttcgcgtcccaagtccggctatctagctcgccctcgcccctccctctgtccgcttgcgcgcagccgcgtccctgatctgctcgtcgggcgcacaggtccctgccggcgctcgcccctgatgccgagcagtgccgtccctgggcatgtgcgacatgagcgacggcgcagggcctccaaattctataggcctccaaatatataggacgtacatatagatagacgcatatcacaaacctgtttgtctccaccgtccatgtatggtatcgtcgtatagccctgagtcctgataccctatcggccgccgccgctggccacatcgcaagcgatcgggcgtccgagcggcaagcgtgacgactgacgacaacagcgagcgaggcatttaggcactgaaggtattagtagtcatacttttttacaattcattcacaatcacaattcattcacaatcacaacgctgtagtgggtcgatcgctaaagttttgtttttttttcaatcttttcatctagacgcccattaaaatagtgttcaacgaagccatgtcttctgcaaatcgttctagaaaatttgaatcaggttagcaaaagcgtaaggaaaagcaaagaatagagaaattagcccaatctcagcaaggagttatgcaaatccaaactcaggttcattatcttggtcctaggattcagaatgagttgatacatttgcttgcttctgctattaagtccgaaattattaagaaaaataaagagtgcaaacccagaggcttatttcgagtagagtattttgtacctctagttgatcaagctattgcctctcttataacaagatttgagcagtacaaagataccaaaaaaatggttttttatttactttagaaacattgcagtcgttggatgactacggcttaaatcttcttgtgataatctcgaggttgtcctacaaaggatggaaaatctgatattgat

SEQ ID NO: 80203 - DNA, 492 bp, Zea Mays
taattcccccgccgccgcccctcgccacgctccgccagccgctgccactcgccacgttccaccagccggcgccccttttccttctcactccgctggcgccggcgccgccttatccatggcgtcggagaagaagcaatccaacccgatgagggagatcaaggtgcagaagctggtgctcaacatctccgtcggagagagtggggatcgcctcacccgcgccgccaaggtcctggagcaactgagtggccagtcaccagtgttctctaaggctaggtacactgtccgttcctttggtatcaggcgtaatgagaagattgcctgctatgttactgtaaggggtgagaaggcaatgcagcttctggagagtggacttaaggtcaaggaatatgaactgctaaggaggaacttcagtgacacagggtgctttggtttcggaatccaggagcacattgatcttggcatcaagccagtgacttgaattaattgtccgta

SEQ ID NO: 80204 - DNA, 3563 bp, Zea Mays
aaaagatccctttccgtccactcctttggtctcaaatcctcaatcatgcccggaattttgtaccagctcgtcgtcgccgccgccatctgcgccctctccagcggcagcatcgcggtcgcctcaggtttgaatgcgaccgactcgttcctcgtctgcctcgtcggcgcgggcgtcccgccgcgcctccttcagaccccggcgtccccgtcgtactccacgacgctgctctcctccgtacgcaacctccgctacgtcacgtcggacattcagcggccggtcgccatcgtggccgccaccgagccagcccacgcgcaggcggccgtacgctgcggccgccgccacggcgtccgcgtccgcgcccgaagcggcgggcacgactacgagggcctatcctacgcctccctcgaccccggcgagcgcttcgccgtgctcgacctcgccgctttccgtgacgtccgcgtcgactccgcgcgcgccgaggcgtgggctggatcgggggccacgctcggcgaggtctactatgccgtcgccgccgccagccgcgtgctcgcgttccccgctgggatctgccccactgtcggcgtaggaggacacctcagcggcggcggcttcggcacgctgatgcgcaggtacggcctcgctgcggacaacgtcattgacgccgtcctcgttgacgccgacgggaggctgctgaaccggaccaccatgggggaggacctgttctgggccatccgcggtggcggcggggagagcttcggtgtcgtactgtcttggaagctccgcctcgtgcgcgtgccggagacagtcaccgtgttcaccgtgcgccggtcaataaaccagtccgcctcgcacctcatcaccaaatggcaggcaatcgcgccggcgctgcccagtgacctcatcctccgagtcgccgtccggagccagcacgcgcggtttgaggcactgttcctcggccgctgcagccgcctccttgagcacatgcgagttcacttccccgaccttggcgtcacccaatcggactgcgaggagataagctggatccagtccaccgtgtacttcgccttctactcgagctccaagccactggagctgctcctggacaggagcggcgagacgcccagatacgtcaaggccaagtccgactacgtgcaagaacccatcccacggcacgtgtgggagagaacatggtcatggctggagaagcccgaggccgggctgctcatcctggacccctacggcggccggatgggcagcatctctccgtcagcgacgccgttcccgcaccggaaggggaacctgtacaacctccagtactactcgtattggttcgagaatggcactgcggcattggagaagcggatgagctgggtcagggggctgtacgaggagatggagccgtatgtgtccaagaacccaagaactggatatgtcaactacagggacctggatcttgggacgaacgagttggaggacaatgtgactagctacgccagggcgaggatctggggggagaagtatttcaaaggcaattttgagaggctggcagctgtgaaggccatggcggatcctaatgacttcttcaggaatgagcagagcatccctcctcttcccgctgcaaaaggatggggctccatttgagtggtcgtttgtttcgtagctttgtggtggtggatttcttgtctacgtttgtgaattgtgatcacggctgaggatttgcatgggtgaagtgtagaatgcactattgtattccgtgttctgttgagctgagttctctttgatttgtttttaatcctcattttagttcggggtacaaattattattagtggacgaatagtgatattttggtttcggtgagaggcaggcaggcagcagcgagtgcacggcacagtggtcagtggctgaccaagcgggccgccctcccagcacacgagcctcaagtcgctcgccacgaacacacacaaaacagaacaaccacatccctcgtggtctgaacacaggcgttcttcaacctcggggctgcggagccgcctcttggcctcttcttgttcctattcgttctcgcctagtaggctactaggctggagcagaacggagaaccagagacaaggaggttattcggacacagaaactcctctctcgaacagccatttcatcttggtcatttgatgacatctctctgaaatcgacggagtcaacagatcaagatgacagaaccatcatcatcatattcattgccctctaaaaagcgacaacgctctcctgatgataatgaacattcactagacagaggtcgaatttgtttaagccttgatgataatcttacgttcaatgataccatgatagcacttcaattgatgcgcacacagtttccaaagctggataaggttttggcgcagccattcattttgcagtcacaattgtatagcagtgtgaaggatagaacacaagttgacagagacttggagtcatttaagaaagacaaagtgttacggatattcaaacttagttctgggcaagatgatcatgcaatcatgttcatggatgattatttgaaacaggtctcttttgctattaaacggtcagggggtaaagaccaagatggtagtgaagtatttgagtggtttgagagatatgtggtcccttcaaaactggatgttagcataactcaactagagctgtgctcactgttatcacagggtggtgatgtaacagacaaacatatcacactattgatgaatgctggtctcttaactcgtcaacttattgatccaaatatttactggttttctattccaagaattggccccatattgaaaggcctatcccaggaatgaaattctttcgctgttgaaccgtagaaagtacaaggagatgccgctttcttcactggagaatacaaagttaagattatcacctcttgatacgcggttcctccttcgcgatttgattggatctgggcacataaaaacagttcaaacgcccactggtttgctcgctcgcgtatcaagggattaatagagctctctgtcgtaatcctacttatctgtctgccttatctcttatctgatcatgcacgatttggtgattctagtttcgttttgcattttacctgttttcaaacagcattcaacatgaccccaactcgtcgatagtctttttcattttaagagggtggttgggactccgctctacgttttgatgttccgtggaaactccagcaactcggttccccaaaaagcgtttttgatggagaaattcgttttaagatgtagatgtggagttcagggttaattacccaccaatgtcattcattaaatgccattcattatgatgagaaaataacatttcgtctcaatctattccttcatgcgtacgcagcatccacctcttcgtcaatgcatctgctcctcctgaaaccatatcacttgccatggatgttggtctcgagtccgatttgatggaattgcctacacaaattcattctcatccccttcctcctaatcccatcctatagcggtactgtgccgcttgctgcggacattaactgtacagacgtttt

SEQ ID NO: 80205 - DNA, 3857 bp, Zea Mays
ctttccgtccactcctttggtctcaaatcctcaatcatgcccggaattttgtaccagctcgtcgtcgccgccgccatctgcgccctctccagcggcagcatcgcggtcgcctcaggtttgaatgcgaccgactcgttcctcgtctgcctcgtcggcgcgggcgtcccgccgcgcctccttcagaccccggcgtccccgtcgtactccacgacgctgctctcctccgtacgcaacctccgctacgtcacgtcggacattcagcggccggtcgccatcgtggccgccaccgagccagcccacgcgcaggcggccgtacgctgcggccgccgccacggcgtccgcgtccgcgcccgaagcggcgggcacgactacgagggcctatcctacgcctccctcgaccccggcgagcgcttcgccgtgctcgacctcgccgctttccgtgacgtccgcgtcgactccgcgcgcgccgaggcgtgggctggatcgggggccacgctcggcgaggtctactatgccgtcgccgccgccagccgcgtgctcgcgttccccgctgggatctgccccactgtcggcgtaggaggacacctcagcggcggcggcttcggcacgctgatgcgcaggtacggcctcgctgcggacaacgtcattgacgccgtcctcgttgacgccgacgggaggctgctgaaccggaccaccatgggggaggacctgttctgggccatccgcggtggcggcggggagagcttcggtgtcgtactgtcttggaagctccgcctcgtgcgcgtgccggagacagtcaccgtgttcaccgtgcgccggtcaataaaccagtccgcctcgcacctcatcaccaaatggcaggcaatcgcgccggcgctgcccagtgacctcatcctccgagtcgccgtccggagccagcacgcgcggtttgaggcactgttcctcggccgctgcagccgcctccttgagcacatgcgagttcacttccccgaccttggcgtcacccaatcggactgcgaggagataagctggatccagtccaccgtgtacttcgccttctactcgagctccaagccactggagctgctcctggacaggagcggcgagacgcccagatacgtcaaggccaagtccgactacgtgcaagaacccatcccacggcacgtgtgggagagaacatggtcatggctggagaagcccgaggccgggctgctcatcctggacccctacggcggccggatgggcagcatctctccgtcagcgacgccgttcccgcaccggaaggggaacctgtacaacctccagtactactcgtattggttcgagaatggcactgcggcattggagaagcggatgagctgggtcagggggctgtacgaggagatggagccgtatgtgtccaagaacccaagaactggatatgtcaactacagggacctggatcttgggacgaacgagttggaggacaatgtgactagctacgccagggcgaggatctggggggagaagtatttcaaaggcaattttgagaggctggcagctgtgaaggccatggcggatcctaatgacttcttcaggaatgagcagagcatccctcctcttcccgctgcaaaaggatggggctccatttgagtggtcgtttgtttcgtagctttgtggtggtggatttcttgtctacgtttgtgaattgtgatcacggctgaggatttgcatgggtgaagtgtagaatgcactattgtattccgtgttctgttgagctgagttctctttgatttgtttttaatcctcattttagttcggggtacaaattattattagtggacgaatagtgatattttggtttcggtgagaggcaggcaggcagcagcgagtgcacggcacagtggtcagtggctgaccaagcgggccgccctcccagcacacgagcctcaagtcgctcgccacgaacacacacaaaacagaacaaccacatccctcgtggtctgaacacaggcgttcttcaacctcggggctgcggagccgcctcttggcctcttcttgttcctattcgttctcgcctagtaggctactaggctggagcagaacggagaaccagagacaaggaggttattcggacacagaaactcctctctcgtatctccctaaactgatgtagaacagccatttcatcttggtcatttgatgacatctctctgaaatcgacggagtcaacagatcaagatgacagaaccatcatcatcatattcattgccctctaaaaagcgacaacgctctcctgatgataatgaacattcactagacagaggtcgaatttgtttaagccttgatgataatcttacgttcaatgataccatgatagcacttcaattgatgcgcacacagtttccaaagctggataaggttttggcgcagccattcattttgcagtcacaattgtatagcagtgtgaaggatagaacacaagttgacagagacttggagtcatttaagaaagacaaagtgttacggatattcaaacttagttctgggcaagatgatcatgcaatcatgttcatggatgattatttgaaacaggtctcttttgctattaaacggtcagggggtaaagaccaagatggtagtgaagtatttgagtggtttgagagatatgtggtcccttcaaaactggatgttagcataactcaactagagctggtaagtatcaagaattaggtattacttctgtgcaggattctatcttggccttttcttattagaggtaattatcatttgctattgaaaatatacagatttctgtcagaattttgcattgctactctttatgttccttttttctggtcaaatgttaaataaaactaggtgatgaaccaagatttataagatttattattgcgctgttgctatagtagcacttccacctcattgatatcttctattgaagaaatggtcgaatatatctaatatctttcattgcagtgctcactgttatcacagggtggtgatgtaacagacaaacatatcacactattgatgaatgctggtctcttaactcgtcaacttattgatccaaatatttactggttttctattccaagaattggccccatattgaaaggcctatcccaggaatgaaattctttcgctgttgaaccgtagaaagtacaaggagatgccgctttcttcactggagaatacaaagttaagattatcacctcttgatacgcggttcctccttcgcgatttgattggatctgggcacataaaaacagttcaaacgcccactggtttgctcgctcgcgtatcaagggattaatagagctctctgtcgtaatcctacttatctgtctgccttatctcttatctgatcatgcacgatttggtgattctagtttcgttttgcattttacctgttttcaaacagcattcaacatgaccccaactcgtcgatagtctttttcattttaagagggtggttgggactccgctctacgttttgatgttccgtggaaactccagcaactcggttccccaaaaagcgtttttgatggagaaattcgttttaagatgtagatgtggagttcagggttaattacccaccaatgtcattcattaaatgccattcattatgatgagaaaataacatttcgtctcaatctattccttcatgcgtacgcagcatccacctcttcgtcaatgcatctgctcctcctgaaaccatatcacttgccatggatgttggtctcgagtccgatttgatggaattgcctacacaaattcattctcatccccttcctcctaatcccatcctatagcggtactgtgccgcttgctgcggacattaactgtacagacgtttt

SEQ ID NO: 80206 - DNA, 1633 bp, Zea Mays
agcacacgagcctcaagtcgctcgccacgaacacacacaaaacagaacaaccacatccctcgtggtctgaacacaggcgttcttcaacctcggggctgcggagccgcctcttggcctcttcttgttcctattcgttctcgcctagtaggctactaggctggagcagaacggagaaccagagacaaggaggttattcggacacagaaactcctctctcgccatttcatcttggtcatttgatgacatctctctgaaatcgacggagtcaacagatcaagatgacagaaccatcatcatcatattcattgccctctaaaaagcgacaacgctctcctgatgataatgaacattcactagacagaggtcgaatttgtttaagccttgatgataatcttacgttcaatgataccatgatagcacttcaattgatgcgcacacagtttccaaagctggataaggttttggcgcagccattcattttgcagtcacaattgtatagcagtgtgaaggatagaacacaagttgacagagacttggagtcatttaagaaagacaaagtgttacggatattcaaacttagttctgggcaagatgatcatgcaatcatgttcatggatgattatttgaaacaggtctcttttgctattaaacggtcagggggtaaagaccaagatggtagtgaagtatttgagtggtttgagagatatgtggtcccttcaaaactggatgttagcataactcaactagagctgtgctcactgttatcacagggtggtgatgtaacagacaaacatatcacactattgatgaatgctggtctcttaactcgtcaacttattgatccaaatatttactggttttctattccaagaattggccccatattgaaaggcctatcccaggaatgaaattctttcgctgttgaaccgtagaaagtacaaggagatgccgctttcttcactggagaatacaaagttaagattatcacctcttgatacgcggttcctccttcgcgatttgattggatctgggcacataaaaacagttcaaacgcccactggtttgctcgctcgcgtatcaagggattaatagagctctctgtcgtaatcctacttatctgtctgccttatctcttatctgatcatgcacgatttggtgattctagtttcgttttgcattttacctgttttcaaacagcattcaacatgaccccaactcgtcgatagtctttttcattttaagagggtggttgggactccgctctacgttttgatgttccgtggaaactccagcaactcggttccccaaaaagcgtttttgatggagaaattcgttttaagatgtagatgtggagttcagggttaattacccaccaatgtcattcattaaatgccattcattatgatgagaaaataacatttcgtctcaatctattccttcatgcgtacgcagcatccacctcttcgtcaatgcatctgctcctcctgaaaccatatcacttgccatggatgttggtctcgagtccgatttgatggaattgcctacacaaattcattctcatccccttcctcctaatcccatcctatagcggtactgtgccgcttgctgcggacattaactgtacagacgtttt

SEQ ID NO: 80207 - DNA, 1648 bp, Zea Mays
aacacacacaaaacagaacaaccacatccctcgtggtctgaacacaggcgttcttcaacctcggggctgcggagccgcctcttggcctcttcttgttcctattcgttctcgcctagtaggctactaggctggagcagaacggagaaccagagacaaggaggttattcggacacagaaactcctctctcgaattttttttgtttgaagtatctccctaaactgatgtagaacagccatttcatcttggtcatttgatgacatctctctgaaatcgacggagtcaacagatcaagatgacagaaccatcatcatcatattcattgccctctaaaaagcgacaacgctctcctgatgataatgaacattcactagacagaggtcgaatttgtttaagccttgatgataatcttacgttcaatgataccatgatagcacttcaattgatgcgcacacagtttccaaagctggataaggttttggcgcagccattcattttgcagtcacaattgtatagcagtgtgaaggatagaacacaagttgacagagacttggagtcatttaagaaagacaaagtgttacggatattcaaacttagttctgggcaagatgatcatgcaatcatgttcatggatgattatttgaaacaggtctcttttgctattaaacggtcagggggtaaagaccaagatggtagtgaagtatttgagtggtttgagagatatgtggtcccttcaaaactggatgttagcataactcaactagagctgtgctcactgttatcacagggtggtgatgtaacagacaaacatatcacactattgatgaatgctggtctcttaactcgtcaacttattgatccaaatatttactggttttctattccaagaattggccccatattgaaaggcctatcccaggaatgaaattctttcgctgttgaaccgtagaaagtacaaggagatgccgctttcttcactggagaatacaaagttaagattatcacctcttgatacgcggttcctccttcgcgatttgattggatctgggcacataaaaacagttcaaacgcccactggtttgctcgctcgcgtatcaagggattaatagagctctctgtcgtaatcctacttatctgtctgccttatctcttatctgatcatgcacgatttggtgattctagtttcgttttgcattttacctgttttcaaacagcattcaacatgaccccaactcgtcgatagtctttttcattttaagagggtggttgggactccgctctacgttttgatgttccgtggaaactccagcaactcggttccccaaaaagcgtttttgatggagaaattcgttttaagatgtagatgtggagttcagggttaattacccaccaatgtcattcattaaatgccattcattatgatgagaaaataacatttcgtctcaatctattccttcatgcgtacgcagcatccacctcttcgtcaatgcatctgctcctcctgaaaccatatcacttgccatggatgttggtctcgagtccgatttgatggaattgcctacacaaattcattctcatccccttcctcctaatcccatcctatagcggtactgtgccgcttgctgcggacattaactgtacagacgtttt

SEQ ID NO: 80208 - DNA, 1594 bp, Zea Mays
gaacaaccacatccctcgtggtctgaacacaggcgttcttcaacctcggggctgcggagccgcctcttggcctcttcttgttcctattcgttctcgcctagtaggctactaggctggagcagaacggagaaccagagacaaggaggttattcggacacagaaactcctctctcgccatttcatcttggtcatttgatgacatctctctgaaatcgacggagtcaacagatcaagatgacagaaccatcatcatcatattcattgccctctaaaaagcgacaacgctctcctgatgataatgaacattcactagacagaggtcgaatttgtttaagccttgatgataatcttacgttcaatgataccatgatagcacttcaattgatgcgcacacagtttccaaagctggataaggttttggcgcagccattcattttgcagtcacaattgtatagcagtgtgaaggatagaacacaagttgacagagacttggagtcatttaagaaagacaaagtgttacggatattcaaacttagttctgggcaagatgatcatgcaatcatgttcatggatgattatttgaaacaggtctcttttgctattaaacggtcagggggtaaagaccaagatggtagtgaagtatttgagtggtttgagagatatgtggtcccttcaaaactggatgttagcataactcaactagagctgtgctcactgttatcacagggtggtgatgtaacagacaaacatatcacactattgatgaatgctggtctcttaactcgtcaacttattgatccaaatatttactggttttctattccaagaattggccccatattgaaaggcctatcccagggcaggaatgaaattctttcgctgttgaaccgtagaaagtacaaggagatgccgctttcttcactggagaatacaaagttaagattatcacctcttgatacgcggttcctccttcgcgatttgattggatctgggcacataaaaacagttcaaacgcccactggtttgctcgctcgcgtatcaagggattaatagagctctctgtcgtaatcctacttatctgtctgccttatctcttatctgatcatgcacgatttggtgattctagtttcgttttgcattttacctgttttcaaacagcattcaacatgaccccaactcgtcgatagtctttttcattttaagagggtggttgggactccgctctacgttttgatgttccgtggaaactccagcaactcggttccccaaaaagcgtttttgatggagaaattcgttttaagatgtagatgtggagttcagggttaattacccaccaatgtcattcattaaatgccattcattatgatgagaaaataacatttcgtctcaatctattccttcatgcgtacgcagcatccacctcttcgtcaatgcatctgctcctcctgaaaccatatcacttgccatggatgttggtctcgagtccgatttgatggaattgcctacacaaattcattctcatccccttcctcctaatcccatcctatagcggtactgtgccgcttgctgcggacattaactgtacagacgtttt

SEQ ID NO: 80209 - DNA, 1349 bp, Zea Mays
gaacaaccacatccctcgtggtctgaacacaggcgttcttcaacctcggggctgcggagccgcctcttggcctcttcttgttcctattcgttctcgcctagtaggctactaggctggagcagaacggagaaccagagacaaggaggttattcggacacagaaactcctctctcggttttggcgcagccattcattttgcagtcacaattgtatagcagtgtgaaggatagaacacaagttgacagagacttggagtcatttaagaaagacaaagtgttacggatattcaaacttagttctgggcaagatgatcatgcaatcatgttcatggatgattatttgaaacaggtctcttttgctattaaacggtcagggggtaaagaccaagatggtagtgaagtatttgagtggtttgagagatatgtggtcccttcaaaactggatgttagcataactcaactagagctgtgctcactgttatcacagggtggtgatgtaacagacaaacatatcacactattgatgaatgctggtctcttaactcgtcaacttattgatccaaatatttactggttttctattccaagaattggccccatattgaaaggcctatcccaggaatgaaattctttcgctgttgaaccgtagaaagtacaaggagatgccgctttcttcactggagaatacaaagttaagattatcacctcttgatacgcggttcctccttcgcgatttgattggatctgggcacataaaaacagttcaaacgcccactggtttgctcgctcgcgtatcaagggattaatagagctctctgtcgtaatcctacttatctgtctgccttatctcttatctgatcatgcacgatttggtgattctagtttcgttttgcattttacctgttttcaaacagcattcaacatgaccccaactcgtcgatagtctttttcattttaagagggtggttgggactccgctctacgttttgatgttccgtggaaactccagcaactcggttccccaaaaagcgtttttgatggagaaattcgttttaagatgtagatgtggagttcagggttaattacccaccaatgtcattcattaaatgccattcattatgatgagaaaataacatttcgtctcaatctattccttcatgcgtacgcagcatccacctcttcgtcaatgcatctgctcctcctgaaaccatatcacttgccatggatgttggtctcgagtccgatttgatggaattgcctacacaaattcattctcatccccttcctcctaatcccatcctatagcggtactgtgccgcttgctgcggacattaactgtacagacgtttt

SEQ ID NO: 80210 - DNA, 1596 bp, Zea Mays
caaccacatccctcgtggtctgaacacaggcgttcttcaacctcggggctgcggagccgcctcttggcctcttcttgttcctattcgttctcgcctagtaggctactaggctggagcagaacggagaaccagagacaaggaggttattcggacacagaaactcctctctcgaacagccatttcatcttggtcatttgatgacatctctctgaaatcgacggagtcaacagatcaagatgacagaaccatcatcatcatattcattgccctctaaaaagcgacaacgctctcctgatgataatgaacattcactagacagaggtcgaatttgtttaagccttgatgataatcttacgttcaatgataccatgatagcacttcaattgatgcgcacacagtttccaaagctggataaggttttggcgcagccattcattttgcagtcacaattgtatagcagtgtgaaggatagaacacaagttgacagagacttggagtcatttaagaaagacaaagtgttacggatattcaaacttagttctgggcaagatgatcatgcaatcatgttcatggatgattatttgaaacaggtctcttttgctattaaacggtcagggggtaaagaccaagatggtagtgaagtatttgagtggtttgagagatatgtggtcccttcaaaactggatgttagcataactcaactagagctgtgctcactgttatcacagggtggtgatgtaacagacaaacatatcacactattgatgaatgctggtctcttaactcgtcaacttattgatccaaatatttactggttttctattccaagaattggccccatattgaaaggcctatcccagggcaggaatgaaattctttcgctgttgaaccgtagaaagtacaaggagatgccgctttcttcactggagaatacaaagttaagattatcacctcttgatacgcggttcctccttcgcgatttgattggatctgggcacataaaaacagttcaaacgcccactggtttgctcgctcgcgtatcaagggattaatagagctctctgtcgtaatcctacttatctgtctgccttatctcttatctgatcatgcacgatttggtgattctagtttcgttttgcattttacctgttttcaaacagcattcaacatgaccccaactcgtcgatagtctttttcattttaagagggtggttgggactccgctctacgttttgatgttccgtggaaactccagcaactcggttccccaaaaagcgtttttgatggagaaattcgttttaagatgtagatgtggagttcagggttaattacccaccaatgtcattcattaaatgccattcattatgatgagaaaataacatttcgtctcaatctattccttcatgcgtacgcagcatccacctcttcgtcaatgcatctgctcctcctgaaaccatatcacttgccatggatgttggtctcgagtccgatttgatggaattgcctacacaaattcattctcatccccttcctcctaatcccatcctatagcggtactgtgccgcttgctgcggacattaactgtacagacgtttt

SEQ ID NO: 80211 - DNA, 1862 bp, Zea Mays
catccctcgtggtctgaacacaggcgttcttcaacctcggggctgcggagccgcctcttggcctcttcttgttcctattcgttctcgcctagtaggctactaggctggagcagaacggagaaccagagacaaggaggttattcggacacagaaactcctctctcgccatttcatcttggtcatttgatgacatctctctgaaatcgacggagtcaacagatcaagatgacagaaccatcatcatcatattcattgccctctaaaaagcgacaacgctctcctgatgataatgaacattcactagacagaggtcgaatttgtttaagccttgatgataatcttacgttcaatgataccatgatagcacttcaattgatgcgcacacagtttccaaagctggataaggttttggcgcagccattcattttgcagtcacaattgtatagcagtgtgaaggatagaacacaagttgacagagacttggagtcatttaagaaagacaaagtgttacggatattcaaacttagttctgggcaagatgatcatgcaatcatgttcatggatgattatttgaaacaggtctcttttgctattaaacggtcagggggtaaagaccaagatggtagtgaagtatttgagtggtttgagagatatgtggtcccttcaaaactggatgttagcataactcaactagagctggtaagtatcaagaattaggtattacttctgtgcaggattctatcttggccttttcttattagaggtaattatcatttgctattgaaaatatacagatttctgtcagaattttgcattgctactctttatgttccttttttctggtcaaatgttaaataaaactaggtgatgaaccaagatttataagatttattattgcgctgttgctatagtagcacttccacctcattgatatcttctattgaagaaatggtcgaatatatctaatatctttcattgcagtgctcactgttatcacagggtggtgatgtaacagacaaacatatcacactattgatgaatgctggtctcttaactcgtcaacttattgatccaaatatttactggttttctattccaagaattggccccatattgaaaggcctatcccaggaatgaaattctttcgctgttgaaccgtagaaagtacaaggagatgccgctttcttcactggagaatacaaagttaagattatcacctcttgatacgcggttcctccttcgcgatttgattggatctgggcacataaaaacagttcaaacgcccactggtttgctcgctcgcgtatcaagggattaatagagctctctgtcgtaatcctacttatctgtctgccttatctcttatctgatcatgcacgatttggtgattctagtttcgttttgcattttacctgttttcaaacagcattcaacatgaccccaactcgtcgatagtctttttcattttaagagggtggttgggactccgctctacgttttgatgttccgtggaaactccagcaactcggttccccaaaaagcgtttttgatggagaaattcgttttaagatgtagatgtggagttcagggttaattacccaccaatgtcattcattaaatgccattcattatgatgagaaaataacatttcgtctcaatctattccttcatgcgtacgcagcatccacctcttcgtcaatgcatctgctcctcctgaaaccatatcacttgccatggatgttggtctcgagtccgatttgatggaattgcctacacaaattcattctcatccccttcctcctaatcccatcctatagcggtactgtgccgcttgctgcggacattaactgtacagacgtttt

SEQ ID NO: 80212 - DNA, 1602 bp, Zea Mays
cctcgtggtctgaacacaggcgttcttcaacctcggggctgcggagccgcctcttggcctcttcttgttcctattcgttctcgcctagtaggctactaggctggagcagaacggagaaccagagacaaggaggttattcggacacagaaactcctctctcgtatctccctaaactgatgtagaacagccatttcatcttggtcatttgatgacatctctctgaaatcgacggagtcaacagatcaagatgacagaaccatcatcatcatattcattgccctctaaaaagcgacaacgctctcctgatgataatgaacattcactagacagaggtcgaatttgtttaagccttgatgataatcttacgttcaatgataccatgatagcacttcaattgatgcgcacacagtttccaaagctggataaggttttggcgcagccattcattttgcagtcacaattgtatagcagtgtgaaggatagaacacaagttgacagagacttggagtcatttaagaaagacaaagtgttacggatattcaaacttagttctgggcaagatgatcatgcaatcatgttcatggatgattatttgaaacaggtctcttttgctattaaacggtcagggggtaaagaccaagatggtagtgaagtatttgagtggtttgagagatatgtggtcccttcaaaactggatgttagcataactcaactagagctgtgctcactgttatcacagggtggtgatgtaacagacaaacatatcacactattgatgaatgctggtctcttaactcgtcaacttattgatccaaatatttactggttttctattccaagaattggccccatattgaaaggcctatcccaggaatgaaattctttcgctgttgaaccgtagaaagtacaaggagatgccgctttcttcactggagaatacaaagttaagattatcacctcttgatacgcggttcctccttcgcgatttgattggatctgggcacataaaaacagttcaaacgcccactggtttgctcgctcgcgtatcaagggattaatagagctctctgtcgtaatcctacttatctgtctgccttatctcttatctgatcatgcacgatttggtgattctagtttcgttttgcattttacctgttttcaaacagcattcaacatgaccccaactcgtcgatagtctttttcattttaagagggtggttgggactccgctctacgttttgatgttccgtggaaactccagcaactcggttccccaaaaagcgtttttgatggagaaattcgttttaagatgtagatgtggagttcagggttaattacccaccaatgtcattcattaaatgccattcattatgatgagaaaataacatttcgtctcaatctattccttcatgcgtacgcagcatccacctcttcgtcaatgcatctgctcctcctgaaaccatatcacttgccatggatgttggtctcgagtccgatttgatggaattgcctacacaaattcattctcatccccttcctcctaatcccatcctatagcggtactgtgccgcttgctgcggacattaactgtacagacgtttt

SEQ ID NO: 80213 - DNA, 2438 bp, Zea Mays
ctgcaacctaactccactaactgctacggactagtgtttttttatatttatttcaaaagctggtcaccattttttttttcaaacggagggttgtaaaagtgactgagatgaaggggaaatggaacagtgactgaggtgatgagagataagcatcttttctttggccagcataaatcgccccccaagcgctgctcaggtcatctatctccctctttgccatccggcccatccccagcctgtgtttgcatcccatttgcttccccccctcttgcccatcccctgtgctgtgctgtgaactgcggccgggggcatccttgttggggggtggcgtaggaggctgctgacactactgcagagcagggcagccatgaggcttcctctccctctgctggccctggtgtgctgcgccctgatggcgcgccagcattgcgctgcggcgggcaaggcccggcacttgaggtgggagatcagcaacatgttctggtctcccgactgcgaggagaaggtggtgatcggcatcaacgggcagttcccgggcccgacgatccgcgcccgggccggcgacaccgtccacgtccagctcaggaacgcgctccacaccgagggcgtcgtcatccactggcacggcatccgacagatcgggacgccgtgggcggacggcacggcggcgatctcccagtgcgccatcaaccccgaggaaaccttcacctaccgcttcgtcgtcgacaagccggggacgtacttctaccacgggcactacgggatgcagagggcggcggggctgtacgggtcgctggtcgtggacgtggcggagggggaggaggagccgttccagtacgacggcgagctcaacctgctgctcagcgactggtaccacgagagcatccacacccagatggtcgccctctcgtccaggcccttcaggtggatcggcgagccacagtctctgctgatcaacgggagaggccagttcaactgctcgctggccgcagcgcacacgcagggggccaccaacacgcagtgcgccgccaccgccgccaacacgcagtgcgcgccggtggtactccccgtgcagcctaacaagacctacaggctcagggtggccagcaccacctcgctcgcttctctcaacctcgcgatcgggctgacggtggtggaggccgacggcaactacgtggacccattcgttgtggacgacatcgacctctactccggcgacagctactctgtcctgctcacgacggaccaggacacgtcctcgaactactgggtcagcgtgggcgtgcgcggccggctgcccaagacggcgccggcgctggcagtgctcaactaccgccccaaccgcgcgtcggacctgccagccctcgcgccgccggtcaccccggcgtgggacgactacggccacagcaaggcgttcacgtacaggatccgcgcgcgcgccgggacgcccccgccgccgccgacggcggcccgccgcatcgagctgctcaacacgcagaaccggatggacgggcgcatcaggtggtccatcaacaacgtgtccatggttctgcccgccacgccgtacctgggctccctgaagatggggctcaagtcgacgctggcggcggcgcgccccgcggagacgttcagccgggaatacgacgtgacgctgccgccgccgaaccccaacacgacggcgggggacaacgtgtacgtcctggcgcacaacaccaccgtcgacgtgctgctccagaacgccaacgcgctgtcgcgcaacgtcagcgaggtgcacccgtggcacctccacggccacgacttctgggtgctgggctacggcgacggcgcgtaccgcggggacgccgccgacgaagcgcggctcaacctccgggacccgccgctgcggaacacggcggtcatctttccgtacgggtggacgatgctccggttcgtggcggacaacccgggcgtgtgggccttccactgccatatcgagccgcacctccacatgggcatgggcgtcatcttcgctgaggctgtcgacctcgtcgccaaggtgcccaacgaggctgtatcctgtggcgccacggccaccgcgctcatggccggcggtcacctgtgattgccatcaaatattggtggccaggctagggaaccgcgcgccttgcctcgcgcgcatgcatattaatgcccttctgtcgtacgagatctctggtcattaattagtgttatttattaatatttcttctatctttttttccgtttattgagacgtgaacctagagtgtttgtgcttggctaaccatcccatcttagataggttgttgcatcgtaagccaattccttaaattaatgaaaatgcctttttctcaggtgttggtagatcacctctattccacaattgaaacaaaatttaaggcctgagaaagtgatggactattctataccaaaaaaacaaa

SEQ ID NO: 80214 - DNA, 2943 bp, Zea Mays
cacccatcgagtgcgcacgccacctcattaattcgtctccagctccgcgccccatccatccattcccatcactgcgctcggcactgccgctcgccctcgccgctccaccttctccctccctctctctctgtatcacactcaaaagaagtgcctcgaaaaggaaacgagcaacaggagacagtgaaggggaaggagggggagcgaccaatcggactatcggagcatccaatccaccaccggccgctcgctgttcatccgttacactagcagtataaaacaaaaccctgtgcctctcctttgccggcgcgcagtccagcggcctttccttccttccttcctgtccggtcgcgttccattgctcaccctcctcctccattctccactggtatcgtcgtttcgttccagagagccgtgaaaggcgtaaggcgaaacgaagcgcgaggggcaggatgccgtaggtggcgaccgtttgtgccgctccgatcgtcgggaggtcggcgcctgaggaggccgtgctttgagttcgactggaggagagccttggcgccggtcgttacggcaagtggcgccgtcgccttctacgcaactttgccaggtcagcgcagcctcacgtcgtcgtcgacgattcaggtctccttccttccgttgcattgttcaaaattctcttagagcttttcttttccccttggcattgccgcgcagctgctgtaaactgtaagcatcgcaccgtcacctgttcattcctacgtgggtgagcaacttggtgcagtctgttatgctacgactaacgtagaactgtagatcggaaagcgatcggggtccactacgtggcggctctcgacgtcaacggcgagggatagggcagcgtgtttgacgaaatgctttgcgcagtcaaaagatggccaccacctcgctactctgtttttagttgtacatcctcctctgttctgcgacatcctcgcgcttctaatggacttcccataggatgataagctagtttatgagtcggcaagcgcatccaaaaaaaataaaaacaaaaactcgcaaccatacgttgtcgccacctttaaccggcattgctgttcacgaattggtagacacttgtgctcgctttagcttttcgctctaatatcgtcgtgcactttgctatgtacaacttgccaaattgctctagcagtctagcctctttgtgctgtgctctcttctcaccttccattaaactgatccttaatgactcgagttcgcaacacacagcactgtagaacaagtttgtccgaaaataaaccgtaaccgataactactattctcactccaatttgttttccgttgattacttgttgcaggcccgaatacttccgccagctgctgaagcccgttgccgcacgccttccgagcaacctcaaacccgaaccaaactaaccgaaacgcaatttttggattcagttcctagcaatccaaacacaaacacagccagggatcaagcaacacgactcgagtggtccaatgcagggagaccccggttacgggtacggtggctacggcgccggcgccggcggctacggctacgactacgacgtcgccgccaactgcgccggaggcggctactactcggcggcgaacgaccggtaccctgccgcgcctccgcctgctgcagcctatgaggatccgctcggtggtcggaggcagcacgacttcccggcgccgctcacggggctggagttccagccgtcggacacctgtcccaagaactacgtcatcttcgaccagacgtacgaccggagccgggtgatgttccacccctccctggccaacaacttcggttcctctgccggcggatacgactacggcaaccactgctacggctacgaccagacctaccccggcgagagcgcctaccacggctgcggcgacgacgccggcgccggcgccggcggcgtctcggtccggcagaaggaggacaccgacgagatcgacgcgctcatgagcacggaggaaggcgacgaagaggacgacgtgctcagcaccggccgcacacccggatgccgcgccggcggctccccggattccacgtgctcatccggcgggtacgctgggaacagcagcggcggccggaagcacgagacgggcggcggtgagaagaagaaggagcggatgaagaagatggtgcggacgctcaaggggatcatccccggtggcgaccggatggacacgccggccgtgctcgacgaggccgtgaggtacctcaagtcgctcaaggtggaggtcaagaaggccggcgcgcgtgggtcaagcagctagctttccagctgcaactggtagtctggctttgggctttggcagtcgaaataggagttatctccccgcgcaccggcagataagatgagaccgaccgcctctcattttgattttggcatcagatgccattctgtgtatctgactactacctagcttggccgctgggcctcccaactcaacggcgtctgcgagaagatggtcaaggaggccaacggtgggcaggcttggacgcggtcatccatgagtggttccgacagtggtggtaatggattggaatcttaaacccaaatagagaagttttattaaaaatctaaggaaaagaattcatcatccaatctatttcagttccaaatcactgatgtccagtctaattcaattgttttagagtccaaatccatcccggacgattcaaataatgccagaagtattatgttcatatgttgacatcatgtttgaagctgcaccttagtactaaaatctcacgccttcaaattttgataaacttaaccaaaattggttcgagattattcgatatgaactattatggtatgtttagcactttttcctaaagatcttttcttgtcatctagattgttggatactcaatctgttatgagaatctacggaacaggaggaaggagtctgcat

SEQ ID NO: 80215 - DNA, 1791 bp, Zea Mays
ctccctccctctctctctgtatcacactcaaaagaagtgcctcgaaaaggaaacgagcaacaggagacagtgaaggggaaggagggggagcgaccaatcggactatcggagcatccaatccaccaccggccgctcgctgttcatccgttacactagcagtataaaacaaaaccctgtgcctctcctttgccggcgcgcagtccagcggcctttccttccttccttcctgtccggtcgcgttccattgctcaccctcctcctccattctccactggtatcgtcgtttcgttccagagagccgtgaaaggcgtaaggcgaaacgaagcgcgaggggcaggatgccgtaggtggcgaccgtttgtgccgctccgatcgtcgggaggtcggcgcctgaggaggccgtgctttgagttcgactggaggagagccttggcgccggtcgttacggcaagtggcgccgtcgccttctacgcaactttgccaggtcagcgcagcctcacgtcgtcgtcgacgattcaggcccgaatacttccgccagctgctgaagcccgttgccgcacgccttccgagcaacctcaaacccgaaccaaactaaccgaaacgcaatttttggattcagttcctagcaatccaaacacaaacacagccagggatcaagcaacacgactcgagtggtccaatgcagggagaccccggttacgggtacggtggctacggcgccggcgccggcggctacggctacgactacgacgtcgccgccaactgcgccggaggcggctactactcggcggcgaacgaccggtaccctgccgcgcctccgcctgctgcagcctatgaggatccgctcggtggtcggaggcagcacgacttcccggcgccgctcacggggctggagttccagccgtcggacacctgtcccaagaactacgtcatcttcgaccagacgtacgaccggagccgggtgatgttccacccctccctggccaacaacttcggttcctctgccggcggatacgactacggcaaccactgctacggctacgaccagacctaccccggcgagagcgcctaccacggctgcggcgacgacgccggcgccggcgccggcggcgtctcggtccggcagaaggaggacaccgacgagatcgacgcgctcatgagcacggaggaaggcgacgaagaggacgacgtgctcagcaccggccgcacacccggatgccgcgccggcggctccccggattccacgtgctcatccggcgggtacgctgggaacagcagcggcggccggaagcacgagacgggcggcggtgagaagaagaaggagcggatgaagaagatggtgcggacgctcaaggggatcatccccggtggcgaccggatggacacgccggccgtgctcgacgaggccgtgaggtacctcaagtcgctcaaggtggaggtcaagaaggccggcgcgcgtgggtcaagcagctagctttccagctgcaactggtagtctggctttgggctttggcagtcgaaataggagttatctccccgcgcaccggcagataagatgagaccgaccgcctctcattttgattttggcatcagatgccattctgtgtatctgactactacctagcttggccgctgggcctcccaactcaacggcgtctgcgagaagatggtcaaggaggccaacggtgggcaggcttggacgcggtcatccatgagtggttccgacagtggtgattgttggatactcaatctgttatgagaatctacggaacaggaggaaggagtctgcat

SEQ ID NO: 80216 - DNA, 1883 bp, Zea Mays
aaagacgcaaaacgtccgtctgcccctctctggttataattttgggcattaattgcacgtctcctccccacctctccttccctccacccgtgccgtcgcctcgcctatccgatctgccacctcctcccgtctcgcacgttccttcccaactccgcagcgtagcctctccgcggcgcgatccagatccagcatgggcctggtgaaggaaggcatcgacatggaggagggaacccttgagatcggcatggagtacaggactgtatctggtgttgctgggcctctggtcatattggataaagtaaagggcccaaagtaccaagaaattgtaaacatccgacttggagatggcaccaatcgccgtggtcaagtcctggaagttgatggcgaaaaagctgttgtgcaggtctttgaaggaacttctggaatagacaacaaatacacaaccgtgcagtttacaggcgaggttttgaaaactcctgtctcacttgatatgcttgggcgcatttttaatggttctggaaaacctattgacaatggccccccgatattgcccgaagcctacttggatatctctggaagttctattaaccccagtgagagaacctatccagaggagatgatccaaactgggatatccaccattgatgtcatgaattccattgctcgtggacaaaagattccactgttttctgctgctgggctccctcacaatgaaattgctgctcagatttgtcgtcaggctggtcttgtgaagacattggagaaaggaaagcatgctgagggtggtgaagatgacaactttgctattgtgtttgctgctatgggagtgaacatggaaacagctcaattcttcaaacgtgattttgaagagaatggttccatggagcgggtcaccctttttctgaatctggctaacgaccccaccattgaacgtattatcacccctcggattgctctaacaacagcggaatatttggcatatgaatgtgggaagcatgtacttgttatcttgacagatatgagctcttatgcagatgcacttcgtgaggtttctgcagcccgagaagaggtgccaggtaggcgtggttatcctggatatatgtatactgatttggcaacaatatatgagcgtgctgggcgtattgaaggaagaacaggctccattacccagattcctattctaacaatgcctaacgatgatatcacacacccaactcctgaccttactggatacattactgagggacagatatacattgataggcagctccataacagacagatttatccacctattaatgtcctgccatctctttcacgattgatgaagagtgctattggtgagggcatgacacgtcgagaccattcggatgtatctaatcagctttatgccaactatgctattggaaaggatgttcaggccatgaaggctgtcgttggagaggaggcactctcgtctgaggatctgctttacttagagttccttgacaagtttgagaggaagtttgtgacacaaggagcatatgacacacggaacatcttccagtcactcgatcttgcatggacattgcttcggatcttccctcgcgaacttctccaccgtattccagcaaagaccttggaccagtactatagcagagatgcttcccactgaatcactgatcgttgatcagtgttccaatattttgctgccagaactgttagcaagagtattctggagctggaagctcgaacgcaactggttgtatctatatccgtgaatgccgaataaaggaggggcaataaactgcagcgaaatatgtgctgtcagacattgttgaaaattttctcgattttgctgttttgagatgtgagaaatcttttcactgaaccaaaggtgttag

SEQ ID NO: 80217 - DNA, 1747 bp, Zea Mays
aaagacgcaaaacgtccgtctgcccctctctggttataattttgggcattaattgcacgtctcctccccacctctccttccctccacccgtgccgtcgcctcgcctatccgatctgccacctcctcccgtctcgcacgttccttcccaactccgcagcgtagcctctggtcatattggataaagaaattgtaaacatccgacttggagatggcaccaatcgccgtggtcaagtcctggaagttgatggcgaaaaagctgttgtgcaggtctttgaaggaacttctggaatagacaacaaatacacaaccgtgcagtttacaggcgaggttttgaaaactcctgtctcacttgatatgcttgggcgcatttttaatggttctggaaaacctattgacaatggccccccgatattgcccgaagcctacttggatatctctggaagttctattaaccccagtgagagaacctatccagaggagatgatccaaactgggatatccaccattgatgtcatgaattccattgctcgtggacaaaagattccactgttttctgctgctgggctccctcacaatgaaattgctgctcagatttgtcgtcaggctggtcttgtgaagacattggagaaaggaaagcatgctgagggtggtgaagatgacaactttgctattgtgtttgctgctatgggagtgaacatggaaacagctcaattcttcaaacgtgattttgaagagaatggttccatggagcgggtcaccctttttctgaatctggctaacgaccccaccattgaacgtattatcacccctcggattgctctaacaacagcggaatatttggcatatgaatgtgggaagcatgtacttgttatcttgacagatatgagctcttatgcagatgcacttcgtgaggtttctgcagcccgagaagaggtgccaggtaggcgtggttatcctggatatatgtatactgatttggcaacaatatatgagcgtgctgggcgtattgaaggaagaacaggctccattacccagattcctattctaacaatgcctaacgatgatatcacacacccaactcctgaccttactggatacattactgagggacagatatacattgataggcagctccataacagacagatttatccacctattaatgtcctgccatctctttcacgattgatgaagagtgctattggtgagggcatgacacgtcgagaccattcggatgtatctaatcagctttatgccaactatgctattggaaaggatgttcaggccatgaaggctgtcgttggagaggaggcactctcgtctgaggatctgctttacttagagttccttgacaagtttgagaggaagtttgtgacacaaggagcatatgacacacggaacatcttccagtcactcgatcttgcatggacattgcttcggatcttccctcgcgaacttctccaccgtattccagcaaagaccttggaccagtactatagcagagatgcttcccactgaatcactgatcgttgatcagtgttccaatattttgctgccagaactgttagcaagagtattctggagctggaagctcgaacgcaactggttgtatctatatccgtgaatgccgaataaaggaggggcaataaactgcagcgaaatatgtgctgtcagacattgttgaaaattttctcgattttgctgttttgagatgtgagaaatcttttcactgaaccaaaggtgttag

SEQ ID NO: 80218 - DNA, 1892 bp, Zea Mays
aaagacgcaaaacgtccgtctgcccctctctggttataattttgggcattaattgcacgtctcctccccacctctccttccctccacccgtgccgtcgcctcgcctatccgatctgccacctcctcccgtctcgcacgttccttcccaactccgcagcgtagcctctccgcggcgcgatccagatccaggtttttcagcatgggcctggtgaaggaaggcatcgacatggaggagggaacccttgagatcggcatggagtacaggactgtatctggtgttgctgggcctctggtcatattggataaagtaaagggcccaaagtaccaagaaattgtaaacatccgacttggagatggcaccaatcgccgtggtcaagtcctggaagttgatggcgaaaaagctgttgtgcaggtctttgaaggaacttctggaatagacaacaaatacacaaccgtgcagtttacaggcgaggttttgaaaactcctgtctcacttgatatgcttgggcgcatttttaatggttctggaaaacctattgacaatggccccccgatattgcccgaagcctacttggatatctctggaagttctattaaccccagtgagagaacctatccagaggagatgatccaaactgggatatccaccattgatgtcatgaattccattgctcgtggacaaaagattccactgttttctgctgctgggctccctcacaatgaaattgctgctcagatttgtcgtcaggctggtcttgtgaagacattggagaaaggaaagcatgctgagggtggtgaagatgacaactttgctattgtgtttgctgctatgggagtgaacatggaaacagctcaattcttcaaacgtgattttgaagagaatggttccatggagcgggtcaccctttttctgaatctggctaacgaccccaccattgaacgtattatcacccctcggattgctctaacaacagcggaatatttggcatatgaatgtgggaagcatgtacttgttatcttgacagatatgagctcttatgcagatgcacttcgtgaggtttctgcagcccgagaagaggtgccaggtaggcgtggttatcctggatatatgtatactgatttggcaacaatatatgagcgtgctgggcgtattgaaggaagaacaggctccattacccagattcctattctaacaatgcctaacgatgatatcacacacccaactcctgaccttactggatacattactgagggacagatatacattgataggcagctccataacagacagatttatccacctattaatgtcctgccatctctttcacgattgatgaagagtgctattggtgagggcatgacacgtcgagaccattcggatgtatctaatcagctttatgccaactatgctattggaaaggatgttcaggccatgaaggctgtcgttggagaggaggcactctcgtctgaggatctgctttacttagagttccttgacaagtttgagaggaagtttgtgacacaaggagcatatgacacacggaacatcttccagtcactcgatcttgcatggacattgcttcggatcttccctcgcgaacttctccaccgtattccagcaaagaccttggaccagtactatagcagagatgcttcccactgaatcactgatcgttgatcagtgttccaatattttgctgccagaactgttagcaagagtattctggagctggaagctcgaacgcaactggttgtatctatatccgtgaatgccgaataaaggaggggcaataaactgcagcgaaatatgtgctgtcagacattgttgaaaattttctcgattttgctgttttgagatgtgagaaatcttttcactgaaccaaaggtgttag

SEQ ID NO: 80219 - DNA, 1962 bp, Zea Mays
aaagacgcaaaacgtccgtctgcccctctctggttataattttgggcattaattgcacgtctcctccccacctctccttccctccacccgtgccgtcgcctcgcctatccgatctgccacctcctcccgtctcgcacgttccttcccaactccgcagcgtagcctctccgcggcgcgatccagatccaggtttttcagcatgggcctggtgaaggaaggcatcgacatggaggagggaacccttgagatcggcatggagtacaggactgtatctggtgttgctgggcctctggtcatattggataaagtaaagggcccaaagtaccaagaaattgtaaacatccgacttggagatggcaccaatcgccgtggtcaagtcctggaagttgatggcgaaaaagctgttgtgcaggtctttgaaggaacttctggaatagacaacaaatacacaaccgtgcagtttacaggcgaggttttgaaaactcctgtctcacttgatatgcttgggcgcatttttaatggttctggaaaacctattgacaatggccccccgatattgcccgaagcctacttggatatctctggaagttctattaaccccagtgagagaacctatccagaggagatgatccaaactgggatatccaccattgatgtcatgaattccattgctcgtggacaaaagattccactgttttctgctgctgggctccctcacaatgaaattgctgctcagatttgtcgtcaggctggtcttgtgaagacattggagaaaggaaagcatgctgagggtggtgaagatgacaactttgctattgtgtttgctgctatgggagtgaacatggaaacagctcaattcttcaaacgtgattttgaagagaatggttccatggagcgggtcaccctttttctgaatctggctaacgaccccaccattgaacgtattatcacccctcggattgctctaacaacagcggaatatttggcatatgaatgtgggaagcatgtacttgttatcttgacagatatgagctcttatgcagatgcacttcgtgaggtttctgcagcccgagaagaggtgccaggtaggcgtggttatcctggatatatgtatactgatttggcaacaatatatgagcgtgctgggcgtattgaaggaagaacaggctccattacccagattcctattctaacaatgcctaacgatgatatcacacacccaactcctgaccttactggatacattactgagggacagatatacattgataggcagctccataacagacagatttatccacctattaatgtcctgccatctctttcacgattgatgaagagtgctattggtgagggcatgacacgtcgagaccattcggatgtatctaatcagctttatgccaactatgctattggaaaggatgttcaggccatgaaggctgtcgttggagaggaggcactctcgtctgaggatctgctttacttagagttccttgacaagtttgagaggaagtttgtgacacaaggagcatatgacacacggaacatcttccagtcactcgatcttgcatggacattgcttcggatcttccctcgcgaacttctccaccgtattccagcaaagaccttggaccagtactatagcagagatgcttcccactgaatcactgatcgttgatcagtgttccaatattttggcaagtgcagctttgaataaattgaacagattggcctcgtggccattttcctgtatttatctgtagtcagctgccagaactgttagcaagagtattctggagctggaagctcgaacgcaactggttgtatctatatccgtgaatgccgaataaaggaggggcaataaactgcagcgaaatatgtgctgtcagacattgttgaaaattttctcgattttgctgttttgagatgtgagaaatcttttcactgaaccaaaggtgttag

SEQ ID NO: 80220 - DNA, 1836 bp, Zea Mays
aaagacgcaaaacgtccgtctgcccctctctggttataattttgggcattaattgcacgtctcctccccacctctccttccctccacccgtgccgtcgcctcgcctatccgatctgccacctcctcccgtctcgcacgttccttcccaactccgcagcgtagcctctggtcatattggataaagaaattgtaaacatccgacttggagatggcaccaatcgccgtggtcaagtcctggaagttgatggcgaaaaagctgttgtgcaggtctttgaaggaacttctggaatagacaacaaatacacaaccgtgcagtttacaggcgaggttttgaaaactcctgtctcacttgatatgcttgggcgcatttttaatggttctggaaaacctattgacaatggccccccgatattgcccgaagcctacttggatatctctggaagttctattaaccccagtgagagaacctatccagaggagatgatccaaactgggatatccaccattgatgtcatgaattccattgctcgtggacaaaagattccactgttttctgctgctgggctccctcacaatgaaattgctgctcagatttgtcgtcaggctggtcttgtgaagacattggagaaaggaaagcatgctgagggtggtgaagatgacaactttgctattgtgtttgctgctatgggagtgaacatggaaacagctcaattcttcaaacgtgattttgaagagaatggttccatggagcgggtcaccctttttctgaatctggctaacgaccccaccattgaacgtattatcacccctcggattgctctaacaacagcggaatatttggcatatgaatgtgggaagcatgtacttgttatcttgacagatatgagctcttatgcagatgcacttcgtgaggtttctgcagcccgagaagaggtgccaggtaggcgtggttatcctggatatatgtatactgatttggcaacaatatatgagcgtgctgggcgtattgaaggaagaacaggctccattacccagattcctattctaacaatgcctaacgatgatatcacacacccaactcctgaccttactggatacattactgagggacagatatacattgataggcagctccataacagacagatttatccacctattaatgtcctgccatctctttcacgattgatgaagagtgctattggtgagggcatgacacgtcgagaccattcggatgtatctaatcagctttatgccaactatgctattggaaaggatgttcaggccatgaaggctgtcgttggagaggaggcactctcgtctgaggatctgctttacttagagttccttgacaagtttgagaggaagtttgtgacacaaggagcatatgacacacggaacatcttccagtcactcgatcttgcatggacattgcttcggatcttccctcgcgaacttctccaccgtattccagcaaagaccttggaccagtactatagcagagatgcttcccactgaatcactgatcgttgatcagtgttccaatattttggcaagtgcagctttgaataaattgaacagattggcctcgtggccattttcctgtatttatctgtagtcaggtccaattcttttctgttgctgccagaactgttagcaagagtattctggagctggaagctcgaacgcaactggttgtatctatatccgtgaatgccgaataaaggaggggcaataaactgcagcgaaatatgtgctgtcagacattgttgaaaattttctcgattttgctgttttgagatgtgagaaatcttttcactgaaccaaaggtgttag

SEQ ID NO: 80221 - DNA, 1768 bp, Zea Mays
aaagacgcaaaacgtccgtctgcccctctctggttataattttgggcattaattgcacgtctcctccccacctctccttccctccacccgtgccgtcgcctcgcctatccgatctgccacctcctcccgtctcgcacgttccttcccaactccgcagcgtagcctctggtcatattggataaagtaaagggcccaaagtaccaagaaattgtaaacatccgacttggagatggcaccaatcgccgtggtcaagtcctggaagttgatggcgaaaaagctgttgtgcaggtctttgaaggaacttctggaatagacaacaaatacacaaccgtgcagtttacaggcgaggttttgaaaactcctgtctcacttgatatgcttgggcgcatttttaatggttctggaaaacctattgacaatggccccccgatattgcccgaagcctacttggatatctctggaagttctattaaccccagtgagagaacctatccagaggagatgatccaaactgggatatccaccattgatgtcatgaattccattgctcgtggacaaaagattccactgttttctgctgctgggctccctcacaatgaaattgctgctcagatttgtcgtcaggctggtcttgtgaagacattggagaaaggaaagcatgctgagggtggtgaagatgacaactttgctattgtgtttgctgctatgggagtgaacatggaaacagctcaattcttcaaacgtgattttgaagagaatggttccatggagcgggtcaccctttttctgaatctggctaacgaccccaccattgaacgtattatcacccctcggattgctctaacaacagcggaatatttggcatatgaatgtgggaagcatgtacttgttatcttgacagatatgagctcttatgcagatgcacttcgtgaggtttctgcagcccgagaagaggtgccaggtaggcgtggttatcctggatatatgtatactgatttggcaacaatatatgagcgtgctgggcgtattgaaggaagaacaggctccattacccagattcctattctaacaatgcctaacgatgatatcacacacccaactcctgaccttactggatacattactgagggacagatatacattgataggcagctccataacagacagatttatccacctattaatgtcctgccatctctttcacgattgatgaagagtgctattggtgagggcatgacacgtcgagaccattcggatgtatctaatcagctttatgccaactatgctattggaaaggatgttcaggccatgaaggctgtcgttggagaggaggcactctcgtctgaggatctgctttacttagagttccttgacaagtttgagaggaagtttgtgacacaaggagcatatgacacacggaacatcttccagtcactcgatcttgcatggacattgcttcggatcttccctcgcgaacttctccaccgtattccagcaaagaccttggaccagtactatagcagagatgcttcccactgaatcactgatcgttgatcagtgttccaatattttgctgccagaactgttagcaagagtattctggagctggaagctcgaacgcaactggttgtatctatatccgtgaatgccgaataaaggaggggcaataaactgcagcgaaatatgtgctgtcagacattgttgaaaattttctcgattttgctgttttgagatgtgagaaatcttttcactgaaccaaaggtgttag

SEQ ID NO: 80222 - DNA, 1723 bp, Zea Mays
gttcagcaacagcggctgcggtttttcagcatgggcctggtgaaggaaggcatcgacatggaggagggaacccttgagatcggcatggagtacaggactgtatctggtgttgctgggcctctggtcatattggataaagtaaagggcccaaagtaccaagaaattgtaaacatccgacttggagatggcaccaatcgccgtggtcaagtcctggaagttgatggcgaaaaagctgttgtgcaggtctttgaaggaacttctggaatagacaacaaatacacaaccgtgcagtttacaggcgaggttttgaaaactcctgtctcacttgatatgcttgggcgcatttttaatggttctggaaaacctattgacaatggccccccgatattgcccgaagcctacttggatatctctggaagttctattaaccccagtgagagaacctatccagaggagatgatccaaactgggatatccaccattgatgtcatgaattccattgctcgtggacaaaagattccactgttttctgctgctgggctccctcacaatgaaattgctgctcagatttgtcgtcaggctggtcttgtgaagacattggagaaaggaaagcatgctgagggtggtgaagatgacaactttgctattgtgtttgctgctatgggagtgaacatggaaacagctcaattcttcaaacgtgattttgaagagaatggttccatggagcgggtcaccctttttctgaatctggctaacgaccccaccattgaacgtattatcacccctcggattgctctaacaacagcggaatatttggcatatgaatgtgggaagcatgtacttgttatcttgacagatatgagctcttatgcagatgcacttcgtgaggtttctgcagcccgagaagaggtgccaggtaggcgtggttatcctggatatatgtatactgatttggcaacaatatatgagcgtgctgggcgtattgaaggaagaacaggctccattacccagattcctattctaacaatgcctaacgatgatatcacacacccaactcctgaccttactggatacattactgagggacagatatacattgataggcagctccataacagacagatttatccacctattaatgtcctgccatctctttcacgattgatgaagagtgctattggtgagggcatgacacgtcgagaccattcggatgtatctaatcagctttatgccaactatgctattggaaaggatgttcaggccatgaaggctgtcgttggagaggaggcactctcgtctgaggatctgctttacttagagttccttgacaagtttgagaggaagtttgtgacacaaggagcatatgacacacggaacatcttccagtcactcgatcttgcatggacattgcttcggatcttccctcgcgaacttctccaccgtattccagcaaagaccttggaccagtactatagcagagatgcttcccactgaatcactgatcgttgatcagtgttccaatattttgctgccagaactgttagcaagagtattctggagctggaagctcgaacgcaactggttgtatctatatccgtgaatgccgaataaaggaggggcaataaactgcagcgaaatatgtgctgtcagacattgttgaaaattttctcgattttgctgttttgagatgtgagaaatcttttcactgaaccaaaggtgttag

SEQ ID NO: 80223 - DNA, 568 bp, Zea Mays
tctgttgcgagtgaaataaattcgagcatatgacacacggaacatcttccagtcactcgatcttgcatggacattgcttcggatcttccctcgcgaacttctccaccgtattccagcaaagaccttggaccagtactatagcagagatgcttcccactgaatcactgatcgttgatcagtgttccaatattttggcaagtgcagctttgaataaattgaacagattggcctcgtggccattttcctgtatttatctgtagtcaggtccaattcttttctgttggtgagcgcaagttattcatagatgactcggtcatgggaatatttgtaatattatgtcatgtatcgttaaatttcagttgttttgtttcagctgccagaactgttagcaagagtattctggagctggaagctcgaacgcaactggttgtatctatatccgtgaatgccgaataaaggaggggcaataaactgcagcgaaatatgtgctgtcagacattgttgaaaattttctcgattttgctgttttgagatgtgagaaatcttttcactgaaccaaaggtgttag

SEQ ID NO: 80224 - DNA, 353 bp, Zea Mays
ccgtctgctgccccgccagtcatcgtgggctcggtcaagcacctcacgcctgcgtggttccacttcggcgaccggtgtgacgaagcaggttagtctgtaagttgttgagctgtggagcaatcgtttcctaatgggaaattcgatctgaaatggcaaaggacctgatggtggaagtaaatcgtacctatgcaacctatattcaacaagccctaacagtgtgcaattgcaaaaaaatgccaaagtcttaatttaggaatttaaagaaaggaaaagttaactttcagacaattggaggcgtgtgttcgatgggggggtattttgtgctgaccactcatcacacatatgcatggcac

SEQ ID NO: 80225 - DNA, 789 bp, Zea Mays
cgctcaggcaccggagtcacaccatcctcgctgtcaatctcgtcgcaaaccctccgcccctctccggtctggcactaccacgagcttccagaccccccgcccgagaaatgttgtagcgtctcatgctgggatgggcggcgtcagcgccgtctctcgccctgctgtggtcctcctcctctaggtggagtcctgcacttctttattgtctcgtcttgctcgctcgtcccctaaatcatgtctgcgtcgccccctccatttcacgagtttgctcgcgttggccgggggacgggggtccggagcctcgtgccgcactccatcagagaccctgcaacctttccgcgagcgctgttgttcctgctcctgccggcggccttgctaccaacccgagcgtgcgtgtgttggtggagccaggcaattccagtgcacggcgtggattcagttttcgatcagtgaattgcacatacagctacccttgagtcaaattgattgtatccgcttgtttctaacatctcccttccacagttccacttcggcgaccggtgtgacgaagcaggttagtctgtaagttgttgagctgtggagcaatcgtttcctaatgggaaattcgatctgcccacgcacagccgcccctgcccgaccgacgaccgctggtgccgtccgctccacgcctgcgaccactccacaatgggtggcaagtttgaccatgtagatcgtttgttccaaagcatggagagcgcttacataaatagcttatcaaatacaagtgacgtcaaagagcttattccagaa

SEQ ID NO: 80226 - DNA, 730 bp, Zea Mays
cgctcaggcaccggagtcacaccatcctcgctgtcaatctcgtcgcaaaccctccgcccctctccggtctggcactaccacgagcttccagaccccccgcccgagaaatgttgtagcgtctcatgctgggatgggcggcgtcagcgccgtctctcgccctgctgtggtcctcctcctctaggtggagtcctgcacttctttattgtctcgtcttgctcgctcgtcccctaaatcatgtctgcgtcgccccctccatttcacgagtttgctcgcgttggccgggggacgggggtccggagcctcgtgccgcactccatcagagaccctgcaacctttccgcgagcgctgttgttcctgctcctgccggcggccttgctaccaacccgagcgtgcgtgtgttggtggagccaggcaattccagtgcacggcgtggattcagttttcgatcagtgaattgcacatacagctacccttgagtcaaattgattgtatccgcttgtttctaacatctcccttccacagttccacttcggcgaccggtgtgacgaagcagcccacgcacagccgcccctgcccgaccgacgaccgctggtgccgtccgctccacgcctgcgaccactccacaatgggtggcaagtttgaccatgtagatcgtttgttccaaagcatggagagcgcttacataaatagcttatcaaatacaagtgacgtcaaagagcttattccagaa

SEQ ID NO: 80227 - DNA, 920 bp, Zea Mays
tcatgtgcaccgcctacccgactaatggtcgaccagcacacaatatgaaaaatttccctcgccgacagtgctccctcatcttaccatgcctcgctgcacaccaccaccactaaagctcgcagccgagttcctccatctccggcgccggcccactacagcagagggcctcccatggcgtttgtttccccaacgctcaccccgtcaacaaccatcgacctcgcacagcagccgcgacgccagttcacgcagccacgtggattccctcctcttcgcgccctcggtatgctcgacgtattgcagcggcagtcccgacgctatgccgtgacccttggtgaggctctttgctgtcctagccgctggatcgagccttgttccagctcggcgagagcagccgcgccgacgatctacacagccccatcctcgacgccaaaattcttcgccccttgtcgtcgtcgcgcttcgcgcgtcgtttctcgacagaaagccaaaccagcatgcaggcatgcgctacacgagtcggccagaaaccttcggactcggaataaagttgtacacaatatgaaaagcatggacaggacaaaggttgaaccagttccgaagctacgcgcaaggaagcttcggctcaacggcagagaaaggaaccaacttaaaggggaaaaggctatttagtcctcgctggattatctttaagtcaatagtaaacataaagggaatgaatgtaattttacacaggctgtgccctgtgcctataaatagatgaacagtacccccgtactgttcacgctaacttgtacttcctcgtgcgtcacgcttgtactttcaccttctgtcaggtcgaaggtacaaatgtaatcctatgttgttcttattcattcatgattatatagtaaaagatatattataatgtcatacgattatcc

SEQ ID NO: 80228 - DNA, 773 bp, Zea Mays
gcaccgcctacccgactaatggtcgaccagcacacaatatgaaaaatttccctcgccgacagtgctccctcatcttaccatgcctcgctgcacaccaccaccactaaagctcgcagccgagttcctccatctccggcgccggcccactacagcagagggcctcccatggcgtttgtttccccaacgctcaccccgtcaacaaccatcgacctcgcacagcagccgcgacgccagttcacgcagccacgtggattccctcctcttcgcgccctcggtatgctcgacgtattgcagcggcagtcccgacgctatgccgtgacccttggtgaggctctttgctgtcctagccgctggatcgagccttgttccagctcggcgagagcagccgcgccgacgatctacacagccccatcctcgacgccaaaattcttcgccccttgtcgtcgtcgcgcttcgcgcgtcgtttctcgacagaaagccaaaccagcatgcaggcatgcgctacacgagtcggccaggttgttcgctttagaaaaattgtgattttgttttatttacgattcagtcgatggcgtgaatatgtgcgtgaaagtataatttgtatgaatggacgcgtgtaggaaagaaaatgaaacagaaaagaactcgggtatttttattttgataggaaaaaataagcgatgcgttgtttgatgcgaaaactaagttacaaaatgcggattatgttttgggaaatgcatcgatatgtgtttatgtgaaaagtggtatttgtt

SEQ ID NO: 80229 - DNA, 2101 bp, Zea Mays
gtttcgtcgtgtgtatgtttgatgaactaaattatgttttctgtagaaaagtcatatagaagagttatatataaccttattatcttacttgggttaaaatttgacagccataagtctgatcgtttgggagttatacttttcgcaaattcagtaactgaatctgtccactttctgtatagacttcagaaactgcattgtttgcttaatttaattttacaatcagttcatggtcgttataagaaagttgtagatgtttttcttatcttgcttgtgttaaaatttcaaaaccataggcctgacattttaggagttatgaattttgcaaactggttgttgtgttctgtccaccgtcagaacagatttggaaaactgtgttgtttgatttagttaaacatcgaatcacttcttggtgattatataagttatgtagtacttttcctaatctgtccaaaacatattggatcactctttttggtgatatgaagattaagttatggatgtctaaagtgtgaagtctaaatctgtccaaatctggacagcaaagccttcaaatgtcttttatcctaaatttcatattgaatcaccttgggatgtttataaatgatttgtagaaaatttcattagctttccagaaagtctaggatcacctcttttggatgcatgagtctccggttatgaatttttgaaacaaagggcctgaatttgtccaacctggacatagctgttatttttgcacaattcgaccttgctaagagtctaatcatgttgagatgataataccaaagttgtagagcgtttcctaagctttccaaaaagtatttgttcactatttttagataaatattttgtgagttatgactgaaacaagcaactgctgtgctgctgtcctaattttgttatgtttgatggattgctctactctgttgtgtttggctcgggttgactgtttcctcattttgattttagttgaacacacagtaatgacaatataaccaatatgattaagcctaagtatagaagtaactagtacatgtctcgctaaattagtgaactaaattggttaaggtctaataagtgtttgccttgtgaatgattgtaaaaactcgattaagtaactattcctttttaattaagtctgtctatatgtaagtcatcgtaaattatgtgtacttaactagtttaatcataagtagccaatgaacgattaaagtgaacatggtaaatgcttgtactcgttatgccgtgtttgtgtgggtcaaatataggaaatgttcgtcatctttccagtaatgttaacttgttgtgcccaatgatgtataaataactagcacttgtgtggcaatgtcttataatttaatgtttagttcgctactgtttatttgggattgtctgtgatatatttcatcatattcatacacatgcaccctgcatctcatttaggatctgttgcgggccttcgtctttcgaaggtcctaaaaacatgatttaacaatgtttcccaagtgtaatatatgtacagaaaccttcggactcggaataaagttgtacacaatatgaaaagcatggacaggacaaaggttgaaccagttccgaagctacgcgcaaggaagcttcggctcaacggcagagaaaggaaccaacttaaaggggaaaaggctatttagtcctcgctggattatctttaagtcaatagtaaacataaagggaatgaatgtaattttacacaggctgtgccctgtgcctataaatagatgaacagtacccccgtactgttcacgctaacttgtacttcctcgtgcgtcacgcttgtactttcaccttctgtcaggtcgaaggtacaaatgtaatcctatgttgttcttattcattcatgattatatagtaaaagatatattataatgtcatacgattatccatgttatttctcatgttttatatacctcgtctttcattgacatatgctatgattatgaaggtacgtccttcataaccttcgtccgaagatcgttatatccttagggaaataatgcttcgaaggacaaagggcattaaccattaacctattcttgtgttgccttgttcttaactcatagcatttgag

SEQ ID NO: 80230 - DNA, 945 bp, Zea Mays
tagcaacataacaaaggagccaaataaaaaacactacaggtcgtacagtagacgacgagctagctgccaaaagcctacgcggtgctggggcctttgtagaggtagatcgatcgtcgatcagctccggacaaggcccctgggcagcgtcatgagtagcacggcagcatccgtgatctcgccctgctagctagctgctccggcaacgcccgcgacgccttgaagcggcaggagggctgcacagccactggactcctgctccgatccagctgataagccgagaccagcatcgtcgacaaattaaagcaggtcccgctgggacaggaatcgtcgtcaccatcctcggcggtggcctgcacgacagccgccatgctgctggacccggaccaccttacgccgtctcttgaacggcagcgaccggtccacacgtccactctctttcaacttcaccttggggtgtgctggtgcggccacggcggcgtcgttgggcgaggcggccttgccgctgagcgctgagtgggtcggcgccactggccccgagccggccatcgtcgccccgccgcgcctgccgctgcctgataccggacaccttgcaaagcgactgcgggtctgcgccatgcaaaaaaggacaacgaacgagttggattggaagacgcagcaaacaaggatacctttggggccgcaaggaccactcctccacaagggtgtcttgctgatgctgcagacgtcggaccactcctccacaaggatgtagatatagccagggatcactagcactttgttagctatgatattatattcctgctgtcaccagacaggctcaatccattcgtactcaacatgaaccttacatttcattgccgatcgagcttcgaccaggtgtcaacattttatatcgtacttcctgaacttaccggaggaatgtcagctatagcacaccagcttggc

SEQ ID NO: 80231 - DNA, 2476 bp, Zea Mays
ctcacctccaccaaacacgcatccacccgccagcactactgctgcgtggcaaaaatccctggatcagcattgtccaactccgacacgtctctctccctagcttcaatcttcagccaccgctttatataggatattttcctcatcgtgttcaacaggtgcttggaatcagcctcaggtttcttcctcccagtccgtaggagccacgtagctctctgcgtcttccatggtcacttctccggcgttactccagctcgccccgacccttgcgccttagtgtttatccatgctccatgccatggcttctcctaggtcgctctcttcgcgggccgtgatgcccctctgctcctgcctcgcctagccgtgtgcgtgctctctccgcgtcgagcactcactgcagctcgacaccgaccccctcccacatctcccccacaccatcgtctttccctagtggcgagctcgcctagtgatggtcgtcgttggtccctgcgtccttccccggtcgtctcacctcccttcgacgcccctgttttttttcagcttcggcgtccatcgcgtcctgctccttccattcgtatgctctggtgatcgtccaccccggcgtccagcgctgcccttgtctcttcgggttttgtctccccaacaccagtcggacgctccttccattcatatgctctggtggtcgtccaccccagcgtccagtgctgctctcgtctcgtcgggctttgtctccccaacatcagtcgctgcttcaactcatgttcgtggatgccgtatctacgactccgacactccctacacataatctgtgttttgtgttcatcgccgaataaaaatccctggcgttttggagaaaggaagatgaagtctgctcttcgatccctaggtgttcagtgttatgcgcgaaccagaaatcgttgccgatatcacggtcttcaagttgagtttattttattggtacgttaagtgatcacgtgatgtggaggaccagagctgagtcgaccacaagatgttgttaagcgtgggcttcttcgcaaggtgatgctgatggacgaacctaaggatggatgacctgatcaagaaccatgatgaagatgatcgtcaagtgaacgtcgtctaacaaacactaacgtagtgtttattccaggcaagccctggtgcatgcaaccccttccttgtgtttttaaataatttttacacactttaagtctagtgatatatgcactaggtttataggagttgcttggaaaccatttgatgcattgactaccttgatatccattcctgttataggtacttctttggaagtatcaaatattgtttacaaaaatgcttagccctgcttagatcttgtggatagaggttgtcttttgcaataatgcctagctcaggggttatcctgaggaaggatggcttctacctgcaagaatattttcattaggagcatggtgggatcttactgcgaagttccctataatgctcttttcatcctaaggaacacaaaacaatcctaaggatggaagtacttaaatcgagacttggtctaggaataggtgatgttctacctaggttaattaaggattggatgcgtatgtaggcatgtatgattaaagactatcttaactggccacatgccctagatatgggatagggtaagcttgaacctggctattccatacatgaaaagataatcgcacactgggagtggagagatggcgagagtggcacgtaccctcctggcaaaggaccgtctaaaaggggtggtgtgctctcgggtggcgcggacctgttcatgcagtggaggatccgtgggaatgatagacatatgcaagagttacgagaaacatatgttgtgtggttagagatcctcagctgagtaaatcgattcggatcgccgttatatccctagagagtggagacttgatctccgacctataacctaagtcaggatgtaaatattatgaataaaaatgatgttgtattgatgaaatggtgaaattagactagatgcaactagagtctattaatatttaatctggtgttaaaatattgaaagtaaggactcactgtagtaagctatttctgcaaaagtatctaatttgattcttgctaaagccttttccttgattcctatttaaccagcatatccttgagagtcatttttccttagtcgggtaagacatgcgaaagtacaattcgtactcagggttttcgaacccatgttgttgcaggtactagatttgtgctactgtggatggtgttaagcgccaattggcacgaccttcttataagtctaagtacctctcctataattcttattgaggattgtcattgagctagcatatatttcaaaattataaataatttataacatttcaaagtttaattctttgaatcacttttgcaatcactccgataaacataatgtaaatttgttgtaacttgtaacttttgtaataaagaaattccgctgcaaaaa

SEQ ID NO: 80232 - DNA, 1374 bp, Zea Mays
ctcacctccaccaaacacgcatccacccgccagcactactgctgcgtggcaaaaatccctggatcagcattgtccaactccgacacgtctctctccctagcttcaatcttcagccaccgctttatataggatattttcctcatcgtgttcaacaggtgcttggaatcagcctcaggtttcttcctcccagtccgtaggagccacgtagctctctgcgtcttccatggtcacttctccggcgttactccagctcgccccgacccttgcgccttagtgtttatccatgctccatgccatggcttctcctaggtcgctctcttcgcgggccgtgatgcccctctgctcctgcctcgcctagccgtgtgcgtgctctctccgcgtcgagcactcactgcagctcgacaccgaccccctcccacatctcccccacaccatcgtctttccctagtggcgagctcgcctagtgatggtcgtcgttggtccctgcgtccttccccggtcgtctcacctcccttcgacgcccctgttttttttcagcttcggcgtccatcgcgtcctgctccttccattcgtatgctctggtgatcgtccaccccggcgtccagcgctgcccttgtctcttcgggttttgtctccccaacaccagtcggacgctccttccattcatatgctctggtggtcgtccaccccagcgtccagtgctgctctcgtctcgtcgggctttgtctccccaacatcagtcgctgcttcaactcatgttcgtggatgccgtatctacgactccgacactccctacacataatctgtgttttgtgttcatcgccgaataaaaatccctggcgttttggagaaaggaagatgaagtctgctcttcgatccctaggtgttcagtgttatgcgcgaaccagaaatcgttgccgatatcacggtcttcaagtacgttaagtgatcacgtgatgtggaggaccagagctgagtcgaccacaagatgttgttaagcgtgggcttcttcgcaaggtgatgctgatggacgaacctaaggatggatgacctgatcaagaaccatgatgaagatgatcgtcaagtgaacgtcgtctaacaaacactaacgtagtgtttattccaggtactagatttgtgctactgtggatggtgttaagcgccaattggcacgaccttcttataagtctaagtacctctcctataattcttattgaggattgtcattgagctagcatatatttcaaaattataaataatttataacatttcaaagtttaattctttgaatcacttttgcaatcactccgataaacataatgtaaatttgttgtaacttgtaacttttgtaataaagaaattccgctgcaaaaa

SEQ ID NO: 80233 - DNA, 1271 bp, Zea Mays
ctttccttggggaagaacctggaaagccacaaaatgtccctctggcttcttaatgcaattcccatctcaagaaagattggatgaggttattaattttcccaaattaaaaatgaaaatttctggggtcaaaattagcgttattccttggtgatctcaagctaaagtcaagtctagacttcatactacttgggttgttgctaaaaatgtgcccgaagaacttcaaatttaccaagctatctgtgaactcggctccgcaattggtgctattgaggagatagacttgaattccctagaatctaaagacttggttagatttaaagtccatgtgaaaagaattgatatgattcctgaagtcatagaagtgggagtaaaaccttatctgtatgacatattcttcaaagtggagaatgttgatgtggaaggatggaatgatgaatctgtaagcttgggaaaaagggcctctgtagatgtacagagagctagaaaacaggtgattgagaagagtggaaaaaagcaaaaaatgaagagtatgggatacaaaaaaatgatatgatccttgaatatcaatctgggtcgacttccaaaatgcttgggagctcggtccttactgataaatctgataagatatcggatgtggcaaaagatgttggtgaaaaggaaggtagttaaggagatgtggaattcaatgaaagtgaagatgacttactcagttcccaagaacttgatgtgcttgccaaagatatgtgggtggatgtcacaaactcccaggatgagatgctcgtagaaaaagaagatttaaacaagcaagatgtgaatctagaataaaaaacaagaaaagcaagggaaacaagactaatctaatggaagggactagaaagagcactagattggaggcaactgaagacatcaagattattgaaaaagctatttcaagggcggtggctaaagatgcatttctgaacaaagaaagaaacaacaagaaagatcttgggggaaggatgctccctaatcagaagaattgctaaagaggtcttcaaccgaagcttcgactgggcgcctgtggacaaacgtctatgtaattaagattaggcatgggctgactgtacttgctatgagaaaccctattttcccccagcttttactgtctttttggcttccgtgttcttagggttggctgtttgtcatttggggctttaccaaactgttggtaacagtcggttttctttggacatagtctgcctgcgctgctagctgcttgtttggaatctcct

SEQ ID NO: 80234 - DNA, 1453 bp, Zea Mays
gcgccgacgtggcccgctttccattcacaggcatatagcatagccccaccaaccggaagccgatagatgcccgaccaatctaatagcgccgcaacgcgaagcgcgaagccgcgaagcctcgcctgtctggtcagttccttcgcgcaccggcaccgcggcggcagttcagcatggtggcagcatccgtagccgagcgggcctatgaggcggcgacgcggtccgcgctggtggcgctggagcgcaacctcatcccggacgcggtgacccggcgcctgacgcggctcctgctagcgcagcgcctccgccagggctacctcccctccgcgccgctccagctgcagcagctcctccagttcgtccactctcttgaagagatgcccattgccattgaaacagacaaagctaaagcccaacactatgagttgccaactacatttttcaagctagtgctgggaaagaatctcaaatacagttcctgctatttccctggtgattcaagcaccctagaagatgctgaggttgcgatgatggatctgtattgtgagaggtcgaaactacaagatggccaaagtatcctagatgttggatgtggatggggatccctttcactgtacattgcaaagaaatataggaactgcagtgtaacagggatatgcaactctactacacagaaggcttttatagaagagcaatgtagggataacgagctgtcaaatattgagataatcgtagccgacatcagcaagtttgagatggagcgctcttttgacaggatcgtatctatagagatgtttgaggataaaaacgatgatgactggatcacgaggtatttcttcactggaggaacaatgccatctgcaaacctacttctatactttcaggaggatgtatctgtggtagatcattggcttgtcagtggcacgcattatgctagaactagcgaggagtggctaaaacgtatggacaagagcatcacttcaataaggctgatcttcgaggaaacttatgggaaggaatcgactaccaaatggatagcttattggcggacgttcttcatctcggtagctgaactttttggatacaacaatggagatgaatggatggttgcccattacttgttccgaaagaagtagaggctactgcttggaagtacccaatcaaaaatcaatgttttcagtaattttgtcatgtacatcgacgaacaactccttttctggcacgtagttgtatctcgtaccgacttcgtagtggtttcaaaaacaaaatctggaatccctgttgtgaaatttcatcttggacagcgcctgcatatgctttgcagagttaggctaattcttgcaactatgccttcagatgtttgtagagttaggctcattcttgaaagaaaacaaaggattgtttttttagataataatggaattaaggttctggcttcagccctcttcaaagaaga

SEQ ID NO: 80235 - DNA, 1339 bp, Zea Mays
gcgccgacgtggcccgctttccattcacaggcatatagcatagccccaccaaccggaagccgatagatgcccgaccaatctaatagcgccgcaacgcgaagcgcgaagccgcgaagcctcgcctgtctggtcagttccttcgcgcaccggcaccgcggcggcagttcagcatggtggcagcatccgtagccgagcgggcctatgaggcggcgacgcggtccgcgctggtggcgctggagcgcaacctcatcccggacgcggtgacccggcgcctgacgcggctcctgctagcgcagcgcctccgccagggctacctcccctccgcgccgctccagctgcagcagctcctccagttcgtccactctcttgaagagatgcccattgccattgaaacagacaaagctaaagcccaacactatgagttgccaactacatttttcaagctagtgctgggaaagaatctcaaatacagggataacgagctgtcaaatattgagataatcgtagccgacatcagcaagtttgagatggagcgctcttttgacaggatcgtatctatagagatgtttgagcacatgaaaaactacaagtcgcttcttaagaagatatccaggtggatgaaagaggatggcctactattcgttcacctcttctgccacaaagcatttccatatcactttgaggataaaaacgatgatgactggatcacgaggtatttcttcactggaggaacaatgccatctgcaaacctacttctatactttcaggaggatgtatctgtggtagatcattggcttgtcagtggcacgcattatgctagaactagcgaggagtggctaaaacgtatggacaagagcatcacttcaataaggctgatcttcgaggaaacttatgggaaggaatcgactaccaaatggatagcttattggcggacgttcttcatctcggtagctgaactttttggatacaacaatggagatgaatggatggttgcccattacttgttccgaaagaagtagaggctactgcttggaagtacccaatcaaaaatcaatgttttcagtaattttgtcatgtacatcgacgaacaactccttttctggcacgtagttgtatctcgtaccgacttcgtagtggtttcaaaaacaaaatctggaatccctgttgtgaaatttcatcttggacagcgcctgcatatgctttgcagagttaggctaattcttgcaactatgccttcagatgtttgtagagttaggctcattcttgaaagaaaacaaaggattgtttttttagataataatggaattaaggttctggcttcagccctcttcaaagaaga

SEQ ID NO: 80236 - DNA, 1979 bp, Zea Mays
gcgccgacgtggcccgctttccattcacaggcatatagcatagccccaccaaccggaagccgatagatgcccgaccaatctaatagcgccgcaacgcgaagcgcgaagccgcgaagcctcgcctgtctggtcagttccttcgcgcaccggcaccgcggcggcagttcagcatggtggcagcatccgtagccgagcgggcctatgaggcggcgacgcggtccgcgctggtggcgctggagcgcaacctcatcccggacgcggtgacccggcgcctgacgcggctcctgctagcgcagcgcctccgccagggctacctcccctccgcgccgctccagctgcagcagctcctccagttcgtccactctcttgaagagatgcccattgccattgaaacagacaaagctaaagcccaacactatgagttgccaactacatttttcaagctagtgctgggaaagaatctcaaatacagttcctgctatttccctggtgattcaagcaccctagaagatgctgaggttgcgatgatggatctgtattgtgagaggtcgaaactacaagatggccaaagtatcctagatgttggatgtggatggggatccctttcactgtacattgcaaagaaatataggaactgcagtgtaacagggatatgcaactctactacacagaaggcttttatagaagagcaatgtaggtaagtttaatggtttcagtgcttcggttgtatgtcgagtcgactattttaatatctagtgccaacatatgttctatgtaacccttctaagtgactattgcagcctattcgtgtcactgcaatctgtttcttggtcagcatgttgttatattgctgttaattttgcagctattgcgaacttgcaaataatgaagtgcaaatactattgacagaaatactattgcaaacttgcagctgtttaaggatataagacctatttctattatttcaaccatactattgacagaaattatctttcatatgcatgtacatttgctagatacgcagacagatcttctaccgccatatggtctattttgatttcccttctggtaatgctttgttatgccacattgtcacttcaattctgtttcagggataacgagctgtcaaatattgagataatcgtagccgacatcagcaagtttgagatggagcgctcttttgacaggatcgtatctatagagatgtttgagcacatgaaaaactacaagtcgcttcttaagaagatatccaggtggatgaaagaggatggcctactattcgttcacctcttctgccacaaagcatttccatatcactttgaggataaaaacgatgatgactggatcacgaggtatttcttcactggaggaacaatgccatctgcaaacctacttctatactttcaggaggatgtatctgtggtagatcattggcttgtcagtggcacgcattatgctagaactagcgaggagtggctaaaacgtatggacaagagcatcacttcaataaggctgatcttcgaggaaacttatgggaaggaatcgactaccaaatggatagcttattggcggacgttcttcatctcggtagctgaactttttggatacaacaatggagatgaatggatggttgcccattacttgttccgaaagaagtagaggctactgcttggaagtacccaatcaaaaatcaatgttttcagtaattttgtcatgtacatcgacgaacaactccttttctggcacgtagttgtatctcgtaccgacttcgtagtggtttcaaaaacaaaatctggaatccctgttgtgaaatttcatcttggacagcgcctgcatatgctttgcagagttaggctaattcttgcaactatgccttcagatgtttgtagagttaggctcattcttgaaagaaaacaaaggattgtttttttagataataatggaattaaggttctggcttcagccctcttcaaagaaga

SEQ ID NO: 80237 - DNA, 1806 bp, Zea Mays
gcgccgacgtggcccgctttccattcacaggcatatagcatagccccaccaaccggaagccgatagatgcccgaccaatctaatagcgccgcaacgcgaagcgcgaagccgcgaagcctcgcctgtctggtcagttccttcgcgcaccggcaccgcggcggcagttcagcatggtggcagcatccgtagccgagcgggcctatgaggcggcgacgcggtccgcgctggtggcgctggagcgcaacctcatcccggacgcggtgacccggcgcctgacgcggctcctgctagcgcagcgcctccgccagggctacctcccctccgcgccgctccagctgcagcagctcctccagttcgtccactctcttgaagagatgcccattgccattgaaacagacaaagctaaagcccaacactatgagttgccaactacatttttcaagctagtgctgggaaagaatctcaaatacagttcctgctatttccctggtgattcaagcaccctagaagatgctgaggttgcgatgatggatctgtattgtgagaggtcgaaactacaagatggccaaagtatcctagatgttggatgtggatggggatccctttcactgtacattgcaaagaaatataggaactgcagtgtaacagggatatgcaactctactacacagaaggcttttatagaagagcaatgtagggataacgagctgtcaaatattgagataatcgtagccgacatcagcaagtttgagatggagcgctcttttgacaggatcgtatctatagagatgtttgagcacatgaaaaactacaagtcgcttcttaagaagatatccaggtggatgaaagaggatggcctactattcgttcacctcttctgccacaaagcatttccatatcactttgaggataaaaacgatgatgactggatcacgaggtatttcttcactggaggaacaatgccatctgcaaacctacttctatactttcaggaggatgtatctgtggtagatcattggcttgtcagtggcacgcattatgctagaactaggtatatccttccaaacttcaaactatcctcgctctaataatccatgaattctaaaatggttttaaaaatgttctagtaatcactagtaaagggtttcttgttttgccacactgtcgagtttacactgtacaatgacaaaatgtcaggcaacgaatgccatctaaataaatgctcgaaatgaatcgacatacagcaaagtgtagtattaactaacttgagcacttggggtcatttttgtgtagcgaggagtggctaaaacgtatggacaagagcatcacttcaataaggctgatcttcgaggaaacttatgggaaggaatcgactaccaaatggatagcttattggcggacgttcttcatctcggtagctgaactttttggatacaacaatggagatgaatggatggttgcccattacttgttccgaaagaagtagaggctactgcttggaagtacccaatcaaaaatcaatgttttcagtaattttgtcatgtacatcgacgaacaactccttttctggcacgtagttgtatctcgtaccgacttcgtagtggtttcaaaaacaaaatctggaatccctgttgtgaaatttcatcttggacagcgcctgcatatgctttgcagagttaggctaattcttgcaactatgccttcagatgtttgtagagttaggctcattcttgaaagaaaacaaaggattgtttttttagataataatggaattaaggttctggcttcagccctcttcaaagaaga

SEQ ID NO: 80238 - DNA, 171 bp, Zea Mays
aacgctgccaagttaatgacacacttaaatatctggcttcattggccaagacatgccttcagtctctggacttcacctacgaggttggagttcatctcacaagcatccttcaagatttcaaatctccggtcaagctcactgctcttggaatcctgtgcgatgccttgctga

SEQ ID NO: 80239 - DNA, 1339 bp, Zea Mays
ggacgctgtccaattaaactttcctgcaatttttgatgtgctgcgtcctagtgctgtgcaatattagacgtgcttcaggaaatgttaccttttccagttaacttgtcaagaccgtggctactactcagtggagactgtgtccttattggtggctctaaaagtacgttatagagacagaatcacaatattgagaggaaatcatgagagtagacaaataactcaagtgtatggcttctatgatgaatgcttgcggaaatatggaaatgcaaatgtgtggaagtactttacagacttgtttgattatttgcctctcacagctcttatagaaaatcagatcttctgcctacatggtggtctctctccatcactggatactttggataatgtccgctcccttgatcgcatacaagagatgtggatggggaatttcaccaaggggtgctggatacacatttggccaagatattgcacaacaattcaaccatacaaatgggctaagtcttatttcaagagctcatcaacttgtaatggaagggttcaattggtgccaggataagaacgttgtgacagtgttcagcgcgcctaactattgctaccgatgcgggaacatggctgcgatcctcgaaattggcgagaacatggatcagaacttcctccaattcgacccagctccgcggcagattgagccggacatgacgcgcaagaccccagactactttttgtaatcagcatgctggctttctttcaacttgtctactgcagcgccagcacctgtagatctccttagaaaatggtgtttcctctagccgccttgtacccccatcattcttttggtgtggagattttattgccgcttctcagaacattgaggttgttgaaagtacatggcattgggtcttcctttttttttgccgtcttgtatctccattttgtatgattctgagacaaaagagaagagaagctgcaatagaattgtctcgaaatatattgtcctgtccagaagaacaggtgtggctccaaaaaaaaaagggaaaaaataaaagagagacaacaaggaaagatgcaggaaatggacccgatgttccgttgtgtctgttgtgatgcttcatgcttggctaggggagttctttcagtgctgtttgactccgaattgaaggaaccttggttgttcaacctacatcatcagctcaccgtcgaatgtctgcccagaccgatgaggacaggattctctcaccggctgtcatggagttgagaaggatgctgccatgctgtgatgctggacaccgttccatctttttatcaccctttgccctccggcacggacacttgagacctcaac

SEQ ID NO: 80240 - DNA, 1445 bp, Zea Mays
tctgatacggaagttggctacacaggcttctttctctatcttgattcttgagaattggattctcataacttcactctgcctctatccaaattttagacgagttattgttgatttgagatggaaaaattttctagactactgtagattcagatgtggataactgacaggatatagaattccgaacctgcagctgcagatcacttggtctggttttctaactgtaggacattatagtgcatgtttatcaggcttaaacccttgacaacatttcccacaaggtatggcttctatgatgaatgcttgcggaaatatggaaatgcaaatgtgtggaagtactttacagacttgtttgattatttgcctctcacagctcttatagaaaatcagatcttctgcctacatggtggtctctctccatcactggatactttggataatgtccgctcccttgatcgcatacaagaggtcccgcatgaaggacctatgtgtgatcttttgtggtctgacccggatgacagatgtggatggggaatttcaccaaggggtgctggatacacatttggccaagatattgcacaacaattcaaccatacaaatgggctaagtcttatttcaagagctcatcaacttgtaatggaagggttcaattggtgccaggataagaacgttgtgacagtgttcagcgcgcctaactattgctaccgatgcgggaacatggctgcgatcctcgaaattggcgagaacatggatcagaacttcctccaattcgacccagctccgcggcagattgagccggacatgacgcgcaagaccccagactactttttgtaatcagcatgctggctttctttcaacttgtctactgcagcgccagcacctgtagatctccttagaaaatggtgtttcctctagccgccttgtacccccatcattcttttggtgtggagattttattgccgcttctcagaacattgaggttgttgaaagtacatggcattgggtcttcctttttttttgccgtcttgtatctccattttgtatgattctgagacaaaagagaagagaagctgcaatagaattgtctcgaaatatattgtcctgtccagaagaacaggtgtggctccaaaaaaaaaagggaaaaaataaaagagagacaacaaggaaagatgcaggaaatggacccgatgttccgttgtgtctgttgtgatgcttcatgcttggctaggggagttctttcagtgctgtttgactccgaattgaaggaaccttggttgttcaacctacatcatcagctcaccgtcgaatgtctgcccagaccgatgaggacaggattctctcaccggctgtcatggagttgagaaggatgctgccatgctgtgatgctggacaccgttccatctttttatcaccctttgccctccggcacggacacttgagacctcaac

SEQ ID NO: 80241 - DNA, 1274 bp, Zea Mays
cccttgacaacatttcccacaaggtatggcttctatgatgaatgcttgcggaaatatggaaatgcaaatgtgtggaagtactttacagacttgtttgattatttgcctctcacagctcttatagaaaatcagatcttctgcctacatggtggtctctctccatcactggatactttggataatgtccgctcccttgatcgcatacaagaggtcccgcatgaaggacctatgtgtgatcttttgtggtctgacccggatgacagatgtggatggggaatttcaccaaggggtgctggatacacatttggccaagatattgcacaacaattcaaccatacaaatgggctaagtcttatttcaagagctcatcaacttgtaatggaagggttcaattggtgccagaaacaccaaatgtgccgtgcaaggctgcacaagactctgggcaaccaaacacaggttggctgcattgcactagcctagatacaggataagaacgttgtgacagtgttcagcgcgcctaactattgctaccgatgcgggaacatggctgcgatcctcgaaattggcgagaacatggatcagaacttcctccaattcgacccagctccgcggcagattgagccggacatgacgcgcaagaccccagactactttttgtaatcagcatgctggctttctttcaacttgtctactgcagcgccagcacctgtagatctccttagaaaatggtgtttcctctagccgccttgtacccccatcattcttttggtgtggagattttattgccgcttctcagaacattgaggttgttgaaagtacatggcattgggtcttcctttttttttgccgtcttgtatctccattttgtatgattctgagacaaaagagaagagaagctgcaatagaattgtctcgaaatatattgtcctgtccagaagaacaggtgtggctccaaaaaaaaaagggaaaaaataaaagagagacaacaaggaaagatgcaggaaatggacccgatgttccgttgtgtctgttgtgatgcttcatgcttggctaggggagttctttcagtgctgtttgactccgaattgaaggaaccttggttgttcaacctacatcatcagctcaccgtcgaatgtctgcccagaccgatgaggacaggattctctcaccggctgtcatggagttgagaaggatgctgccatgctgtgatgctggacaccgttccatctttttatcaccctttgccctccggcacggacacttgagacctcaac

SEQ ID NO: 80242 - DNA, 1294 bp, Zea Mays
ccttgacaacatttcccacaaggtatggcttctatgatgaatgcttgcggaaatatggaaatgcaaatgtgtggaagtactttacagacttgtttgattatttgcctctcacagctcttatagaaaatcagatcttctgcctacatggtggtctctctccatcactggatactttggataatgtccgctcccttgatcgcatacaagagactattctgtggacatctttcttgtgaattggggacttggtgttagagatccaatttcttttgagatatctatgttgatcgttgaagtctgcatagacataacaggtcccgcatgaaggacctatgtgtgatcttttgtggtctgacccggatgacagatgtggatggggaatttcaccaaggggtgctggatacacatttggccaagatattgcacaacaattcaaccatacaaatgggctaagtcttatttcaagagctcatcaacttgtaatggaagggttcaattggtgccaggataagaacgttgtgacagtgttcagcgcgcctaactattgctaccgatgcgggaacatggctgcgatcctcgaaattggcgagaacatggatcagaacttcctccaattcgacccagctccgcggcagattgagccggacatgacgcgcaagaccccagactactttttgtaatcagcatgctggctttctttcaacttgtctactgcagcgccagcacctgtagatctccttagaaaatggtgtttcctctagccgccttgtacccccatcattcttttggtgtggagattttattgccgcttctcagaacattgaggttgttgaaagtacatggcattgggtcttcctttttttttgccgtcttgtatctccattttgtatgattctgagacaaaagagaagagaagctgcaatagaattgtctcgaaatatattgtcctgtccagaagaacaggtgtggctccaaaaaaaaaagggaaaaaataaaagagagacaacaaggaaagatgcaggaaatggacccgatgttccgttgtgtctgttgtgatgcttcatgcttggctaggggagttctttcagtgctgtttgactccgaattgaaggaaccttggttgttcaacctacatcatcagctcaccgtcgaatgtctgcccagaccgatgaggacaggattctctcaccggctgtcatggagttgagaaggatgctgccatgctgtgatgctggacaccgttccatctttttatcaccctttgccctccggcacggacacttgagacctcaac

SEQ ID NO: 80243 - DNA, 2362 bp, Zea Mays
atgaatgagagctcagcagcggccagtagttatctcctcctcacattgattattcatctgctgccgttcgtctcagcccatgatttcctgtcagccggttcgtctctctccgtagagcacagctctgatgtgctccactcgcaagatggcactttcacctgcggcttctaccgcatctcccccaacgcctccaccttctccatctggttctccggatcatcggaaagaaccgtcgtctggagcgccaaccctctccaccccgtgtacacctggggatccaaagtcgagctagacgccgacgggagcatggttctaaaggactacaatggccagatcgtgtggaccaacaacgcgagcgtttcggacgctgggcatgttcaagctcggctgctgggcaccgggaacctcgctgtggagggaagaggtggcgccatcctgtggcaaagctttgattctcctactgacaccttgttacctactcagagaatcactgcttccacaaagctggtctctactaacaggttacttgttcctggccactacagcttccgtttcgacgaccagtaccttctttctctgtttgatgacgagaaaaacatttctttcatctactggccaaatccgcgtatgactatctgggcgaagggtagagtgcagttcaacagcaccatgtctggggctcttgacaccttgggacatttccttgcaagtgacaatgcaacctttacagctgctgactggggccctggtatcatgaggcggctaacactggattacgatggcaacctcagattgtacagtcttaatgtggcagacagaacatggtcggtcacatggatggcgtttcctcagctttgcaatgtacacggtctgtgtggcgaaaacggaatttgtgtgtatacgcctgtgcctgcttgtgcgtgtgcccctggttttgaagtcatcgacccaagtgagcggagcaaaggctgcagaccaaagaccaacatcagttgtgatgtggagaaggtggattttgctaagctaccccacactgatttcttggggtatgatatgactgcccatcactccgtttctcttgacttttgcaagaaggagtgcctgcatgattgcaactgcaagggttttgcatactgggaagggattggtgattgctatccgaagtctgttcttgttggcggtgtaaccctgcagaactttgctagtactggtacgatgtacatcaagattcctaatggattacaagtgttggatgcctcaattccgcaatcacaaccttttggtcccaagtatagtcctgactgtggtacaacaaatagatacttcatagcagattttctggataagcttaagagagatcatagtggatcaaagtatctgtacttctatggattcttgtcagcaatatttctggcagaggtagtgtttgttggattaggatggtttattttgaggagggaatacagagaactgagaggagtatggccagctgagcctggatatgaaatgatagccaatcattttcgcaggtatgcctacagagagttggtgacggcgaccagaaagtttaaggacgaacttggaaggggtgcatcaggcattgtatacaaaggcgtcttggaagacaagggggcagtagctgtgaagaaattagcagaaataaaccaaagtgaagaagaattccggcatgaactgagtgtgattagcatgattaaccatatgaatctagtgagagtttggggatactgttccgacggtccacacaggatactggtttctgaatgttttgagaatggttcgttggataaaatcttatttggtagcaagggttcagaaatcttgcttggatggaagcaaaggtttgatattgcgctgggggtggctagaggattggcctatcttcaccacgagtgttcagagtgggtcatccactgcgacgtgaagcctgaaaacatactgctggatgagaacttggtgccaaagattgcagactttggccttgcaaagctcctgaacagaggtcgatcaaacctaaacgtttcaaagatccaaggaactagaggttacttggcgccggaatgggtttctagcctcccgatcacagcaaaggttgatgtctacagctttggagtggtgctactggaactactaataggagcacgtgtctcaaacatgggaaatgatgaggatgtggaagcagagatggtccttggaagggtgtcaaggctggtcaaagaaaagctgcagtcggatgatactgagccgtcttggatcgccgacttcattgactctagactgaacggtgatttcaacaatttgcaggcaagaataatgatgaggctgtccatttcatgcctgaaag

SEQ ID NO: 80244 - DNA, 164 bp, Zea Mays
atcggggcttgccttggtgaggaggagagtcggggctcttctaccaggatattgcagttagcaggaaatccaaatgggacaccctccggaggaccttcagtgacagcttcagttgaagaagtttcagatggaggaacaggctccccttctacttcaacttcaaa

SEQ ID NO: 80245 - DNA, 1359 bp, Zea Mays
ccaaagccaacagcccaccacgtgaccacagacagccagatggctgagagcctgagacgggcgacgcccgcacgcccgcacaagctgctccgggctccgctgctaggctagggtttggactttggattggagccgcaccgccgcaccgccaccgcagccgccgcagtgccgcacagccgccactcccgtcttggtcttgcggccagtcgccctcgggcctcgaccatcagcccctcgcccgctcgccgagacaccgagtcggcatcgaccgtcgtcgcgtctccgaggtccagcgcctagtggcccagctccaagcctccagccatcggcgcccgccctcctccgccgagacgccgagtgccgagcgcccgagcaccccggtccccagcgcccaacaagctagcaggctgcaggtatgcgctctttgttgatgcgtccaaggagttgagctgaatgcccagaaggctagcaggctgcagaaactgaaggaaaaggcggcattcaggaacccggatgagttctattttaaaatgatcaacagtaggactgttggtggaattcatagacctaagcctgaagataataagtatactgaagaggaacttcatctgttgaaaaataaagatatgggatatatcctttagagcgttcaaagtgaaaaagaaaatcgaaaagctaagctcaacacttcatgaacttgataacaagcctcaaaacaagcatgcttattttgctgaagacaggttactgaattggaatgggaaaaaatctataaagtgctaaagactaagtggatcgagcgcgcgcgagggttgtcgtaaaatgtccaccgttattaagagggctaatgaattcccagtcgattgtagctacatgcatggaggagtgcacacacatgcctatgttgtttgaattaatcaaattgcttgtttgttagtaattattaccgcctccaactaggctctgtacgtccacaagatcgtcagctatttcatgcaagcatccgcacaagtgtcctactgctatatgttattgtgttctgatacttgagacttttattatgactatgtatgagatattgtctcttattagtactggatgagatgtgtcttatttatgattatggatgagacttttgtgatgtaattgatgagactatgaatttaaatattgttatgtgattgtgtgtgagatgttttatgtgaaaatatgttgtgttatatatttgttatgttgtgaaatgtggtgtaaaataaaaataaacaatatttttaatgctggtcaaattaacttcctagaggcttattgggctgtaggaagttagccagctaacttcctaggggctacagtaagccgtag

SEQ ID NO: 80246 - DNA, 1663 bp, Zea Mays
aacagcccaccacgtgaccacagacagccagatggctgagagcctgagacgggcgacgcccgcacgcccgcacaagctgctccgggctccgctgctaggctagggtttggactttggattggagccgcaccgccgcaccgccaccgcagccgccgcagtgccgcacagccgccactcccgtcttggtcttgcggccagtcgccctcgggcctcgaccatcagcccctcgcccgctcgccgagacaccgagtcggcatcgaccgtcgtcgcgtctccgaggtccagcgcctagtggcccagctccaagcctccagccatcggcgcccgccctcctccgccgagacgccgagtgccgagcgcccgagcaccccggtccccagcgcccaacaagctagcaggctgcaggtatgcgctctttgttgatgcgtccaaggagttgagctgaatgcccagaaggctagcaggctgcagaaactgaaggaaaaggcggcattcaggaacccggatgagttctattttaaaatgatcaacagtaggactgttggtggaattcatagacctaagcctgaagataataagtatactgaagaggaacttcatctgttgaaaaataaagatatgggatatatcctttagagcgttcaaagtgaaaaagaaaatcgaaaagctaagctcaacacttcatgaacttgataacaagcctcaaaacaagcatgcttattttgctgaagacagagaagaagcgaaagaaatacaatcaaggataggacaaagcagcaacatgactgatcctttgtttttactgtttatggagagtcatttttactgtttattagtctcaacatttatatttgtgtccatttaactaggaccaatatggttggaatgggattatgatattaatatattatgcagttagttagttgactggtatctcatgttgtctaatcctttgtttttccccaggaaaattgcacgcgcggtgttctagtctgtttattttgccttccctttttctgattaattcacggagtttggtggactacggttactgaattggaatgggaaaaaatctataaagtgctaaagactaagtggatcgagcgcgcgcgagggttgtcgtaaaatgtccaccgttattaagagggctaatgaattcccagtcgattgtagctacatgcatggaggagtgcacacacatgcctatgttgtttgaattaatcaaattgcttgtttgttagtaattattaccgcctccaactaggctctgtacgtccacaagatcgtcagctatttcatgcaagcatccgcacaagtgtcctactgctatatgttattgtgttctgatacttgagacttttattatgactatgtatgagatattgtctcttattagtactggatgagatgtgtcttatttatgattatggatgagacttttgtgatgtaattgatgagactatgaatttaaatattgttatgtgattgtgtgtgagatgttttatgtgaaaatatgttgtgttatatatttgttatgttgtgaaatgtggtgtaaaataaaaataaacaatatttttaatgctggtcaaattaacttcctagaggcttattgggctgtaggaagttagccagctaacttcctaggggctacagtaagccgtag

SEQ ID NO: 80247 - DNA, 1352 bp, Zea Mays
aacagcccaccacgtgaccacagacagccagatggctgagagcctgagacgggcgacgcccgcacgcccgcacaagctgctccgggctccgctgctaggctagggtttggactttggattggagccgcaccgccgcaccgccaccgcagccgccgcagtgccgcacagccgccactcccgtcttggtcttgcggccagtcgccctcgggcctcgaccatcagcccctcgcccgctcgccgagacaccgagtcggcatcgaccgtcgtcgcgtctccgaggtccagcgcctagtggcccagctccaagcctccagccatcggcgcccgccctcctccgccgagacgccgagtgccgagcgcccgagcaccccggtccccagcgcccaacaagctagcaggctgcaggtatgcgctctttgttgatgcgtccaaggagttgagctgaatgcccagaaggctagcaggctgcagaaactgaaggaaaaggcggcattcaggaacccggatgagttctattttaaaatgatcaacagtaggactgttggtggaattcatagacctaagcctgaagataataagtatactgaagaggaacttcatctgttgaaaaataaagatatgggatatatcctttagagcgttcaaagtgaaaaaggaaaattgcacgcgcggtgttctagtctgtttattttgccttccctttttctgattaattcacggagtttggtggactacggttactgaattggaatgggaaaaaatctataaagtgctaaagactaagtggatcgagcgcgcgcgagggttgtcgtaaaatgtccaccgttattaagagggctaatgaattcccagtcgattgtagctacatgcatggaggagtgcacacacatgcctatgttgtttgaattaatcaaattgcttgtttgttagtaattattaccgcctccaactaggctctgtacgtccacaagatcgtcagctatttcatgcaagcatccgcacaagtgtcctactgctatatgttattgtgttctgatacttgagacttttattatgactatgtatgagatattgtctcttattagtactggatgagatgtgtcttatttatgattatggatgagacttttgtgatgtaattgatgagactatgaatttaaatattgttatgtgattgtgtgtgagatgttttatgtgaaaatatgttgtgttatatatttgttatgttgtgaaatgtggtgtaaaataaaaataaacaatatttttaatgctggtcaaattaacttcctagaggcttattgggctgtaggaagttagccagctaacttcctaggggctacagtaagccgtag

SEQ ID NO: 80248 - DNA, 2120 bp, Zea Mays
aacagcccaccacgtgaccacagacagccagatggctgagagcctgagacgggcgacgcccgcacgcccgcacaagctgctccgggctccgctgctaggctagggtttggactttggattggagccgcaccgccgcaccgccaccgcagccgccgcagtgccgcacagccgccactcccgtcttggtcttgcggccagtcgccctcgggcctcgaccatcagcccctcgcccgctcgccgagacaccgagtcggcatcgaccgtcgtcgcgtctccgaggtccagcgcctagtggcccagctccaagcctccagccatcggcgcccgccctcctccgccgagacgccgagtgccgagcgcccgagcaccccggtccccagcgcccaacaagctagcaggctgcaggtatgcgctctttgttgatgcgtccaaggagttgagctgaatgcccagaaggctagcaggctgcagaaactgaaggaaaaggcggcattcaggaacccggatgagttctattttaaaatgatcaacagtaggactgttggtggaattcatagacctaagcctgaagataataagtatactgaagaggaacttcatctgttgaaaaataaagatatgggatatatcctttagagcgttcaaagtgaaaaaggaaaattgcacgcgcggtgttctagtctgtttattttgccttccctttttctgattaattcacggagtttggtggactacggttagtcggtttattttctaggtagagggacaattatgcgtgactaataaaaagggtttcattccatggctaaatatatcatttgcatgatgctagttggagctagcatccttgttcaaacaaagcatcgtataacattttggatctacatattaaattgatggctagggcctaggtgcatgcatatgtacttgaacagcagggcttttatgatcttctgatcagcagaatccagcatctgtttttctcaaactgttatgcttttagatcgcgggtacttgttagtatccatgcacagcacacggtgtggctgtgtggtgaacatatctcttttcagatttgcgctcagctcatcgtgtgtggtgtacctaattaagcttccgtttcttttctgtattctttctttccttttttataagggcgctcctgttaaatcggttgaaacagaagtgacatcattggttattagcaaatcctggagaatgcatgcaagttcttctttatttgtatcactatctcttagcacagttctctaactttcgatgcacgtacaagtctatttttataaaaaaaaactgtctatatatgggggcacacaaaattctgtggacgtgtgcatcaatcatcacatgctgttatgcctgatgtcctgtggattggtgttcgatctcgtgaattcgagttgtcctccatttggaactgttatttttgcagctacatatataccaactgacagacatttggaactgtttttttgtgtgtgtttaggttactgaattggaatgggaaaaaatctataaagtgctaaagactaagtggatcgagcgcgcgcgagggttgtcgtaaaatgtccaccgttattaagagggctaatgaattcccagtcgattgtagctacatgcatggaggagtgcacacacatgcctatgttgtttgaattaatcaaattgcttgtttgttagtaattattaccgcctccaactaggctctgtacgtccacaagatcgtcagctatttcatgcaagcatccgcacaagtgtcctactgctatatgttattgtgttctgatacttgagacttttattatgactatgtatgagatattgtctcttattagtactggatgagatgtgtcttatttatgattatggatgagacttttgtgatgtaattgatgagactatgaatttaaatattgttatgtgattgtgtgtgagatgttttatgtgaaaatatgttgtgttatatatttgttatgttgtgaaatgtggtgtaaaataaaaataaacaatatttttaatgctggtcaaattaacttcctagaggcttattgggctgtaggaagttagccagctaacttcctaggggctacagtaagccgtag

SEQ ID NO: 80249 - DNA, 1623 bp, Zea Mays
tttgctttggaataccaaatgtgcgatacgtcatgtcctgcttgctggccgttgtctcattgtctggccgccggaccaaatccgaaaacccaccgagtaactgacaatctcgatccccgcagtcatcgcgggatcggcccgtcctcgccggcgactcattcccgcaactcacctgctctcaaccgcgaactcggcgccctgcacggcctccaagtcgcacgatgcggcggcgcccacatcatacgtggctgcgtctccgcctccgctttcgccgcgccgacgtgtcagcttcccgtccactacagagtccacattgtcctcctattacttgctccgccggcaactattagcccctccccagtcgccactaaatccgctgccgtttcttctcgagtgtgaccatggcggctcagggatccctcgtcatgtggagggcggtcttcgcagcgctgggcttgctcatggtggccacgctggtgtacaccttggccaccgacggctcgccgttccgccttgagctgtttacgccgtggatggtggcaacactggctgatttttatgttaatgttattgcaatctcggcttgggttatctacaaggaagcaaactgggttagttctgctgtgtgggtggttctgttgttttgctttggcagtgctgtcacttgcgcttatattgttaagaaacttcttgaagtaacatctgcagggtcatcccaagatcctcttgaccttctatttatcaggcaaggtaatctatcccaaagaaagtgctcttatgttgtaattggaagggttattttcagcattttggggatattcatggctgcggttgtcacatatactgtcatcactgatggactaccttttaggaaggaattgttgacaccgtggatggcggcaaccttaattgatttctacataaatgtctttgcgatatcggtctgggttgctcacaaggaatcatcatggatatcaactaccatttggattgtcttgctgatatgctttggaagcatcacaacatgcggctacattgtcatccaacttttcaaagtatcatatcaagatccaatctaccacgtgctattgaactcccacagcaaaagatcgagtgatggtttaattttgaatgacggactagaagtcagcagctcagtctcagcattcagttgggcagattagctcagggccaagccctttgagaatggaccgaggccaagcctctttcagttgggcagatttagcaatgatcagatcagcaacaggaggatcaggaggtgagagccccctccagggggcaggaaaggaaacaaaaggttgttctgcctcgaacaaaaattcaagaaaccaaagatctctagagaaactcgtatggcactacaagcagtaatacgaacaccgagaacatgaggggtacatatgtattttcagtgaagaggagccacagtttactctgcagcagccccaaatccagtctaccctctaacagtctggttgtatgcactctcaccagcttgaggtgactaggtaaggagggatgtttggcaacaatgtttttcaaaattatagttttacaatactttgtcaacaatctcatagttttagcccgctccaaaaatat

SEQ ID NO: 80250 - DNA, 1829 bp, Zea Mays
tttgctttggaataccaaatgtgcgatacgtcatgtcctgcttgctggccgttgtctcattgtctggccgccggaccaaatccgaaaacccaccgagtaactgacaatctcgatccccgcagtcatcgcgggatcggcccgtcctcgccggcgactcattcccgcaactcacctgctctcaaccgcgaactcggcgccctgcacggcctccaagtcgcacgatgcggcggcgcccacatcatacgtggctgcgtctccgcctccgctttcgccgcgccgacgtgtcagcttcccgtccactacagagtccacattgtcctcctattacttgctccgccggcaactattagcccctccccagtcgccactaaatccgctgccgtttcttctcgagtgtgaccatggcggctcagggatccctcgtcatgtggagggcggtcttcgcagcgctgggcttgctcatggtggccacgctggtgtacaccttggccaccgacggctcgccgttccgccttgagctgtttacgccgtggatggtggcaacactggctgatttttatgttaatgttattgcaatctcggcttgggttatctacaaggaagcaaactgggttagttctgctgtgtgggtggttctgttgttttgctttggcagtgctgtcacttgcgcttatattgttaagaaacttcttgaagtaacatctgcagggtcatcccaagatcctcttgaccttctatttatcaggcaaggtaatctatcccaaagaaagtgctcttatgttgtaattggaagggttattttcagcattttggggatattcatggctgcggttgtcacatatactgtcatcactgatggactaccttttaggaaggaattgttgacaccgtctgggttgctcacaaggaatcatcatggatatcaactaccatttggattgtcttgctgatatgctttggaagcatcacaacatgcggctacattgtcatccaacttttcaaagtatcatatcaagatccaatctaccacgtgctattgaactcccacagcaaaagatttgaaaatttattgaagttttatgtgcagcttggctggtaatattaaaatgttccttctatctatatgtaaggtaccacaattaaggggacaggaggatagcaattagacaagttgttttactttgaataaaataactcatgtgctgagttatctgctaaatgaactgtaacgtgaaatcctttattgtatttctgattgaaattgcttgaacaataatctcctttgttatggtttcattgcaaacaatttagaagatcgagtgatggtttaattttgaatgacggactagaagtcagcagctcagtctcagcattcagttgggcagattagctcagggccaagccctttgagaatggaccgaggccaagcctctttcagttgggcagatttagcaatgatcagatcagcaacaggaggatcaggaggtgagagccccctccagggggcaggaaaggaaacaaaaggttgttctgcctcgaacaaaaattcaagaaaccaaagatctctagagaaactcgtatggcactacaagcagtaatacgaacaccgagaacatgaggggtacatatgtattttcagtgaagaggagccacagtttactctgcagcagccccaaatccagtctaccctctaacagtctggttgtatgcactctcaccagcttgaggtgactaggtaaggagggatgtttggcaacaatgtttttcaaaattatagttttacaatactttgtcaacaatctcatagttttagcccgctccaaaaatat

SEQ ID NO: 80251 - DNA, 1620 bp, Zea Mays
tttgctttggaataccaaatgtgcgatacgtcatgtcctgcttgctggccgttgtctcattgtctggccgccggaccaaatccgaaaacccaccgagtaactgacaatctcgatccccgcagtcatcgcgggatcggcccgtcctcgccggcgactcattcccgcaactcacctgctctcaaccgcgaactcggcgccctgcacggcctccaagtcgcacgatgcggcggcgcccacatcatacgtggctgcgtctccgcctccgctttcgccgcgccgacgtgtcagcttcccgtccactacagagtccacattgtcctcctattacttgctccgccggcaactattagcccctccccagtcgccactaaatccgctgccgtttcttctcgagtgtgaccatggcggctcagggatccctcgtcatgtggagggcggtcttcgcagcgctgggcttgctcatggtggccacgctggtgtacaccttggccaccgacggctcgccgttccgccttgagctgtttacgccgtggatggtggcaacactggctgatttttatgttaatgttattgcaatctcggcttgggttatctacaaggaagcaaactgggttagttctgctgtgtgggtggttctgttgttttgctttggcagtgctgtcacttgcgcttatattgttaagaaacttcttgaagtaacatctgcagggtcatcccaagatcctcttgaccttctatttatcaggcaaggtaatctatcccaaagaaagtgctcttatgttgtaattggaagggttattttcagcattttggggatattcatggctgcggttgtcacatatactgtcatcactgatggactaccttttaggaaggaattgttgacaccgtggatggcggcaaccttaattgatttctacataaatgtctttgcgatatcggtctgggttgctcacaaggaatcatcatggatatcaactaccatttggattgtcttgctgatatgctttggaagcatcacaacatgcggctacattgtcatccaacttttcaaagtatcatatcaagatccaatctaccacgtgctattgaactcccacagcaaatcgagtgatggtttaattttgaatgacggactagaagtcagcagctcagtctcagcattcagttgggcagattagctcagggccaagccctttgagaatggaccgaggccaagcctctttcagttgggcagatttagcaatgatcagatcagcaacaggaggatcaggaggtgagagccccctccagggggcaggaaaggaaacaaaaggttgttctgcctcgaacaaaaattcaagaaaccaaagatctctagagaaactcgtatggcactacaagcagtaatacgaacaccgagaacatgaggggtacatatgtattttcagtgaagaggagccacagtttactctgcagcagccccaaatccagtctaccctctaacagtctggttgtatgcactctcaccagcttgaggtgactaggtaaggagggatgtttggcaacaatgtttttcaaaattatagttttacaatactttgtcaacaatctcatagttttagcccgctccaaaaatat

SEQ ID NO: 80252 - DNA, 1894 bp, Zea Mays
tttgctttggaataccaaatgtgcgatacgtcatgtcctgcttgctggccgttgtctcattgtctggccgccggaccaaatccgaaaacccaccgagtaactgacaatctcgatccccgcagtcatcgcgggatcggcccgtcctcgccggcgactcattcccgcaactcacctgctctcaaccgcgaactcggcgccctgcacggcctccaagtcgcacgatgcggcggcgcccacatcatacgtggctgcgtctccgcctccgctttcgccgcgccgacgtgtcagcttcccgtccactacagagtccacattgtcctcctattacttgctccgccggcaactattagcccctccccagtcgccactaaatccgctgccgtttcttctcgagtgtgaccatggcggctcagggatccctcgtcatgtggagggcggtcttcgcagcgctgggcttgctcatggtggccacgctggtgtacaccttggccaccgacggctcgccgttccgccttgagctgtttacgccgtggatggtggcaacactggctgatttttatgttaatgttattgcaatctcggcttgggttatctacaaggaagcaaactgggttagttctgctgtgtgggtggttctgttgttttgctttggcagtgctgtcacttgcgcttatattgttaagaaacttcttgaagtaacatctgcagggtcatcccaagatcctcttgaccttctatttatcaggcaaggtaatctatcccaaagaaagtgctcttatgttgtaattggaagggttattttcagcattttggggatattcatggctgcggttgtcacatatactgtcatcactgatggactaccttttaggaaggaattgttgacaccgtggatggcggcaaccttaattgatttctacataaatgtctttgcgatatcggtctgggttgctcacaaggaatcatcatggatatcaactaccatttggattgtcttgctgatatgctttggaagcatcacaacatgcggctacattgtcatccaacttttcaaagtatcatatcaagatccaatctaccacgtgctattgaactcccacagcaagtatggaattccaacttcactgtgataattcatcttctatgatcctgcttggctggtaatattaaaatgttccttctatctatatgtaaggtaccacaattaaggggacaggaggatagcaattagacaagttgttttactttgaataaaataactcatgtgctgagttatctgctaaatgaactgtaacgtgaaatcctttattgtatttctgattgaaattgcttgaacaataatctcctttgttatggtttcattgcaaacaatttagaagatcgagtgatggtttaattttgaatgacggactagaagtcagcagctcagtctcagcattcagttgggcagattagctcagggccaagccctttgagaatggaccgaggccaagcctctttcagttgggcagatttagcaatgatcagatcagcaacaggaggatcaggaggtgagagccccctccagggggcaggaaaggaaacaaaaggttgttctgcctcgaacaaaaattcaagaaaccaaagatctctagagaaactcgtatggcactacaagcagtaatacgaacaccgagaacatgaggggtacatatgtattttcagtgaagaggagccacagtttactctgcagcagccccaaatccagtctaccctctaacagtctggttgtatgcactctcaccagcttgaggtgactaggtaaggagggatgtttggcaacaatgtttttcaaaattatagttttacaatactttgtcaacaatctcatagttttagcccgctccaaaaatat

SEQ ID NO: 80253 - DNA, 1670 bp, Zea Mays
tttgctttggaataccaaatgtgcgatacgtcatgtcctgcttgctggccgttgtctcattgtctggccgccggaccaaatccgaaaacccaccgagtaactgacaatctcgatccccgcagtcatcgcgggatcggcccgtcctcgccggcgactcattcccgcaactcacctgctctcaaccgcgaactcggcgccctgcacggcctccaagtcgcacgatgcggcggcgcccacatcatacgtggctgcgtctccgcctccgctttcgccgcgccgacgtgtcagcttcccgtccactacagagtccacattgtcctcctattacttgctccgccggcaactattagcccctccccagtcgccactaaatccgctgccgtttcttctcgagtgtgaccatggcggctcagggatccctcgtcatgtggagggcggtcttcgcagcgctgggcttgctcatggtggccacgctggtgtacaccttggccaccgacggctcgccgttccgccttgagctgtttacgccgtggatggtggcaacactggctgatttttatgttaatgttattgcaatctcggcttgggttatctacaaggaagcaaactgggttagttctgctgtgtgggtggttctgttgttttgctttggcagtgctgtcacttgcgcttatattgttaagaaacttcttgaagtaacatctgcagggtcatcccaagatcctcttgaccttctatttatcaggcaaggtaatctatcccaaagaaagtgctcttatgttgtaattggaagggttattttcagcattttggggatattcatggctgcggttgtcacatatactgtcatcactgatggactaccttttaggaaggaattgttgacaccgtggatggcggcaaccttaattgatttctacataaatgtctttgcgatatcggtctgggttgctcacaaggaatcatcatggatatcaactaccatttggattgtcttgctgatatgctttggaagcatcacaacatgcggctacattgtcatccaacttttcaaagtatcatatcaagatccaatctaccacgtgctattgaactcccacagcaagtatggaattccaacttcactgtgataattcatcttctatgatcctgaagatcgagtgatggtttaattttgaatgacggactagaagtcagcagctcagtctcagcattcagttgggcagattagctcagggccaagccctttgagaatggaccgaggccaagcctctttcagttgggcagatttagcaatgatcagatcagcaacaggaggatcaggaggtgagagccccctccagggggcaggaaaggaaacaaaaggttgttctgcctcgaacaaaaattcaagaaaccaaagatctctagagaaactcgtatggcactacaagcagtaatacgaacaccgagaacatgaggggtacatatgtattttcagtgaagaggagccacagtttactctgcagcagccccaaatccagtctaccctctaacagtctggttgtatgcactctcaccagcttgaggtgactaggtaaggagggatgtttggcaacaatgtttttcaaaattatagttttacaatactttgtcaacaatctcatagttttagcccgctccaaaaatat

SEQ ID NO: 80254 - DNA, 1878 bp, Zea Mays
tttgctttggaataccaaatgtgcgatacgtcatgtcctgcttgctggccgttgtctcattgtctggccgccggaccaaatccgaaaacccaccgagtaactgacaatctcgatccccgcagtcatcgcgggatcggcccgtcctcgccggcgactcattcccgcaactcacctgctctcaaccgcgaactcggcgccctgcacggcctccaagtcgcacgatgcggcggcgcccacatcatacgtggctgcgtctccgcctccgctttcgccgcgccgacgtgtcagcttcccgtccactacagagtccacattgtcctcctattacttgctccgccggcaactattagcccctccccagtcgccactaaatccgctgccgtttcttctcgagtgtgaccatggcggctcagggatccctcgtcatgtggagggcggtcttcgcagcgctgggcttgctcatggtggccacgctggtgtacaccttggccaccgacggctcgccgttccgccttgagctgtttacgccgtggatggtggcaacactggctgatttttatgttaatgttattgcaatctcggcttgggttatctacaaggaagcaaactgggttagttctgctgtgtgggtggttctgttgttttgctttggcagtgctgtcacttgcgcttatattgttaagaaacttcttgaagtaacatctgcagggtcatcccaagatcctcttgaccttctatttatcaggcaaggtaatctatcccaaagaaagtgctcttatgttgtaattggaagggttattttcagcattttggggatattcatggctgcggttgtcacatatactgtcatcactgatggactaccttttaggaaggaattgttgacaccgtggatggcggcaaccttaattgatttctacataaatgtctttgcgatatcggtctgggttgctcacaaggaatcatcatggatatcaactaccatttggattgtcttgctgatatgctttggaagcatcacaacatgcggctacattgtcatccaacttttcaaagtatcatatcaagatccaatctaccacgtgctattgaactcccacagcaaatttgaaaatttattgaagttttatgtgcagcttggctggtaatattaaaatgttccttctatctatatgtaaggtaccacaattaaggggacaggaggatagcaattagacaagttgttttactttgaataaaataactcatgtgctgagttatctgctaaatgaactgtaacgtgaaatcctttattgtatttctgattgaaattgcttgaacaataatctcctttgttatggtttcattgcaaacaatttagaagatcgagtgatggtttaattttgaatgacggactagaagtcagcagctcagtctcagcattcagttgggcagattagctcagggccaagccctttgagaatggaccgaggccaagcctctttcagttgggcagatttagcaatgatcagatcagcaacaggaggatcaggaggtgagagccccctccagggggcaggaaaggaaacaaaaggttgttctgcctcgaacaaaaattcaagaaaccaaagatctctagagaaactcgtatggcactacaagcagtaatacgaacaccgagaacatgaggggtacatatgtattttcagtgaagaggagccacagtttactctgcagcagccccaaatccagtctaccctctaacagtctggttgtatgcactctcaccagcttgaggtgactaggtaaggagggatgtttggcaacaatgtttttcaaaattatagttttacaatactttgtcaacaatctcatagttttagcccgctccaaaaatat

SEQ ID NO: 80255 - DNA, 1666 bp, Zea Mays
tttgctttggaataccaaatgtgcgatacgtcatgtcctgcttgctggccgttgtctcattgtctggccgccggaccaaatccgaaaacccaccgagtaactgacaatctcgatccccgcagtcatcgcgggatcggcccgtcctcgccggcgactcattcccgcaactcacctgctctcaaccgcgaactcggcgccctgcacggcctccaagtcgcacgatgcggcggcgcccacatcatacgtggctgcgtctccgcctccgctttcgccgcgccgacgtgtcagcttcccgtccactacagagtccacattgtcctcctattacttgctccgccggcaactattagcccctccccagtcgccactaaatccgctgccgtttcttctcgagtgtgaccatggcggctcagggatccctcgtcatgtggagggcggtcttcgcagcgctgggcttgctcatggtggccacgctggtgtacaccttggccaccgacggctcgccgttccgccttgagctgtttacgccgtggatggtggcaacactggctgatttttatgttaatgttattgcaatctcggcttgggttatctacaaggaagcaaactgggttagttctgctgtgtgggtggttctgttgttttgctttggcagtgctgtcacttgcgcttatattgttaagaaacttcttgaagtaacatctgcagggtcatcccaagatcctcttgaccttctatttatcaggcaaggtaatctatcccaaagaaagtgctcttatgttgtaattggaagggttattttcagcattttggggatattcatggctgcggttgtcacatatactgtcatcactgatggactaccttttaggaaggaattgttgacaccgtggatggcggcaaccttaattgatttctacataaatgtctttgcgatatcggtctgggttgctcacaaggaatcatcatggatatcaactaccatttggattgtcttgctgatatgctttggaagcatcacaacatgcggctacattgtcatccaacttttcaaagtatcatatcaagatccaatctaccacgtgctattgaactcccacagcaacttggctggtaatattaaaatgttccttctatctatatgtaagaagatcgagtgatggtttaattttgaatgacggactagaagtcagcagctcagtctcagcattcagttgggcagattagctcagggccaagccctttgagaatggaccgaggccaagcctctttcagttgggcagatttagcaatgatcagatcagcaacaggaggatcaggaggtgagagccccctccagggggcaggaaaggaaacaaaaggttgttctgcctcgaacaaaaattcaagaaaccaaagatctctagagaaactcgtatggcactacaagcagtaatacgaacaccgagaacatgaggggtacatatgtattttcagtgaagaggagccacagtttactctgcagcagccccaaatccagtctaccctctaacagtctggttgtatgcactctcaccagcttgaggtgactaggtaaggagggatgtttggcaacaatgtttttcaaaattatagttttacaatactttgtcaacaatctcatagttttagcccgctccaaaaatat

SEQ ID NO: 80256 - DNA, 1804 bp, Zea Mays
tttgctttggaataccaaatgtgcgatacgtcatgtcctgcttgctggccgttgtctcattgtctggccgccggaccaaatccgaaaacccaccgagtaactgacaatctcgatccccgcagtcatcgcgggatcggcccgtcctcgccggcgactcattcccgcaactcacctgctctcaaccgcgaactcggcgccctgcacggcctccaagtcgcacgatgcggcggcgcccacatcatacgtggctgcgtctccgcctccgctttcgccgcgccgacgtgtcagcttcccgtccactacagagtccacattgtcctcctattacttgctccgccggcaactattagcccctccccagtcgccactaaatccgctgccgtttcttctcgagtgtgaccatggcggctcagggatccctcgtcatgtggagggcggtcttcgcagcgctgggcttgctcatggtggccacgctggtgtacaccttggccaccgacggctcgccgttccgccttgagctgtttacgccgtggatggtggcaacactggctgatttttatgttaatgttattgcaatctcggcttgggttatctacaaggaagcaaactgggttagttctgctgtgtgggtggttctgttgttttgctttggcagtgctgtcacttgcgcttatattgttaagaaacttcttgaagtaacatctgcagggtcatcccaagatcctcttgaccttctatttatcaggcaaggtaatctatcccaaagaaagtgctcttatgttgtaattggaagggttattttcagcattttggggatattcatggctgcggttgtcacatatactgtcatcactgatggactaccttttaggaaggaattgttgacaccgtggatggcggcaaccttaattgatttctacataaatgtctttgcgatatcggtctgggttgctcacaaggaatcatcatggatatcaactaccatttggattgtcttgctgatatgctttggaagcatcacaacatgcggctacattgtcatccaacttttcaaagtatcatatcaagatccaatctaccacgtgctattgaactcccacagcaagtaccacaattaaggggacaggaggatagcaattagacaagttgttttactttgaataaaataactcatgtgctgagttatctgctaaatgaactgtaacgtgaaatcctttattgtatttctgattgaaattgcttgaacaataatctcctttgttatggtttcattgcaaacaatttagaagatcgagtgatggtttaattttgaatgacggactagaagtcagcagctcagtctcagcattcagttgggcagattagctcagggccaagccctttgagaatggaccgaggccaagcctctttcagttgggcagatttagcaatgatcagatcagcaacaggaggatcaggaggtgagagccccctccagggggcaggaaaggaaacaaaaggttgttctgcctcgaacaaaaattcaagaaaccaaagatctctagagaaactcgtatggcactacaagcagtaatacgaacaccgagaacatgaggggtacatatgtattttcagtgaagaggagccacagtttactctgcagcagccccaaatccagtctaccctctaacagtctggttgtatgcactctcaccagcttgaggtgactaggtaaggagggatgtttggcaacaatgtttttcaaaattatagttttacaatactttgtcaacaatctcatagttttagcccgctccaaaaatat

SEQ ID NO: 80257 - DNA, 1455 bp, Zea Mays
actctctcaaattaaacaacaacattaggcttgggttatctacaaggaagcaaactgggttagttctgctgtgtgggtggttctgttgttttgctttggcagtgctgtcacttgcgcttatattgttaagaaacttcttgaagtaacatctgcagggtcatcccaagatcctcttgaccttctatttatcaggcaaggtaatctatcccaaagaaagtgctcttatgttgtaattggaagggttattttcagcattttggggatattcatggctgcggttgtcacatatactgtcatcactgatggactaccttttaggaaggaattgttgacaccgtggatggcggcaaccttaattgatttctacataaatgtctttgcgatatcggtctgggttgctcacaaggaatcatcatggatatcaactaccatttggattgtcttgctgatatgctttggaagcatcacaacatgcggctacattgtcatccaacttttcaaagtatcatatcaagatccaatctaccacgtgctattgaactcccacagcaagtatggaattccaacttcactgtgataattcatcttctatgatcctggttagcttacagttgtctaaacttcagcttgtcatctggtcattgatttccattcataattcacttgtttgaaatgtaggaagatttgaaaatttattgaagttttatgtgcagcttggctggtaatattaaaatgttccttctatctatatgtaaggtaccacaattaaggggacaggaggatagcaattagacaagttgttttactttgaataaaataactcatgtgctgagttatctgctaaatgaactgtaacgtgaaatcctttattgtatttctgattgaaattgcttgaacaataatctcctttgttatggtttcattgcaaacaatttagaagatcgagtgatggtttaattttgaatgacggactagaagtcagcagctcagtctcagcattcagttgggcagattagctcagggccaagccctttgagaatggaccgaggccaagcctctttcagttgggcagatttagcaatgatcagatcagcaacaggaggatcaggaggtgagagccccctccagggggcaggaaaggaaacaaaaggttgttctgcctcgaacaaaaattcaagaaaccaaagatctctagagaaactcgtatggcactacaagcagtaatacgaacaccgagaacatgaggggtacatatgtattttcagtgaagaggagccacagtttactctgcagcagccccaaatccagtctaccctctaacagtctggttgtatgcactctcaccagcttgaggtgactaggtaaggagggatgtttggcaacaatgtttttcaaaattatagttttacaatactttgtcaacaatctcatagttttagcccgctccaaaaatat

SEQ ID NO: 80258 - DNA, 2772 bp, Zea Mays
cgaaaatttcacaagcgtggcccacctgaagcaggccaattcctagctgccgcctattcttttactgagccaaaccctagatagttattttcttcttccaattccaaatcgtcgccctgccgccgccccgttcagcgtcagcacgaacgcaagctgcgacgatcctccttcccaattcaagccgccgccttgactgtttagctagcgtcgtgcgtgcattcatcccttgcctctcagctctcatgtgtgcatcctctgtcccaaatccatcgtgaatcatctctccccaagttgttgtggtcaagccgcactcctcctcaattccaaatcatcgcactgctacatcgcactccccaagttgttgtggtcaagccggcctcctcctcaattccaaatcaacgtaagctgctccaaggaatttttgaagagaagagacatcgcctgattctccaaagacaaggcagaggcagcaaagtagtgcgcagcatttgaatctacatttgatctagtgctaccacaacctcttatttgaatagaaggctaaaggtgaaagaacccgcacagactcttgtgtgacggaaatatggcaagcggaagaagggataaggatgcctcccttaacgagtatgaggaacaacgactcgcaaccatcgcagaaaacaaaaggcgattggaagctcttaatatccctactttgagcaatatgaaacaacatggtagaactacaaaaagaactaagaggattcataacactagtgatgtagcaactgaaggtcacaatctgcgtgcaaggccacaaaagaattgtgttgaaaatggaaatgaacaaattaatgaagaccttggttgtgaatcaatgggagatttcttatgtgataacgaagattcacgcaacaacgcagaaaagaagaggaaaggaaggggtatcactagattagatgaaatatttgcaaggaagcccagcatgcctaaaatcaaagtagaactcaataaatatggtcagcctattggggacaattgtagaaggttttctagtgctcttggctgccatgtgagaaggaaattatcagttggttgttctgactggagacttgtggatcctcaaaagaagtatgaggtgtgggaagatatgaagaaaatttatgatatcgatgatgctgccttcggttggtttatggatagcgccagaaggaaatggaaggattttaagtcaacattaaagcatcaattttttgatgaaaacatatcagatgcagacctaaaggaaagacataaaggcagagttaatgatgatgattggaagtttctcacagaatattggaggtcatctgaatctgaagctaataaactaaggcgttctccaagaagagatgaggtctatatcaagacacatacaagaaaaaatggagttccatcaagacatgcagaaccaattattaataaattgaaagccatagttgaagcccatccagagttgaagcaaagaacaattcaagagggcgatgcatttgctgttgcttgtggagaaaaggagccaagaggacgtgttcgtgctttgggtttaggaccaactccccaagatgttggtacaccagggttgaagtgttacacacccacaagactgcagatggaaggtttggcccgtaaaaaggctgaatgtgagaaagtagctcttcaacaacgcataactgaattggaggagcaaatgaaagaggaaaggatggcaagggaattgcaagatgtggaactcatttcacataatggttcaaattcacgacagaatgggagccgaaggtatgaagagcatgatgtggaagcgcatcatgacgctcaatttgtagaagatgaagattgtgcagaaaatcacatcaatcatcactgtgatgatggtgagcaacaccatcaaaacgatcctgttggtgcagccccgatagtgcaacaccatcaaagcagtcctgttggtgcagccccaacagtgcaatgccttcaaaacaatcatgttagggcagccccaacaattcaacgccatcaaaatagtcctataggtgcagtcccaccaaagcagcctcgacggtgcatcactacgagtttagcccacccagtcccaccaaggaatgaggccccctctcgcattcaacatgatgaacttgttggaaaggatgtaatattatatgccattattggacctgagcaacctgtggctaagggaacaattatttcaactaatcctaacactttgctgggaggtgtgcctcttgggaaagaatattgtgaagttattgtgaacattgtattgaaaagggatgccattttgccttgcccttatggttatgtagagacgatggctgatgctcatcaaatgtcagttgcttggctttataagaggatgaagattagcaaggcatcaggatcaccccaaggtattggaggtggatggcactcgaggcaagctgcagttggacaaacaagagactgacatagcattttgtagacaatgagtcctgatttgtagctaaacatgtcatggcatgccatgctatatgtaggattttttgtttgagactcagagatgaatcattttgtagattgagtcctgattttggttagctaaacatgtaacagctgctatcatgaatcctattttgttgtagctaaacttataatggctgctatcatgaattctatttttttgttgtagctaaacatgtattggctgctataatataacggttgttatgttgatatattcaaagaaaactatgttaatctgcc

SEQ ID NO: 80259 - DNA, 554 bp, Zea Mays
ctattcttttactgagccaaaccctagatagttattttcttcttccaattccaaatcgtcgccctgccgccgccccgttcagcgtcagcacgaacgcaagctgcgacgatcctccttcccaattcaagccgccgccttgactgtttagctagcgtcgtgcgtgcattcatcccttgcctctcagctctcatgtgtgcatcctctgtcccaaatccatcgtgaatcatctctccccaagttgttgtggtcaagccgcactcctcctcaattccaaatcatcgcactgctacatcgcactccccaagttgttgtggtcaagccggcctcctcctcaattccaaatcaacgtaagctgctccaaggaatttttgaagagaagagacatcgcctgattctccaaagacaaggcagaggcagcaaagtagtgcgcagcatttgaatctacatttgatctagtgctaccacaacctcttatttgaatagaaggctaaaggtgaaagaacccgcacagactcttgtgtgacgctatctggtcccctatacaaaggttgatg

SEQ ID NO: 80260 - DNA, 2743 bp, Zea Mays
attattgggtgttgtgatgagctagcggccattgaaaaattggtaggagaaaacagaaaagagttgtatcctaattgcaagaaatatacacagctgcgtttcctagttagattgcttcacatcaaactccttggaggatggactgatagatctatgaacctgctactagatctacttaatgatgcactccccgagggttcaacattacctaagagcttttatgaagctaagaaattggtgaaatctgtaggaattggatacaatagtattcattcatgtgaaaatgattgtattctttattcgaaggataatgcaaaattgaattcatgtccaaaatgtaaggtttcacgttggaaatcaacaaggaagagtctagatgggaaacatatatacaaggttcctagaaaggttctccgctatattccaataacaagaatgctccaaaggccattcatgacccctaaagtagcaggtctagcaagatggcatgatgaacaccggataaaagatggtttgctaaggcatcctgcagattcacctttatggcgagactttgatagaaaacatccagagtttgcagcagatagccgaaatattcgtctagcatttgcaactgatggctttaatccatttaggagcatgaatgttagctatagtgtttggcctggcatttgtattccatataatttccccccttcaatgtgcatgaagcaatcaaatttcatcctttctttgctgattcctggctgaaatagtcctgatagtgacatggatgtctattaccagccacttgtagatgatttattagatatgtttgttaatggagttagaacctatgatgcttcaaagggtgagttttttcagctgcgagctgcagtaatatggactattacagatttccctggcttaggatatgcatctggatctgttacatcaggtgaagcagcatgtcctgattgccattactacacgagttcacttagacttggaaatggtagcaagacttgctatatggaccatcgcagatttttggatgaaaaccacccatttagatttgatgttaacaaatttggttgtactgagtttagggcagcacctactccactatcgggagaggaaatattggagtgcactaaacatcttaatccaatttttggcaaggacccatctgggaagaaaccaacaagcaagagacgcaagaaaggggaaccattagtcattttcaaaaggagatctatttggttcatgctaccatattggaaagatttaatgttgcgacataattttgacttcatgcacataggaaagaatgtgagcgaaagcttagttaatatattcatgggcaccgatgggaaatcaaaggataacttgaattctcggttcgaccttcaagctttaggtattagaagtgatcttcatcctattaaagttgaagaccaattttatttaccacctgcaccttactcaatgagtcctgatgagaggaaattattttgtcaagtacttaaaggtgtgaagtttcctgagggttatgcatctgatatacgtcataatgtacatgttaatgagagaaagataattgggcttaagagtcatgagagccatattattctacaacacttgttgccgcttgcattgaggaaaatattaccggaaatagttagtgctggagtgattcgtataagtaattttttcaagaaactttcatcacctgtcattcaaataagcgatatggaaaagcttgaggctaatatagctgaaaccctgagctttcttgagaccgttttcgtgccttcattttttgatatcatgatacacttgatggtacatcttcctacccaagcaaggatagctggtcccgtccattttcgtagcatgtggcccatagagaggtatctaatgagattgaagggttctgttcatacaaagagtcactgtgagggatcaattatggaatggtctatgtttactgagtgtcttacattttgtgctcgctatttacatggtgagactcaattgaaccatcaagttagatatgagtatgacgaagtatgtactacaactcctttcttccataccattggccaaggattggctgggaagtgtttagttaatttagaccataaaacatggctacaagctcatagatatgttttgttcaactacgacaatataaccccttacttggacaagcatgctcactatttgtcctcaattggtcatcgaaataaaagagatatcaaccgcttacagcatgaatcctttcatgagtggtttaggttgcatgtaagtgtagaggaaatgcatggggaagcacaagatgagattaaaattttagctaaatcaccaatgacggttgcaaataagtatagtagctataacatgaacgggttcaactttcacacatcatcatatgatgagggtagacctattcaaaatagtggggttgttgtggttgcggagtcaacaatctttgacaagggcagcaatgataacattataataggaaagaaaacttattttggtattatcaaggaaattattgaactaaactatcaccataaaggaaatgtggtcctcttcaaatgtgattgggttgacaaccgtgtgcaagacaaatgggtcaaaattgatcggttaggcatcacaactgtgaactttaagcatttattcaatacaggtgacaaattatctgacgagcctttcattttagcatcacaagcagttcaagtgtactatgttc

SEQ ID NO: 80261 - DNA, 2260 bp, Zea Mays
cccactactagaagagatatagatggttactttgttgatccaaaaaaatctaaaaaaatctacaaagaaatatggcaagcggaagaagggataaggatgcctcccttaacgagtatgaggaacaacgactcgcaaccatcgcagaaaacaaaaggcgattggaagctcttaatatccctactttgagcaatatgaaacaacatggtagaactacaaaaagaactaagaggattcataacactagtgatgtagcaactgaaggtcacaatctgcgtgcaaggccacaaaagaattgtgttgaaaatggaaatgaacaaattaatgaagaccttggttgtgaatcaatgggagatttcttatgtgataacgaagattcacgcaacaacgcagaaaagaagaggaaaggaaggggtatcactagattagatgaaatatttgcaaggaagcccagcatgcctaaaatcaaagtagaactcaataaatatggtcagcctattggggacaattgtagaaggttttctagtgctcttggctgccatgtgagaaggaaattatcagttggttgttctgactggagacttgtggatcctcaaaagaagtatgaggtgtgggaagatatgaagaaaatttatgatatcgatgatgctgccttcggttggtttatggatagcgccagaaggaaatggaaggattttaagtcaacattaaagcatcaattttttgatgaaaacatatcagatgcagacctaaaggaaagacataaaggcagagttaatgatgatgattggaagtttctcacagaatattggaggtcatctgaatctgaagctaataaactaaggcgttctccaagaagagatgaggtctatatcaagacacatacaagaaaaaatggagttccatcaagacatgcagaaccaattattaataaattgaaagccatagttgaagcccatccagagttgaagcaaagaacaattcaagagggcgatgcatttgctgttgcttgtggagaaaaggagccaagaggacgtgttcgtgctttgggtttaggaccaactccccaagatgttggtacaccagggttgaagtgttacacacccacaagactgcagatggaaggtttggcccgtaaaaaggctgaatgtgagaaagtagctcttcaacaacgcataactgaattggaggagcaaatgaaagaggaaaggatggcaagggaattgcaagatgtggaactcatttcacataatggttcaaattcacgacagaatgggagccgaaggtatgaagagcatgatgtggaagcgcatcatgacgctcaatttgtagaagatgaagattgtgcagaaaatcacatcaatcatcactgtgatgatggtgagcaacaccatcaaaacgatcctgttggtgcagccccgatagtgcaacaccatcaaagcagtcctgttggtgcagccccaacagtgcaatgccttcaaaacaatcatgttagggcagccccaacaattcaacgccatcaaaatagtcctataggtgcagtcccaccaaagcagcctcgacggtgcatcactacgagtttagcccacccagtcccaccaaggaatgaggccccctctcgcattcaacatgatgaacttgttggaaaggatgtaatattatatgccattattggacctgagcaacctgtggctaagggaacaattatttcaactaatcctaacactttgctgggaggtgtgcctcttgggaaagaatattgtgaagttattgtgaacattgtattgaaaagggatgccattttgccttgcccttatggttatgtagagacgatggctgatgctcatcaaatgtcagttgcttggctttataagaggatgaagattagcaaggcatcaggatcaccccaaggtattggaggtggatggcactcgaggcaagctgcagttggacaaacaagagactgacatagcattttgtagacaatgagtcctgatttgtagctaaacatgtcatggcatgccatgctatatgtaggattttttgtttgagactcagagatgaatcattttgtagattgagtcctgattttggttagctaaacatgtaacagctgctatcatgaatcctattttgttgtagctaaacttataatggctgctatcatgaattctatttttttgttgtagctaaacatgtattggctgctataatataacggttgttatgttgatatattcaaagaaaactatgttaatctgcc

SEQ ID NO: 80262 - DNA, 535 bp, Zea Mays
gcacaatctccgtccccgatttggaatgtagacaatctcccagtgattcctataccaagtaattcatgcacctatcccccaaatgtcacgcccgagctcataaaaaaggtcgcaattccatagtccagacacacaagagtccatcctgcgcccatgctcccacaggttctggccaaaagaacaatatcttgagaagcaatatcttgaacatcaaaatctaagcaattcggtgcttcttggtgcataatccaaagacttatttcatcgacagatatctagagaggagacgggcttatttggcaactgtggtaccgggttcaaacatgtcttagcttgttatagtggggatttgataattatgtatctaaatcaacagtcataaatatttgtaatatggagggattatgtatgcaataaaaatcatagctttgctcttcatacataagtatcactgattcaatgttatcagcccttgcccatacattctaaatgaaactgaaaaattgttacaaaatatggaggagaacaaaaacat

SEQ ID NO: 80263 - DNA, 2314 bp, Zea Mays
agtctcctctggcatcgccgcatcgggcatctggtatcccagatcgatctgaattctgaaccccgacttcacttgtgacctccgcatctccgtccggccggcgggcgaccatggctcttcccccaccccaaaccctaattctcttcttcctcctggcctcgctggcccccgcggtcaccgcggtggcgttctcgggcctcgacgcttttttcgcgtcggcagccgcgcgcgacccgtctgccggcaacgacaccttcgccgctctaccggccgccctccggcgcgcgctctccgcacgtacctccctcctcccttccttctttctcaacctctctgccacggtccccgtccacgtccgcctcgccggttcctccttcccggcctcatccgggcggtcccttccttccctcgtcaacgccgccgtctcctcagcccagttcctctccagccgccgcccacaccgtctcgcggtctcccacacccttcaccttgacgtcaccggccccgtcgcggcgtccaagctcgcctctaaagctggcgccgccgtccgcgcgcatctcgacaagtcccccgcgccgttccacaataacgcgctctcaggcgttccctactcgcttgtggacgatctcgtcgctgaggactaccgcgcgctagccggctccggccccgctgaggccgtctacatctacttgctcgaccttggcaagcagtcgcgccagtatgcctacaccgcggcctcctccggcactgatgcctcctcgcctgggtactcccgctgcctcggccccgtctgggctggtaagaatcggtacatttggatcgacctgggtgccggtccagtgaactacggtccagcgctctctggcgatggcgtgctcccccgtggtgagttccaccctcttgccacccttcacggcaggcccaagtcggagaaagctctcctcgcggatcttgcgtcgctggttcttagtgcatacaagtctttgctagtgccttcgctcagaattccagtgcattatgagaactcgttgcttattcggttcattcacatccatggggaccggaaggaagaagaagggcttgattttcgtgtgatagaacagtcaattcgtgacggggatctaccttatggtggacaaagcttgaagtttgatctgcatacggtcaagtactctgaatgcccaatttgctcattcgcagttgctaggtcgacaaactcgtttacatcgaggttcctgtttgagaactacacattgatagtgaatgagtacttggactccaagcggttgaggcaggtgctgtcagactcgtcggatgagatacatcgtttggctggggtccatgaaaattatgagcatgacaaggtggtgccagtttatgttttcgatttggattatgataaacttttgcctctggatagataccaccaggcagtggcatttggggatatggtggttgctgtgaggacgcggagctcacaaacagtaagtgactacacctgtaatggtcgacatgtgcttacaatgactagaaatcttgagcgcgcaatcattggctcacttctgcagagcatgtggggggtttcacccacacatctgtcatggagtcctgagcatcatgccacagttgttgattacacttggagcactggacatacaccatttggtcctttttcagagaccaaatcactgtcttttgtgcagaaagatgcagctcgtaggaatgttcttctcacaaccctgaactacacaatcaccagcacaatagatgttttggagtcgatggtggcacatggtggggagaaaatacttagaaagaaaaggcatgttgaattcattcagaggtggaacctgctcacgtataaactggagaaggtggtctcagccatgtcacgcttggactacgacaaggcaatgtactatttgaggtcttcagaccacgatctgtatgaaattcactcattggtgtatcaggcatcacaggagcttgaagcttcactggtttgcttcaaagatccaccattcccgtgggtatctgtttccatgtctgggttgtttgtttttggtttcttttatatgtactcaaaaagagacaagttgtttaggagcaaaaggaaacaattttgagtttgggcagcattttagttcatggatactgtccaaatgtttgatcctggtcataccatagctagacagcaccaaggatattgcaaccctgcatattacatggatctgtaagcgtacacgggctgcatcttgtttcaaccagatgaatttacatggtttagacgtaatagtcagtgtctgcatttgag

SEQ ID NO: 80264 - DNA, 1307 bp, Zea Mays
ccttcctaccttatcctctcggctgctcaccaccccagacaagtccagtcctctccctcccctcaacctagtgccgccactcgtgcccaccatgccgtcgcaccgccgccgccgctggtgaacggatccgtgcaccccgtacacctgccttggcctcctcccccctcccctcaacctagctccaccactcgcgcccacctccgtccgccggtggcgcaggggaggagccggccatcctcagggtggcgctgggctccggcaagctgcgcatcgaggggtcgctgggctttggcaagcttccgcacgcggcgccagctcaccgaccgcgccgtgctcgtggagcagagctggtggaagctgctggactgtgccgtgctcgaatttggacgcctctctctctctctcatgttgccatgctggacgcaagaaccgagcagcgggcagatgaaggagcagttcgtcgtggagatgctcgctaggccctcgagtgcggcggggtcaggccccgggagatcgcagcagcgtcaggaggacgcctcctcagctcaaggcagcaggccgcagtcgtcggctgcttctgatacaccggtggcgcagcaacctgacgcgaactctgtgcgagcgaagctcgagctcgccaagaacaccaagctcgaggcggccaagaggaagctccaggaaggctaccaagagtttgataatgcaaagaagcagagaagcatacagatggttcatccccagaacctgcccaagcaagcgaacaacacccagaatttccaacctagcgggccagcggcaagccaaggaatggcagcaacaggaattgaggactaagtacaacaacatggagccggatgctgttgatttctttggggaatgtatgaatagtccccgaaatggtcatactctgcttgcaaatgagatatatgagaaaatggttgccgagaaggaaagagagctagaagaaggagaagcacaaaagtcaccctccaagattgttgctgatagtctcagcccagatcagtcgctcatccaccttccttccaaacattggtgtctgtttgaatgcttcaaacctttgtggtggaacctttgtatgtttgaacctctgttgtggaagaactagtgtgctggaattatgtatgacttgtgatgagaatgttgtgtatgatggcttttctgtgtattatgattctgtgagctatcatgagagctcagtgtgtcgtcactgtatggtcactgtatgtgggtgccatattaaacgatcccaacattaggtgacgcgttgactggaaaaaatatgacag

SEQ ID NO: 80265 - DNA, 1867 bp, Zea Mays
tgggtcccctgcgaaccaacctcccaaaaagggtagcggattgggctttcccctccgcctccctcccctcacaaaaaggcggcagcacagcgccacccctcctgtcccgccgagttcggagcgcagcgcaaggcggggggaggagcaagaagccgccggcctccctcctccggctcaccaccaggcttactccgcaccgcgctgccacgggttgagccaaagctattttctaagaaaaatggcggcaatgatggtggcgatgactgcgaggagcaagaacagcatattacccatggagaagaagcagggctggtctattcagctaccagagctccggttcccttgggattcacatgaagacaagggtttctctctgagtctgcaaggatctggaccttctcatggcggcctgtttgctagcgtgggtcttaaagtgtcgacaggtgccccagcagtggcgcccggaccgggtgacaaggatattaagattccattcactgatcattgtatgaagtacgtgtctgaggcagttgggtaccaggttattagcactgaagcggagtcagtggaggaggtggtggatgctaaggcaaagaaggcagccaagaaacgtgggctgcagctgaaaattaagattgggaacccacatttgaggaggctggttagtggagctattgcaggtgctgtttccaggacttgtgtggcaccactggagacgatcaggactcacttgatggttgggagcaacggtgactccatgacagaggtgttccagtcaatcatgaacactgaggggtggactgggcttttccgtgggaatcttgtcaatgttatccgagttgcgccaagcaaagcaattgagctttttgcttttgatactgccaagaaattcttgactccaaaggctgatgagtctccaaagaccttcctacctccatcacttattgctggagcacttgcaggagtcagctcaaccctgtgcacatatcctttggagttgattaagaccagattgacgatagagaaagatgtctataacaacttcctccatgctttcgtcaagattttacgagaagaaggtccatcagagctctaccgtggtctgacaccaagtctgataggagtggtgccatatgccgcgactaattactacgcctatgacaccctaaagaagctctataggaagacgttcaagcaggaggagatcagcaacatcgcaactctcctaattggttcagccgctggtgccatctccagcactgccaccttccctcttgaggtggcccgcaagcaaatgcaggtaggagcagtaggagggaggcaggtctacaagaatgtgttccatgcgctctactgcataatggagaaggaaggggttggcggcctgtacaaggggctcggaccgagctgcatcaagttgatgcctgcagcaggcatctcgttcatgtgctacgaggcctgtaagaagatcctggtcgaagacaatgaggatagtgagtgaagctgaagcatgtatgcccctgaggaggggtatgactgatgtgccaggctagaagaggtttgggttgggttggggagtataccctagtattatcaactgatgaaaatgtagatccaagatatttgaacgccctttagatcataatttggttcagttttgtgttgaaatccataaacaatacacttacttgatggtgcatgttgcggggggcaattttgtcatgtggccatgtctgggtctgtcgaagggctcgtaacttctgtcgctacctttgttaaaactcattttgtaacctattcgatcagtcctgaaaccagtgacgaaagcatttagattttgtgcagaagcatgatcaattgttcattt

SEQ ID NO: 80266 - DNA, 2365 bp, Zea Mays
atggcgcgcccccagcctctgctcctcggttctcctttcctgtgcgccatcacatctcccctcatccatggtagctccctcacggcgctccctctgctctctcccatggcgcctccccttgctaggattccagcgcccggatcttctctctcccatggcgctcggtcctgctcgacgccctgtctctctccctccgctcacgcccgcttcctggccgcggtttctcccttccccgaagctccctcctccagccgcaagctccccctgctcggccttcgtccccatggcggcttcccctcctcgagctctctcgccgtggattctccctgcgtggacaccagccgagccccctgcgtcgcgccttgttccccgcgcgcgctccagctgctctactccggctcgcggagctcccttccctgcatccatggcagccatcgctgttgagttccctggccgtcgcgctccctggtgggtgagctggccgagctccctctcccgtagtgcattggcctccatccgagctcaccctggtctgatagaggtccctgcgagctccaccagtctgacccaagccgtcatgtgcctctggtcactgctctttgccttcgactccatggctgtggtgctcatttccctcgccgtggagctcctacgcgcacacctctgctcggcctctgctcgatgcccagtgcgccgtttctgctccctcgccatggtcacccagcccagccatgcctgttccctccctgtgcttgccccagcccctgcttttcccctggtcgcccatggcaccgatctgtccgccctgccgtcgctcagctcgtgcgtgccctgtgtattttccctgctcggcgtactccctcgctggtggtcgagcagctcactcatggtgcccagctcgtactccctcgccggtggtcgagcagctcactcatggtgcccagttcgcgtccacctcctctgttattgacaccatgcgctcggcttctctagcgccgatccacgctcgtccatgtcgccatcgtcgtgtcgtcgctggtgatagcttctcgtgccgtcgagcccgtcgttttccctgtccagtgctcgcgcggtttcctgctcgccagcacgccctctcggctcgctcggccttaatccccatcgcgtcattgacctcgccgtcgtcttggtcgtcgatgccacgcaaccatccacgtgttgtagtcctcacggacaccgcttcacaccatcaccctgttttcatcatccgtagcgtcgtcgtcgggatgtcctagctgcaacaccagcgccctcgaccgtgcccaaagctctatattggatttatcagcgtgctactcgtccgctggctcctcgccgtcgactctcggcaccacaagctcattttcccttatgcacatctcctcagaccctgttttatcacgcgtatgcattatcgatctcatcatcgtttcgtgcatcctcaagaaatacaaagcgtcgggtgaagacaaagctagcagcgtgatattcaccaagtgctcgacaaaaagctcgaacaagttgtcgatcgtcatcctcgtctacgccaagatccgagaagattaggcgcagaagaaaataaatcagtatgtggccggagaatactcgatgcggataaagatgaagtgtgattcgacgcagcactcaccctatttccggtgaaatgctgagctgaaaggcgtcgtcgatttcgtggtttcaagttggatttaattgatggtaagttgcttcgttattccagtcaactaggtgtttaattcgctaccacgtagcactatttaggtctgtaatattcctatctatatgcattcatgtgcatcgtgcatttcaattaggtacgataattaatcacgtgatgcggaagacgaaccaagtcgaccccatgcgtgggcaactccgcatggtgatgctgatggacgaacctgcctgatcaagtgccaggacaaggatgatcgtcaagtgaacatcgccttacaaacactaacctagtgttattcaggcaagccccggtgcatttgccacctccttgctgttttaaaatctttatcaccttgtttgatgcattaggtgataggagttgtgtgctaaaccattgatgcatttccttccttggaacattgatttcccttccatgatacctttttgaaaagaattttatgatgcttagcattgctttagcaaacaaaaatgttttattttaaaacaaaagtgatgcttcagtgggtgggaagttttcaaaaataaaacttgatggtggatccatcacggccgtgatgggttcaacatcggaaaagatgtacctctaccaggtaccaaactttgggttgaaaataataaaggtgag

SEQ ID NO: 80267 - DNA, 5398 bp, Zea Mays
tgacaaattgaatttaattccataaattaatcatgtgagtgtccgagtcgctcatgaccgtgagcacggttagtataccagttttacactctgtagaggttgtaccctgtacccacaagtcgtgtatcccatgtcatcagggtttgcaaggcccttagacactaccgaggtgaacggttagggatccactacgagccctttacaaagttccactagcttctgaaaacccgctacagtttatgggaagagcacttgcaagaatccctcgtctgagcgccatagcagcaaaatcaacccgataacctccctgcatgcaactcccctactgcccttgcccctttcgggtaaggtagtcctccactagctttcctaattagtcagccaagggcgtcccataccacccttgtggtggcactgttctcccgggtggttctccatgttcccattaacataatgatcttatcatgaacagtaaataataaactaataacaaaagtgtgaacatgtgtaatgtatatctctatacccaaaaccacataaagcaatagcatatactacccaaaaattcagtggtaaaacaaggtataaatatagccaaaactagggtaacatattggatcccatcaaattaacctatgcagatcattatgattgataagaatatgactgggtaaaaaggaagtgattaagggcacaactgccttcaatgagctcctgctcagcaacttctatctgccgggcaccaggatcctcagccactggctcttgtactcgccacaatacacacaagcacaatatatagagaaaattaacatcacaccaaacatgtaaacaaaatacataataaaatctacatattaaaataagatcctaggaacaggaatcattaattctggaattatggattttaagttatgactttccaaagattttatgtgtttggtataagattagttgggaaataaattttaatgtgactttcatgtcaaaacagcggtactaatggataaacaataatattacaaaattttagaaactgaaatggatcaatttggagttcatatgaactttctatgatttaaaccaattctagccatttactttacattaaaaatagatttccaattcaattttcctgatttacaaattccctgggctgcgcctcaaattctagagacaacaggggctaaactacaaaaattctagagactcagagcgctgttgctctggacggcgggttcattttctatttttaggaggtttcttatgtaaaaacgatagggcgaaggggtacgcagcgcactcggccattggattagaagtttatggcttagattagacctatccaagatcgaatcggtatggaacgaggaccgcacgatctaaatctggcgctcctgatttaaaagcctcaaaccaaatctcgtccacatgatttaaatacactggctactgctactccaaaccgaagcgttgtcctagatctaatcgtggccgttgcaacgaagatgaacagcacacaatccgtcttctacctcaccgcccagatacggcggagagagctccacccggcgacgcgctcgccggagacatcgccccgtgcgcgtggttgagcccaaaccctaagtaacccatactacatgaaggtatgtcaacggcgaacacggaggaggtgaaaattaccgagaatcggcgtgcagacgggttgttctcgagtctaggcggagcggcggtgctccttccacttcggcgagcaattcccttcacgccgctgtaactcacgcccgaattctcctcggtacacgatccacactcccgtagggtagtcccagagcacacgatgagtgtttaacgggagcgacggtggttaacgcctgcgatggctatcgacaaggtggtctggcacaacgctagttgtcgaaggggcgaggtaggtcaacagggcacgggcgtgctatttgtagggcggcggatacggcgcctgcaaccgagttgaccacaatggccccgcgcgatttctgcgcacgccgccgccgatcccggcgaggtgggtagctaggggaaggtggcgcctgacagccggttccattcgcacaggcacggacgacgcgaacatggcacactaggctgaccgggaggacccactggtcggtgcaggtgcgttacttgaggtgagcggctcacgaggcggcccagaaagtcagtgagtatgtgatggcgcgcagagtggctgacgggtggggcccccttgtcggtggagcacgtggtcgtgggagcgcgatgatgggctgcgcgaaggaagctagatgggctggaggcaaggaattgggcctagtgagggtttttctttttattttatgttttctttttctttttattcttcctttctcctttttgatttcaaatttaaatttgaattttagttgtagatttgcacataagtcaaatgtactaaatcaaatttggtgatgaaaagaatatatttatgtatataattatttcctatgttttatgtggtatttcttttctttctccacttctaaattctagaattcttttatatcttaaattccactttggactttaatatatttctttttacattatttttatgttgtcacaagatgcacacaaaataaaacctcagcatgatgcacaatttagtggcatgacttttattaatcctttgtttttaaatgaggtattcacatgtgatagtaaatagagatggtacacatataggaactaatgtctcatctagtattatcttacaaattgggtattacacctcccgtgttatcggcccaaggatttcccacaaaacatgtatattacagtattcacatttgatatacacacacttcggagatagagcggaagacttacaaaacattatttacatttccaaaactcaagttttatatgctagaaagagttataatatttgcaagttctgttagtctttgaagtgcataacttaattacaatacttggaaaggtgaagcctttccataagaaatacacataagcaaactaagcttgaagacctccacatgaagcaactaatgaagccaaagacatcaaaacctttcctgcaacaacatagggaataaaaccctgagtaggcaattactcagcaagacttacccgactaaggaaaagactctcaagggtatgctagcttttgggaatcaagggaaaagctcattaattatcaaaggctcctttttgtagaaaagtaagcttactaagtagatccttaagccaagttttacttcacaggttaggttgttacttcaatctactaacctgaatctagatttgcctaatctagatcatacacttggcctacactagattgtttttaattaaatctttgttatacttgttaactacgatgcagagcagtgatccagtcttcataaccgagaagtaacggcgatccgaatcgattaatacccagatggggatctccaaccacacgacatatgtagcacttaacccttgcatatgtcaaccattcccacggatcctccactacatgaactggtccacgctacccgggagcacattaccctaccatccagcctcttgccaggaggataactgctactcccaccatctcccacgcccagtgcgcggttgtcctttcacgtatggaatagacgggttcaggcttatccattacgaggtgcaagtcaaccacccgacctcaagtgatgacgggttcaggccatgcctagataatgaatttctcactgtagatgatgcattcattatcccaatcaaattttcttttggaagttatgagtcatagatcaaaaatatttttctaatctatccgcatgattaagcatctctagattttataaaacagatgacaaggtatagcaatcaattctttcaaggaatgataatgcatcaagtgtttaatcaatcaactcctatcacctaatgcatcatataactgataaaattttgtaaatacaaggaaggtggcaaatgcaccggggcttgcctttgttgcagagaagatccaaaatccttctactagataaccagttagatggaaccacaccaatgggtattcaagtactggagcaatttctctttgatgtccacttcttcatggagctctacatgagataatatggttatgaatgattgtgcaatgccatgaaaatgcaacttgcctagagggtaacaaagaatacatctagaatacacctacaagctatcatcacaagctacaagtcattagagagctaatccttttaagatttcacccaaacacctcaaacttaataagcaacttcatcccatcactaagacactagatgccctaattacccaaggatgaaatcctttcttctattttgagcaacaattagtttgctaagcaaacattgcctaaacagcttcaaactttacccaagagctaatatgtccaagataagcttacataattttcctataattgttagtgctctatttttaaacacacctagcacacaatctaaatcttttcttctccaatcatcacacacaaacacaggataaggacgatggcgctaatcatagcctaccacaatcacacaagaaccaattcttttggactttctcttgcatttacacatatatccgaaccgcacctgctctaacacgcgacaagccgatgaagcgagaggaacacgtaaggccgcacggagaaaacacaccgagcacgacagcttgtcgggtgtgaggacggctagcggcttcacgacgattccgcgagtgcgatgaggttagagcagaggttgtgggttgtcgaagacgatgacgcgaaggagctgtgggtcgagcatgactggcgagaaaacgacgatgacgtcacgtcgcgccaagagctcaacgacgacgagagcaccggtgatgctgtgatgaagtcgagggatacgacgctgaaacaacaggtcgacgacgaggtggagctcagacggctgtagaacagtgttgaagtacgcaggaccggacctaggcaaggacgagcagagaccggaggttgggacataacagaatcgacgacaggtgcagagggccgagctgcttttacgtgagggagcaggacactcacaggctgagagcgagcagttggggaagaactacagagaagcttgctagagcacagcttggaaacgagcaaggacaggctggccgctggggctaggaaacatggagagcgaacgctggggcaggtgatggctgggggttttcctgggagttgaacgtggtgaagccgagcaacagttggagttgcaggtgacgtgaggaattctccatccaggaacatctatctctattcgtatgagagaaaagaaaaagaatatggtagctcgtagctgttgggataagaaaa

SEQ ID NO: 80268 - DNA, 4797 bp, Zea Mays
tgacaaattgaatttaattccataaattaatcatgtgagtgtccgagtcgctcatgaccgtgagcacggttagtataccagttttacactctgtagaggttgtaccctgtacccacaagtcgtgtatcccatgtcatcagggtttgcaaggcccttagacactaccgaggtgaacggttagggatccactacgagccctttacaaagttccactagcttctgaaaacccgctacagtttatgggaagagcacttgcaagaatccctcgtctgagcgccatagcagcaaaatcaacccgataacctccctgcatgcaactcccctactgcccttgcccctttcgggtaaggtagtcctccactagctttcctaattagtcagccaagggcgtcccataccacccttgtggtggcactgttctcccgggtggttctccatgttcccattaacataatgatcttatcatgaacagtaaataataaactaataacaaaagtgtgaacatgtgtaatgtatatctctatacccaaaaccacataaagcaatagcatatactacccaaaaattcagtggtaaaacaaggtataaatatagccaaaactagggtaacatattggatcccatcaaattaacctatgcagatcattatgattgataagaatatgactgggtaaaaaggaagtgattaagggcacaactgccttcaatgagctcctgctcagcaacttctatctgccgggcaccaggatcctcagccactggctcttgtactcgccacaatacacacaagcacaatatatagagaaaattaacatcacaccaaacatgtaaacaaaatacataataaaatctacatattaaaataagatcctaggaacaggaatcattaattctggaattatggattttaagttatgactttccaaagattttatgtgtttggtataagattagttgggaaataaattttaatgtgactttcatgtcaaaacagcggtactaatggataaacaataatattacaaaattttagaaactgaaatggatcaatttggagttcatatgaactttctatgatttaaaccaattctagccatttactttacattaaaaatagatttccaattcaattttcctgatttacaaattccctgggctgcgcctcaaattctagagacaacaggggctaaactacaaaaattctagagactcagagcgctgttgctctggacggcgggttcattttctatttttaggaggtttcttatgtaaaaacgatagggcgaaggggtacgcagcgcactcggccattggattagaagtttatggcttagattagacctatccaagatcgaatcggtatggaacgaggaccgcacgatctaaatctggcgctcctgatttaaaagcctcaaaccaaatctcgtccacatgatttaaatacactggctactgctactccaaaccgaagcgttgtcctagatctaatcgtggccgttgcaacgaagatgaacagcacacaatccgtcttctacctcaccgcccagatacggcggagagagctccacccggcgacgcgctcgccggagacatcgccccgtgcgcgtggttgagcccaaaccctaagtaacccatactacatgaaggtatgtcaacggcgaacacggaggaggtgaaaattaccgagaatcggcgtgcagacgggttgttctcgagtctaggcggagcggcggtgctccttccacttcggcgagcaattcccttcacgccgctgtaactcacgcccgaattctcctcggtacacgatccacactcccgtagggtagtcccagagcacacgatgagtgtttaacgggagcgacggtggttaacgcctgcgatggctatcgacaaggtggtctggcacaacgctagttgtcgaaggggcgaggtaggtcaacagggcacgggcgtgctatttgtagggcggcggatacggcgcctgcaaccgagttgaccacaatggccccgcgcgatttctgcgcacgccgccgccgatcccggcgaggtgggtagctaggggaaggtggcgcctgacagccggttccattcgcacaggcacggacgacgcgaacatggcacactaggctgaccgggaggacccactggtcggtgcaggtgcgttacttgaggtgagcggctcacgaggcggcccagaaagtcagtgagtatgtgatggcgcgcagagtggctgacgggtggggcccccttgtcggtggagcacgtggtcgtgggagcgcgatgatgggctgcgcgaaggaagctagatgggctggaggcaaggaattgggcctagtgagggtttttctttttattttatgttttctttttctttttattcttcctttctcctttttgatttcaaatttaaatttgaattttagttgtagatttgcacataagtcaaatgtactaaatcaaatttggtgatgaaaagaatatatttatgtatataattatttcctatgttttatgtggtatttcttttctttctccacttctaaattctagaattcttttatatcttaaattccactttggactttaatatatttctttttacattatttttatgttgtcacaagatgcacacaaaataaaacctcagcatgatgcacaatttagtggcatgacttttattaatcctttgtttttaaatgaggtattcacatgtgatagtaaatagagatggtacacatataggaactaatgtctcatctagtattatcttacaaattgggtattacacctcccgtgttatcggcccaaggatttcccacaaaacatgtatattacagtattcacatttgatatacacacacttcggagatagagcggaagacttacaaaacattatttacatttccaaaactcaagttttatatgctagaaagagttataatatttgcaagttctgttagtctttgaagtgcataacttaattacaatacttggaaaggtgaagcctttccataagaaatacacataagcaaactaagcttgaagacctccacatgaagcaactaatgaagccaaagacatcaaaacctttcctgcaacaacatagggaataaaaccctgagtaggcaattactcagcaagacttacccgactaaggaaaagactctcaagggtatgctagcttttgggaatcaagggaaaagctcattaattatcaaaggctcctttttgtagaaaagtaagcttactaagtagatccttaagccaagttttacttcacaggttaggttgttacttcaatctactaacctgaatctagatttgcctaatctagatcatacacttggcctacactagattgtttttaattaaatctttgttatacttgttaactacgatgcagagcagtgatccagtcttcataaccgagaagtaacggcgatccgaatcgattaatacccagatggggatctccaaccacacgacatatgtagcacttaacccttgcatatgtcaaccattcccacggatcctccactacatgaactggtccacgctacccgggagcacattaccctaccatccagcctcttgccaggaggataactgctactcccaccatctcccacgcccagtgcgcggttgtcctttcacgtatggaatagacgggttcaggcttatccattacgaggtgcaagtcaaccacccgacctcaagtgatgacgggttcaggccatgcctagataatgaatttctcactgtagatgatgcattcattatcccaatcaaattttcttttggaagttatgagtcatagatcaaaaatatttttctaatctatccgcatgattaagcatctctagattttataaaacagatgacaaggtatagcaatcaattctttcaaggaatgataatgcatcaagtgtttaatcaatcaactcctatcacctaatgcatcatataactgataaaattttgtaaatacaaggaaggtggcaaatgcaccggggcttgcctttgttgcagagaagatccaaaatccttctactagataaccagttagatggaaccacaccaatgggtattcaagtactggagcaatttctctttgatgtccacttcttcatggagctctgctctaacacgcgacaagccgatgaagcgagaggaacacgtaaggccgcacggagaaaacacaccgagcacgacagcttgtcgggtgtgaggacctgcaggagatgacgacaccattactgctaagtacacagccggtaattccaaacaaataaaaatttatgatgaaccgacgaggcagacggctagcggcttcacgacgattccgcgagtgcgatgaggttagagcagaggttgtgggttgtcgaagacgatgacgcgaaggagctgtgggtcgagcatgactggcgagaaaacgacgatgacgtcacgtcgcgccaagagctcaacgacgacgagagcaccggtgatgctgtgatgaagtcgagggatacgacgaggctgagagcgagcagttggggaagaactacagagaagcttgctagagcacagcttggaaacgagcaaggacaggctggccgctggggctaggaaacatggagagcgaacgctggggcaggtgatggctgggggttttcctgggagttgaacgtggtgaagccgagcaacagttggagttgcaggtgacgtgaggaattctccatccaggaacatctatctctattcgtatgagagaaaagaaaaagaatatggtagctcgtagctgttgggataagaaaa

SEQ ID NO: 80269 - DNA, 2969 bp, Zea Mays
  misc_feature (2968)..(2969): n is a, c, g, or t
ttttttttatataaaccgattgaatttgcttatttccggatttctaaatcatctcccgattcctccgctcgtcaaatcctcgccgtgtccgtgtagcaattccttgcgttggcgaatcatagcagtctcctctctccggcggcaaatcgtcgaactgccacgcctggccccgccgccagcctcctcgtctgaagaagaacggaagacgtcgggctccggtggttctgaacggcaggtagccagtcgcgcttctcacgccggagactcgattggcgttgtatttgcctttccgtttgttgagttctcgaagcaaaacgatcggatgagattcttcaaggggagcaaggtggaggtattgcaggaggcagaggtgccatttggttcttggaggcctggtgagatcatctccggcaatggacacacctacctggtgagatatgatgaaagtcccgttgactctagcgtggctgttgaaaggatgccaaggaggttgattagacctagccctcctacggatgatcctgtacgctggagtttgggtagtattcttgaggcctttgacagctactcgtggaaggttgctgaggtggtgagagtgcttagaaagaatcaatatctagtcaggctccttgggtcgtcgctggagttgagtgcacatgcatcagatcttcgattgaggaagctttggttagatgacagatggattgtgactcagaagtattccgcaagatgcttggatggtgcattcagaggtcaatctgaagatggaaatttagactgcaacttgagaaaggacagccatattcaacttgagaaccggaatgcttttgagggtgatacatctagaggcatgaagagaaaatcgtctgctatatcaacacatcctcattgcagcgacatcagtaagagattgcaatgcagtgacgccactaagagattctggacactaaatagagatggaaggcacacaaagctggttgatagaggttttttccctttggctgaaaagggccaagagtgtggttccagattggtactggttgctggataaaagggtcaaattggattagtttatgatccaaacaaaaaggtgatctgattgttgtgtgaattttcacagaacaagcataatccctcttaggtaagtgctcctgtaactcttggttttatttaaatcctttttggaggagaaagatttgaatgatacttacaaggtatactaaaaatgtattttgatcattgtacacatttttcatgtaataaagcaactggcagtcttagctgtattttcatattattatatggatttatggtaaacaactctaaaaatatcagtaagttaagaccttgtttggtggagcaggtcattaagtgctctctaggaaatcgtggagctagatctataagcctttagaagacatttagataaatcattttgtttattatttagattaatttttttaaaactatttaaatcgatattataaactacaactccacactagagctggaacatggagccatcacaaacacccccctaaattgcaattgatgcctacccttcagcaaaaaaacagtagtttaggtaggcaattgtaggtcgcttgcagaggctttatatatccattgtgttgaagttaagaaatattcaagatatatgttgcggagtgcatattgttttgagttaaaatttaaatatgaagtagggactataatttaggggttgtttggtacctttgctagctactgtttggatgtctagatagcctaccttgattcctgcgctagcgagcttttctttgctgcttcaattgcttgtttggattggaggagattgaaggggattggagggtattgagggggaaatgaactaatttccccttctaaccaaacaagccccaagcaagcccaattggctctccttagccgggaagcattcagttactcacgctggtgaagcaaggcaacctggttcgggaaccaagcatgcccttaattggttgtctggcaaggacattgatctatgcattgttaagattttccttgctagtgtggtgagcaaatttggctcgtctggacgggcaagatccttgtggcttgtgcgccttaagaaatgggaggtggcttgtgccagcccctcaatacctcaaccaactacttgtgtttatgggtgttcacctaagaatcttgcatcaagacaagggtgttgttccatgaatgcctacacattatgactatcattgtacgcttgaaatctttgttagataaaaaggacataaccagtgctggcaaggacatgatggggtttgaggaaggaataaccgaggcaagtcttacccctacattttgtggagaggttgtgttgaaccaaggaccttttggcttagtggaaagacctctcaccaccatggttattaaagcgtcgttaaaacatcgtttaaacgctaaaacgtgattatcatgtagaacgcccgaaagttttgaccaaatctcatagaacatccatgaaatttgtttaaacgttcgtttttgcgtcgtttaaacgttttgggatgttttaggcgcgttttagaagttttagactatgggacctctgaaaggcccatcaagccccagaggtaagacgtcggccttccctctcatgttctccttctccagcgcctccacccacctccctcagtccctcctcctctcctccagtttcgcccgctctagtgtcggttccatcaattctagccatccaacgtcgctcgctccatcgtcgtccgctccagtgtcgcccgctccagaatcaccctcctccagcgtcgcctctctcctccctcctccaacgccaccacccatcaaccactgccagtagccagctggtcccaggtcaagacgctaggtgccagcagccagtaaatcaccggttcaccatttcattgtcgccctgctctatttggtatctgtttgtcatcttgctcann

SEQ ID NO: 80270 - DNA, 3352 bp, Zea Mays
  misc_feature (3351)..(3352): n is a, c, g, or t
ttttttttatataaaccgattgaatttgcttatttccggatttctaaatcatctcccgattcctccgctcgtcaaatcctcgccgtgtccgtgtagcaattccttgcgttggcgaatcatagcagtctcctctctccggcggcaaatcgtcgaactgccacgcctggccccgccgccagcctcctcgtctgaagaagaacggaagacgtcgggctccggtggttctgaacggcaggtagccagtcgcgcttctcacgccggagactcgattggcgttgtatttgcctttccgtttgttgagttctcgaagcaaaacgatcggatgagattcttcaaggggagcaaggtggaggtattgcaggaggcagaggtgccatttggttcttggaggcctggtgagatcatctccggcaatggacacacctacctggtgagatatgatgaaagtcccgttgactctagcgtggctgttgaaaggatgccaaggaggttgattagacctagccctcctacggatgatcctgtacgctggagtttgggtagtattcttgaggcctttgacagctactcgtggaaggttgctgaggtggtgagagtgcttagaaagaatcaatatctagtcaggctccttgggtcgtcgctggagttgagtgcacatgcatcagatcttcgattgaggaagctttggttagatgacagatggattgtgactcagaagtattccgcaagatgcttggatggtgcattcagaggtcaatctgaagatggaaatttagactgcaacttgagaaaggacagccatattcaacttgagaaccggaatgcttttgagggtgatacatctagaggcatgaagagaaaatcgtctgctatatcaacacatcctcattgcagcgacatcagtaagagattgcaatgcagtgacgccactaagagattctggacactaaatagagatggaaggcacacaaagctggttgatagaggttttttccctttggctgaaaaggtagatgctgttgattccccatgcttaatgctgcgtgggaaatacatgcatgctagtcataaagggcatactagaacaactgaagaatttagtgacacagagagtacctcatcttctgttggtagttctagtcctaatagtaccccccatagatcacagtattataatttggtcaaccaaagtggagatatctgtagtagaactgatggtgatgaagcttttacattcgaaagagaaacatcagaacatggtaacgatggatcgaggggagaaacccatttgctggaattacatgcttatcgtgcgacaatgttagccttgtatgcttgtgggtcaattagctgggagcaagaggctttgttgactaacctaaggttaagcagggccaagagtgtggttccagattggtactggttgctggataaaagggtcaaattggattagtttatgatccaaacaaaaaggtgatctgattgttgtgtgaattttcacagaacaagcataatccctcttaggtaagtgctcctgtaactcttggttttatttaaatcctttttggaggagaaagatttgaatgatacttacaaggtatactaaaaatgtattttgatcattgtacacatttttcatgtaataaagcaactggcagtcttagctgtattttcatattattatatggatttatggtaaacaactctaaaaatatcagtaagttaagaccttgtttggtggagcaggtcattaagtgctctctaggaaatcgtggagctagatctataagcctttagaagacatttagataaatcattttgtttattatttagattaatttttttaaaactatttaaatcgatattataaactacaactccacactagagctggaacatggagccatcacaaacacccccctaaattgcaattgatgcctacccttcagcaaaaaaacagtagtttaggtaggcaattgtaggtcgcttgcagaggctttatatatccattgtgttgaagttaagaaatattcaagatatatgttgcggagtgcatattgttttgagttaaaatttaaatatgaagtagggactataatttaggggttgtttggtacctttgctagctactgtttggatgtctagatagcctaccttgattcctgcgctagcgagcttttctttgctgcttcaattgcttgtttggattggaggagattgaaggggattggagggtattgagggggaaatgaactaatttccccttctaaccaaacaagccccaagcaagcccaattggctctccttagccgggaagcattcagttactcacgctggtgaagcaaggcaacctggttcgggaaccaagcatgcccttaattggttgtctggcaaggacattgatctatgcattgttaagattttccttgctagtgtggtgagcaaatttggctcgtctggacgggcaagatccttgtggcttgtgcgccttaagaaatgggaggtggcttgtgccagcccctcaatacctcaaccaactacttgtgtttatgggtgttcacctaagaatcttgcatcaagacaagggtgttgttccatgaatgcctacacattatgactatcattgtacgcttgaaatctttgttagataaaaaggacataaccagtgctggcaaggacatgatggggtttgaggaaggaataaccgaggcaagtcttacccctacattttgtggagaggttgtgttgaaccaaggaccttttggcttagtggaaagacctctcaccaccatggttattaaagcgtcgttaaaacatcgtttaaacgctaaaacgtgattatcatgtagaacgcccgaaagttttgaccaaatctcatagaacatccatgaaatttgtttaaacgttcgtttttgcgtcgtttaaacgttttgggatgttttaggcgcgttttagaagttttagactatgggacctctgaaaggcccatcaagccccagaggtaagacgtcggccttccctctcatgttctccttctccagcgcctccacccacctccctcagtccctcctcctctcctccagtttcgcccgctctagtgtcggttccatcaattctagccatccaacgtcgctcgctccatcgtcgtccgctccagtgtcgcccgctccagaatcaccctcctccagcgtcgcctctctcctccctcctccaacgccaccacccatcaaccactgccagtagccagctggtcccaggtcaagacgctaggtgccagcagccagtaaatcaccggttcaccatttcattgtcgccctgctctatttggtatctgtttgtcatcttgctcann

SEQ ID NO: 80271 - DNA, 3092 bp, Zea Mays
  misc_feature (3091)..(3092): n is a, c, g, or t
ttttttttatataaaccgattgaatttgcttatttccggatttctaaatcatctcccgattcctccgctcgtcaaatcctcgccgtgtccgtgtagcaattccttgcgttggcgaatcatagcagtctcctctctccggcggcaaatcgtcgaactgccacgcctggccccgccgccagcctcctcgtctgaagaagaacggaagacgtcgggctccggtggttctgaacggcaggtagccagtcgcgcttctcacgccggagactcgattggcgttgtatttgcctttccgtttgttgagttctcgaagcaaaacgatcggatgagattcttcaaggggagcaaggtggaggtattgcaggaggcagaggtgccatttggttcttggaggcctggtgagatcatctccggcaatggacacacctacctggtgagatatgatgaaagtcccgttgactctagcgtggctgttgaaaggatgccaaggaggttgattagacctagccctcctacggatgatcctgtacgctggagtttgggtagtattcttgaggcctttgacagctactcgtggaaggttgctgaggtggtgagagtgcttagaaagaatcaatatctagtcaggctccttgggtcgtcgctggagttgagtgcacatgcatcagatcttcgattgaggaagctttggttagatgacagatggattgtgactcagaagtattccgcaagatgcttggatggtgcattcagaggtcaatctgaagatggaaatttagactgcaacttgagaaaggacagccatattcaacttgagaaccggaatgcttttgagggtgatacatctagaggcatgaagagaaaatcgtctgctatatcaacacatcctcattgcagcgacatcagtaagagattgcaatgcagtgacgccactaagagattctggacactaaatagagatggaaggcacacaaagctggttgatagaggttttttccctttggctgaaaagggccaaggttggaggcttgtaaagcatccttccataggttcttataaatggaggagtctgccacatgttttgcagtgtgataaatgtgacaatatttccattgaacttccattggttaagcagggccaagagtgtggttccagattggtactggttgctggataaaagggtcaaattggattagtttatgatccaaacaaaaaggtgatctgattgttgtgtgaattttcacagaacaagcataatccctcttaggtaagtgctcctgtaactcttggttttatttaaatcctttttggaggagaaagatttgaatgatacttacaaggtatactaaaaatgtattttgatcattgtacacatttttcatgtaataaagcaactggcagtcttagctgtattttcatattattatatggatttatggtaaacaactctaaaaatatcagtaagttaagaccttgtttggtggagcaggtcattaagtgctctctaggaaatcgtggagctagatctataagcctttagaagacatttagataaatcattttgtttattatttagattaatttttttaaaactatttaaatcgatattataaactacaactccacactagagctggaacatggagccatcacaaacacccccctaaattgcaattgatgcctacccttcagcaaaaaaacagtagtttaggtaggcaattgtaggtcgcttgcagaggctttatatatccattgtgttgaagttaagaaatattcaagatatatgttgcggagtgcatattgttttgagttaaaatttaaatatgaagtagggactataatttaggggttgtttggtacctttgctagctactgtttggatgtctagatagcctaccttgattcctgcgctagcgagcttttctttgctgcttcaattgcttgtttggattggaggagattgaaggggattggagggtattgagggggaaatgaactaatttccccttctaaccaaacaagccccaagcaagcccaattggctctccttagccgggaagcattcagttactcacgctggtgaagcaaggcaacctggttcgggaaccaagcatgcccttaattggttgtctggcaaggacattgatctatgcattgttaagattttccttgctagtgtggtgagcaaatttggctcgtctggacgggcaagatccttgtggcttgtgcgccttaagaaatgggaggtggcttgtgccagcccctcaatacctcaaccaactacttgtgtttatgggtgttcacctaagaatcttgcatcaagacaagggtgttgttccatgaatgcctacacattatgactatcattgtacgcttgaaatctttgttagataaaaaggacataaccagtgctggcaaggacatgatggggtttgaggaaggaataaccgaggcaagtcttacccctacattttgtggagaggttgtgttgaaccaaggaccttttggcttagtggaaagacctctcaccaccatggttattaaagcgtcgttaaaacatcgtttaaacgctaaaacgtgattatcatgtagaacgcccgaaagttttgaccaaatctcatagaacatccatgaaatttgtttaaacgttcgtttttgcgtcgtttaaacgttttgggatgttttaggcgcgttttagaagttttagactatgggacctctgaaaggcccatcaagccccagaggtaagacgtcggccttccctctcatgttctccttctccagcgcctccacccacctccctcagtccctcctcctctcctccagtttcgcccgctctagtgtcggttccatcaattctagccatccaacgtcgctcgctccatcgtcgtccgctccagtgtcgcccgctccagaatcaccctcctccagcgtcgcctctctcctccctcctccaacgccaccacccatcaaccactgccagtagccagctggtcccaggtcaagacgctaggtgccagcagccagtaaatcaccggttcaccatttcattgtcgccctgctctatttggtatctgtttgtcatcttgctcann

SEQ ID NO: 80272 - DNA, 2978 bp, Zea Mays
  misc_feature (2977)..(2978): n is a, c, g, or t
ttttttttatataaaccgattgaatttgcttatttccggatttctaaatcatctcccgattcctccgctcgtcaaatcctcgccgtgtccgtgtagcaattccttgcgttggcgaatcatagcagtctcctctctccggcggcaaatcgtcgaactgccacgcctggccccgccgccagcctcctcgtctgaagaagaacggaagacgtcgggctccggtggttctgaacggcaggtagccagtcgcgcttctcacgccggagactcgattggcgttgtatttgcctttccgtttgttgagttctcgaagcaaaacgatcggatgagattcttcaaggggagcaaggtggaggtattgcaggaggcagaggtgccatttggttcttggaggcctggtgagatcatctccggcaatggacacacctacctggtgagatatgatgaaagtcccgttgactctagcgtggctgttgaaaggatgccaaggaggttgattagacctagccctcctacggatgatcctgtacgctggagtttgggtagtattcttgaggcctttgacagctactcgtggaaggttgctgaggtggtgagagtgcttagaaagaatcaatatctagtcaggctccttgggtcgtcgctggagttgagtgcacatgcatcagatcttcgattgaggaagctttggttagatgacagatggattgtgactcagaagtattccgcaagatgcttggatggtgcattcagaggtcaatctgaagatggaaatttagactgcaacttgagaaaggacagccatattcaacttgagaaccggaatgcttttgagggtgatacatctagaggcatgaagagaaaatcgtctgctatatcaacacatcctcattgcagcgacatcagtaagagattgcaatgcagtgacgccactaagagattctggacactaaatagagatggaaggcacacaaagctggttgatagaggttttttccctttggctgaaaaggttaagcagggccaagagtgtggttccagattggtactggttgctggataaaagggtcaaattggattagtttatgatccaaacaaaaaggtgatctgattgttgtgtgaattttcacagaacaagcataatccctcttaggtaagtgctcctgtaactcttggttttatttaaatcctttttggaggagaaagatttgaatgatacttacaaggtatactaaaaatgtattttgatcattgtacacatttttcatgtaataaagcaactggcagtcttagctgtattttcatattattatatggatttatggtaaacaactctaaaaatatcagtaagttaagaccttgtttggtggagcaggtcattaagtgctctctaggaaatcgtggagctagatctataagcctttagaagacatttagataaatcattttgtttattatttagattaatttttttaaaactatttaaatcgatattataaactacaactccacactagagctggaacatggagccatcacaaacacccccctaaattgcaattgatgcctacccttcagcaaaaaaacagtagtttaggtaggcaattgtaggtcgcttgcagaggctttatatatccattgtgttgaagttaagaaatattcaagatatatgttgcggagtgcatattgttttgagttaaaatttaaatatgaagtagggactataatttaggggttgtttggtacctttgctagctactgtttggatgtctagatagcctaccttgattcctgcgctagcgagcttttctttgctgcttcaattgcttgtttggattggaggagattgaaggggattggagggtattgagggggaaatgaactaatttccccttctaaccaaacaagccccaagcaagcccaattggctctccttagccgggaagcattcagttactcacgctggtgaagcaaggcaacctggttcgggaaccaagcatgcccttaattggttgtctggcaaggacattgatctatgcattgttaagattttccttgctagtgtggtgagcaaatttggctcgtctggacgggcaagatccttgtggcttgtgcgccttaagaaatgggaggtggcttgtgccagcccctcaatacctcaaccaactacttgtgtttatgggtgttcacctaagaatcttgcatcaagacaagggtgttgttccatgaatgcctacacattatgactatcattgtacgcttgaaatctttgttagataaaaaggacataaccagtgctggcaaggacatgatggggtttgaggaaggaataaccgaggcaagtcttacccctacattttgtggagaggttgtgttgaaccaaggaccttttggcttagtggaaagacctctcaccaccatggttattaaagcgtcgttaaaacatcgtttaaacgctaaaacgtgattatcatgtagaacgcccgaaagttttgaccaaatctcatagaacatccatgaaatttgtttaaacgttcgtttttgcgtcgtttaaacgttttgggatgttttaggcgcgttttagaagttttagactatgggacctctgaaaggcccatcaagccccagaggtaagacgtcggccttccctctcatgttctccttctccagcgcctccacccacctccctcagtccctcctcctctcctccagtttcgcccgctctagtgtcggttccatcaattctagccatccaacgtcgctcgctccatcgtcgtccgctccagtgtcgcccgctccagaatcaccctcctccagcgtcgcctctctcctccctcctccaacgccaccacccatcaaccactgccagtagccagctggtcccaggtcaagacgctaggtgccagcagccagtaaatcaccggttcaccatttcattgtcgccctgctctatttggtatctgtttgtcatcttgctcann

SEQ ID NO: 80273 - DNA, 1969 bp, Zea Mays
  misc_feature (1968)..(1969): n is a, c, g, or t
ttttttttatataaaccgattgaatttgcttatttccggatttctaaatcatctcccgattcctccgctcgtcaaatcctcgccgtgtccgtgtagcaattccttgcgttggcgaatcatagcagtctcctctctccggcggcaaatcgtcgaactgccacgcctggccccgccgccagcctcctcgtctgaagaagaacggaagacgtcgggctccggtggttctgaacggcaggtagccagtcgcgcttctcacgccggagactcgattggcgttgtatttgcctttccgtttgttgagttctcgaagcaaaacgatcggatgagattcttcaaggggagcaaggtggaggtattgcaggaggcagaggtgccatttggttcttggaggcctggtgagatcatctccggcaatggacacacctacctggtgagatatgatgaaagtcccgttgactctagcgtggctgttgaaaggatgccaaggaggttgattagacctagccctcctacggatgatcctgtacgctggagtttgggtagtattcttgaggcctttgacagctactcgtggaaggttgctgaggtggtgagagtgcttagaaagaatcaatatctagtcaggctccttgggtcgtcgctggagttgagtgcacatgcatcagatcttcgattgaggaagctttggttagatgacagatggattgtgactcagaagtattccgcaagatgcttggatggtgcattcagaggtcaatctgaagatggaaatttagactgcaacttgagaaaggacagccatattcaacttgagaaccggaatgcttttgagggtgatacatctagaggcatgaagagaaaatcgtctgctatatcaacacatcctcattgcagcgacatcagtaagagattgcaatgcagtgacgccactaagagattctggacactaaatagagatggaaggcacacaaagctggttgatagaggttttttccctttggctgaaaagggccaaggttggaggcttgtaaagcatccttccataggttcttataaatggaggagtctgccacatgttttgcagtgtgataaatgtgacaatatttccattgaacttccattggttaagcagggccaagagtgtggttccagattggtactggttgctggataaaagggtcaaattggattagtttatgatccaaacaaaaaggtgatctgattgttgtgtgaattttcacagaacaagcataatccctcttagataaaaaggacataaccagtgctggcaaggacatgatggggtttgaggaaggaataaccgaggcaagtcttacccctacattttgtggagaggttgtgttgaaccaaggaccttttggcttagtggaaagacctctcaccaccatggttattaaagcgtcgttaaaacatcgtttaaacgctaaaacgtgattatcatgtagaacgcccgaaagttttgaccaaatctcatagaacatccatgaaatttgtttaaacgttcgtttttgcgtcgtttaaacgttttgggatgttttaggcgcgttttagaagttttagactatgggacctctgaaaggcccatcaagccccagaggtaagacgtcggccttccctctcatgttctccttctccagcgcctccacccacctccctcagtccctcctcctctcctccagtttcgcccgctctagtgtcggttccatcaattctagccatccaacgtcgctcgctccatcgtcgtccgctccagtgtcgcccgctccagaatcaccctcctccagcgtcgcctctctcctccctcctccaacgccaccacccatcaaccactgccagtagccagctggtcccaggtcaagacgctaggtgccagcagccagtaaatcaccggttcaccatttcattgtcgccctgctctatttggtatctgtttgtcatcttgctcann

SEQ ID NO: 80274 - DNA, 3288 bp, Zea Mays
  misc_feature (3287)..(3288): n is a, c, g, or t
ttttttttatataaaccgattgaatttgcttatttccggatttctaaatcatctcccgattcctccgctcgtcaaatcctcgccgtgtccgtgtagcaattccttgcgttggcgaatcatagcagtctcctctctccggcggcaaatcgtcgaactgccacgcctggccccgccgccagcctcctcgtctgaagaagaacggaagacgtcgggctccggtggttctgaacggcagagttctcgaagcaaaacgatcggatgagattcttcaaggggagcaaggtggaggtattgcaggaggcagaggtgccatttggttcttggaggcctggtgagatcatctccggcaatggacacacctacctggtgagatatgatgaaagtcccgttgactctagcgtggctgttgaaaggatgccaaggaggttgattagacctagccctcctacggatgatcctgtacgctggagtttgggtagtattcttgaggcctttgacagctactcgtggaaggttgctgaggtggtgagagtgcttagaaagaatcaatatctagtcaggctccttgggtcgtcgctggagttgagtgcacatgcatcagatcttcgattgaggaagctttggttagatgacagatggattgtgactcagaagtattccgcaagatgcttggatggtgcattcagaggtcaatctgaagatggaaatttagactgcaacttgagaaaggacagccatattcaacttgagaaccggaatgcttttgagggtgatacatctagaggcatgaagagaaaatcgtctgctatatcaacacatcctcattgcagcgacatcagtaagagattgcaatgcagtgacgccactaagagattctggacactaaatagagatggaaggcacacaaagctggttgatagaggttttttccctttggctgaaaaggtagatgctgttgattccccatgcttaatgctgcgtgggaaatacatgcatgctagtcataaagggcatactagaacaactgaagaatttagtgacacagagagtacctcatcttctgttggtagttctagtcctaatagtaccccccatagatcacagtattataatttggtcaaccaaagtggagatatctgtagtagaactgatggtgatgaagcttttacattcgaaagagaaacatcagaacatggtaacgatggatcgaggggagaaacccatttgctggaattacatgcttatcgtgcgacaatgttagccttgtatgcttgtgggtcaattagctgggagcaagaggctttgttgactaacctaaggttaagcagggccaagagtgtggttccagattggtactggttgctggataaaagggtcaaattggattagtttatgatccaaacaaaaaggtgatctgattgttgtgtgaattttcacagaacaagcataatccctcttaggtaagtgctcctgtaactcttggttttatttaaatcctttttggaggagaaagatttgaatgatacttacaaggtatactaaaaatgtattttgatcattgtacacatttttcatgtaataaagcaactggcagtcttagctgtattttcatattattatatggatttatggtaaacaactctaaaaatatcagtaagttaagaccttgtttggtggagcaggtcattaagtgctctctaggaaatcgtggagctagatctataagcctttagaagacatttagataaatcattttgtttattatttagattaatttttttaaaactatttaaatcgatattataaactacaactccacactagagctggaacatggagccatcacaaacacccccctaaattgcaattgatgcctacccttcagcaaaaaaacagtagtttaggtaggcaattgtaggtcgcttgcagaggctttatatatccattgtgttgaagttaagaaatattcaagatatatgttgcggagtgcatattgttttgagttaaaatttaaatatgaagtagggactataatttaggggttgtttggtacctttgctagctactgtttggatgtctagatagcctaccttgattcctgcgctagcgagcttttctttgctgcttcaattgcttgtttggattggaggagattgaaggggattggagggtattgagggggaaatgaactaatttccccttctaaccaaacaagccccaagcaagcccaattggctctccttagccgggaagcattcagttactcacgctggtgaagcaaggcaacctggttcgggaaccaagcatgcccttaattggttgtctggcaaggacattgatctatgcattgttaagattttccttgctagtgtggtgagcaaatttggctcgtctggacgggcaagatccttgtggcttgtgcgccttaagaaatgggaggtggcttgtgccagcccctcaatacctcaaccaactacttgtgtttatgggtgttcacctaagaatcttgcatcaagacaagggtgttgttccatgaatgcctacacattatgactatcattgtacgcttgaaatctttgttagataaaaaggacataaccagtgctggcaaggacatgatggggtttgaggaaggaataaccgaggcaagtcttacccctacattttgtggagaggttgtgttgaaccaaggaccttttggcttagtggaaagacctctcaccaccatggttattaaagcgtcgttaaaacatcgtttaaacgctaaaacgtgattatcatgtagaacgcccgaaagttttgaccaaatctcatagaacatccatgaaatttgtttaaacgttcgtttttgcgtcgtttaaacgttttgggatgttttaggcgcgttttagaagttttagactatgggacctctgaaaggcccatcaagccccagaggtaagacgtcggccttccctctcatgttctccttctccagcgcctccacccacctccctcagtccctcctcctctcctccagtttcgcccgctctagtgtcggttccatcaattctagccatccaacgtcgctcgctccatcgtcgtccgctccagtgtcgcccgctccagaatcaccctcctccagcgtcgcctctctcctccctcctccaacgccaccacccatcaaccactgccagtagccagctggtcccaggtcaagacgctaggtgccagcagccagtaaatcaccggttcaccatttcattgtcgccctgctctatttggtatctgtttgtcatcttgctcann

SEQ ID NO: 80275 - DNA, 2497 bp, Zea Mays
ttttttttatataaaccgattgaatttgcttatttccggatttctaaatcatctcccgattcctccgctcgtcaaatcctcgccgtgtccgtgtagcaattccttgcgttggcgaatcatagcagtctcctctctccggcggcaaatcgtcgaactgccacgcctggccccgccgccagcctcctcgtctgaagaagaacggaagacgtcgggctccggtggttctgaacggcaggtagccagtcgcgcttctcacgccggagactcgattggcgttgtatttgcctttccgtttgttgagttctcgaagcaaaacgatcggatgagattcttcaaggggagcaaggtggaggtattgcaggaggcagaggtgccatttggttcttggaggcctggtgagatcatctccggcaatggacacacctacctggtgagatatgatgaaagtcccgttgactctagcgtggctgttgaaaggatgccaaggaggttgattagacctagccctcctacggatgatcctgtacgctggagtttgggtagtattcttgaggcctttgacagctactcgtggaaggttgctgaggtggtgagagtgcttagaaagaatcaatatctagtcaggctccttgggtcgtcgctggagttgagtgcacatgcatcagatcttcgattgaggaagctttggttagatgacagatggattgtgactcagaagtattccgcaagatgcttggatggtgcattcagaggtcaatctgaagatggaaatttagactgcaacttgagaaaggacagccatattcaacttgagaaccggaatgcttttgagggtgatacatctagaggcatgaagagaaaatcgtctgctatatcaacacatcctcattgcagcgacatcagtaagagattgcaatgcagtgacgccactaagagattctggacactaaatagagatggaaggcacacaaagctggttgatagaggttttttccctttggctgaaaaggtagatgctgttgattccccatgcttaatgctgcgtgggaaatacatgcatgctagtcataaagggcatactagaacaactgaagaatttagtgacacagagagtacctcatcttctgttggtagttctagtcctaatagtaccccccatagatcacagtattataatttggtcaaccaaagtggagatatctgtagtagaactgatggtgatgaagcttttacattcgaaagagaaacatcagaacatggtaacgatggatcgaggggagaaacccatttgctggaattacatgcttatcgtgcgacaatgttagccttgtatgcttgtgggtcaattagctgggagcaagaggctttgttgactaacctaagggccaaggttggaggcttgtaaagcatccttccataggttcttataaatggaggagtctgccacatgttttgcagtgtgataaatgtgacaatatttccattgaacttccattggttaagcagggccaagagtgtggttccagattggtactggttgctggataaaagggtcaaattggattagtttatgatccaaacaaaaaggtgatctgattgttgtgtgaattttcacagaacaagcataatccctcttaggcacccaggatgatgagggagtcaagtcctttcttgaagagcccattcacagcctccgaggctttttcccaccactcaaagaaggatgtggcacctggttgtggtgctaaagaatgcataccaatctttctcaacatcttgtaccagaagagtcttgcaaatacacaccacacaaacaaatgatttattgtttcagcttcctggttacataaaggacatttgcttgggtgattcagatctctcttagccaatctgtcatgtaatgtccaaaggagcttgaccccaagaaaagatccttataagcagcctttgcggtgtatctgccatatgaagcaatgctaaagatatgcttatcctccctattgggctgcagttcaaaatctgagggaacttcctaaagatgaagatagtccatctcctatttgataaggcgtcttggacagttctcttgttaataaatctctttggaattgagccaaacagccgaggagccaaatcagaaactcttttcccatgtagccacttatccatccaaaacatggtgtttgatccatccccaacctcagagatcaaggccctggaaaagaaagcttgagccttgccaggtacctgaataggtaagccagtccaaggacgtccagggtcagtttttttgtaaccaaagccatctgtaccccatgccaccaagcaatgctctactacgatttttgtaaaagcatacaaatgtgccctagttcaggacttgcagctgatttccatgtacacacaaaacgttgggattacatggtctggccttgcatcaaagaatacttgcagatattgtagctgttcttcatgagacttattttggagaattatt

SEQ ID NO: 80276 - DNA, 2956 bp, Zea Mays
ttttttttatataaaccgattgaatttgcttatttccggatttctaaatcatctcccgattcctccgctcgtcaaatcctcgccgtgtccgtgtagcaattccttgcgttggcgaatcatagcagtctcctctctccggcggcaaatcgtcgaactgccacgcctggccccgccgccagcctcctcgtctgaagaagaacggaagacgtcgggctccggtggttctgaacggcaggtagccagtcgcgcttctcacgccggagactcgattggcgttgtatttgcctttccgtttgttgagttctcgaagcaaaacgatcggatgagattcttcaaggggagcaaggtggaggtattgcaggaggcagaggtgccatttggttcttggaggcctggtgagatcatctccggcaatggacacacctacctggtgagatatgatgaaagtcccgttgactctagcgtggctgttgaaaggatgccaaggaggttgattagacctagccctcctacggatgatcctgtacgctggagtttgggtagtattcttgaggcctttgacagctactcgtggaaggttgctgaggtggtgagagtgcttagaaagaatcaatatctagtcaggctccttgggtcgtcgctggagttgagtgcacatgcatcagatcttcgattgaggaagctttggttagatgacagatggattgtgactcagaagtattccgcaagatgcttggatggtgcattcagaggtcaatctgaagatggaaatttagactgcaacttgagaaaggacagccatattcaacttgagaaccggaatgcttttgagggtgatacatctagaggcatgaagagaaaatcgtctgctatatcaacacatcctcattgcagcgacatcagtaagagattgcaatgcagtgacgccactaagagattctggacactaaatagagatggaaggcacacaaagctggttgatagaggttttttccctttggctgaaaaggtagatgctgttgattccccatgcttaatgctgcgtgggaaatacatgcatgctagtcataaagggcatactagaacaactgaagaatttagtgacacagagagtacctcatcttctgttggtagttctagtcctaatagtaccccccatagatcacagtattataatttggtcaaccaaagtggagatatctgtagtagaactgatggtgatgaagcttttacattcgaaagagaaacatcagaacatggtaacgatggatcgaggggagaaacccatttgctggaattacatgcttatcgtgcgacaatgttagccttgtatgcttgtgggtcaattagctgggagcaagaggctttgttgactaacctaaggttaagcagggccaagagtgtggttccagattggtactggttgctggataaaagggtcaaattggattagtttatgatccaaacaaaaaggtgatctgattgttgtgtgaattttcacagaacaagcataatccctcttaggcacccaggatgatgagggagtcaagtcctttcttgaagagcccattcacagcctccgaggctttttcccaccactcaaagaaggatgtggcacctggttgtggtgctaaagaatgcataccaatctttctcaacatcttgtaccagaagagtcttgcaaatacacaccacacaaacaaatgatttattgtttcagcttcctggttacataaaggacatttgcttgggtgattcagatctctcttagccaatctgtcatgtaatgtccaaaggagcttgaccccaagaaaagatccttataagcagcctttgcggtgtatctgccatatgaagcaatgctaaagatatgcttatcctccctattgggctgcagttcaaaatctgagggaacttcctaaagatgaagatagtccatctcctatttgataaggcgtcttggacagttctcttgttaataaatctctttggaattgagccaaacagccgaggagccaaatcagaaactcttttcccatgtagccacttatccatccaaaacatggtgtttgatccatccccaacctcagagatcaaggccctggaaaagaaagcttgagccttgccaggtacctgaataggtaagccagtccaaggacgtccagggtcagtttttttgtaaccaaagccatctgtaccccatgccaccaagcaatgctctactacgatttttgtaaaagcatacaaatgtgccctagttcaggacttgcagctgatttccatgtacacacaaaacgttgggattacatggtctggccttgcatcaaagaatacttgcagaagtgatcgttgtgcagttgaaggaacatgtttgaaatgcaatggataggccatcacatattttcagaagtgaagtggtaggcactggtggttctgatgagcaagcaagcttatgttataggctggcgctccggtcccggtggtgcccatctgctgctgccgccactgacgacaaacaatcgtcgtcagccataatgatggtgcgttatgggcctgagatggctgctgatgctctgggcagtgagcacaggctttgtgcacagcattgataccaaccatgcccgaacagaatggcatcgccagtatctttctgctgccctgcacatgcacagtacactccatcagtactgcaggaatgtgtctgtctggcaacaacatgtgtcaagggtttcgtcattctccagcctcagcctctgcaccaaccagtttaaagattcattaacctctctcggtctacttgcactctaaccgttacagttaaccaaccattggacgagtcctgtagccgaccatcctaattctcggacgtcacggcgtttggccgccggaacacaagcagccaactgcattcattgttgaataattagacaaattccagtttaaattccgaatataa

SEQ ID NO: 80277 - DNA, 879 bp, Zea Mays
aattattcaacataccgttgctactcgatgtcggcactcgcagcactgtgcaccgccgccgcatgcagcgacaaactctcggtcgcgtgctcgccttcccttgttgccgtcctcccttcgtcgtggagagcacgccgccaccctcgatttccttctcttcctctctggtttccctttccctgctcgcggatttcctttcctttcttctctccgccattaacggcaagaacttggaagcttcaaattttgccgtgattttatgatgattcagcaggatttcttcccctctcctctccctataagtagggtggcagctcgcccttttctcccctcagccggacgcactggctccgcccgaacgtgcacacagccacctcgccattgtttctgtccgcgatcgttcttcgcgcgccacgacgtctcgcagccgtcaccgaaggcctcgctgagcagcacctgtctccttctccgtgttgagcttcctattcgagcgtgcctctactcgctcattgccgttgacgccgagcactcgttgaggctgtgaccgccctgccagcaatcccatgccgcgactctcttacagtctgcagaagtctgtatcatgttctgtttctagcattcaaagttagaaggtggaggattttgcaaactaacccctctcaggctgaggacacaacctttaagaatcaagatcatattttgacagcgagaccatcacaattaggtgtcaccacaattttgctttagacgaagagatgcattaggcaatcatgccaatatgttaattcataaagaactcgtgcaaaaattatttgaatagtattccaggctggaaagtataaactgctatgctttaatagaataatatttcaaaggaaa

SEQ ID NO: 80278 - DNA, 3341 bp, Zea Mays
cgattttcatcactctcgccaagcttcaggcttccgcgcaggcgagctgctgctgctgctgctgccgccgccgccgccttgtcgggtaacgagcgacctcgacgtcggacgtctcaagtggtcacatgctcgaggtcctggacatggcgccgccgccaccaccgccgccgccgccgccgcatgcgcggcaccatcagggggcagccaagggcggccacgcggagcggaggaagcaaccgctgcagagcagcgtgacgcagcccaaggcggaaccggcggcggcggcggcggcggccgtgctgccggagggaggcaagaggtgcggaggaggcggcgggaggcgccgcggcgggcgcggccgggccaaggcaccacctggtgagcctcgcgtcgcgctagcgctggcgcctccgccgcgcacggtcattggcccgcccgtgccgagcaaggggctgtcgttctgccgccgccccggattcgggaccgtgggcgcgcgctgcgtcgtcaaggccaaccacttcctcgccgagctcccggacaaggacctcatccagtatgatgtgaagatcacgccggaggtgagctcgcggaccgtgaaccgggccataatggctgagctggtccgcctctaccgctcgtccgacctggggatgcggctcccggcctacgacggccgcaagaatctctacaccgccgggaccctcccgttcgacgctcgcgagttcgtcgtgcggctcaccgatgaggacgacggcaccggcgtcccgcctcgggagagggagtacagggtcgccatcaagttcgccgcgcgcgccgacctccaccacctcaggcagttcatcgccggacggcaggcggacgcgccgcaggaagccctacaggtactcgacatcgtgctccgcgagctcgccaaccagaggtacgtgtccatagggcggtccttctactcgccggacatcaggaagccgcagcggctcggcgacggcctgcagtcatggtgtgggttctaccagagcatccggccgacccagatgggattgtcactcaacatcggtgagctgtgcgggctggggaatatttcttgccctcatgcatgtgattcctttcttttttgtcctgtggctgccgcttacatggccatgttgacggcagacatgtcgtccacggcgtttattgaacccctgccggtgatcgagttcgtggcccagatattaggaaaggatgtcatatcaaggccattggccgatgctaaccgaatcaagatcaagaaggcattacggggcgtaaaagttgaggtcacgcaccgggggaatgtaaggcgcaagtatcgcatatctgggctcacaacacagccaactcatgaactgattttcccaattgatgaacaaatgaatatgaaatctgtcgtggagtacttcaaggaaatgtatggtttcaccattcagcatcctcatcttccttgccttcaggttggaaaccaaaagaaggcgaactatttaccaatggaggcctgcaagatcgttgaaggccagagatacacgaagaggttgaatgaaaaacagatcacatcgttgctaaaggttacatgccaaaggcctcgagaacaagagatggatattttacagacagttcatcaaaatggatatgagcaagatccatatgcgaaggaatttgggatcaacattagtgagaagctaacctatgttgaagcccgagtccttcctgcaccttggctgaagtatcatgacactggaaaagagaaagagtgcttaccacaggttggtcagtggaacatggtaaacaagaaagtgataaacggatgcaaggtgagccactgggcatgtataaacttctcaaggagtgttccagaagccacagctcggggattttgccaggaattggcacaaatgtgtcaaatttcgggcatggaatttaacagtgagcccgtgatgccaatatattcagctagaccagatcaagtagtgaaggcacttaaaagtgtgtataatattgcactgaacaaactcaagggtaaagaacttgaacttcttctggctatactccccgacaacaatggtccgttatatggtgacatcaaacgtatttgtgaaactgatttgggattgatatcacaatgttgcttaaccaagcatgtttttaagatcagcaaacagtacttggcaaatgtctcactgaaaattaatgttaagatgggaggaagaaacactgtgctcctggacgcaataagttggagcattcctttggtcagtgacatcccaactattatatttggtgcagatgtaacacaccctgaaaccggggaggactcaagtccatcaatcgctgccgttgttgcttctcaagattggccagaagttacaaagtatgctggattggtttgtgctcaggcacaccggcaagagctcattcaggacctttacaaaacatggcacgatcctcagagaggcactgtaacaggcggcatgatcagggagctgttaatatccttcaggaaggccactgggcagaagccattgagaataatattctacagggacggtgttagtgaaggcatgcgcatccctagaaccaaattaccagcctcctgtaacatttgtggtggttcaaaaacgtcatcatacgagactatttacaaacaatcacaaagacagaagtagcatggacaagagtggaaatattttgccaggaactgttgttgattctaagatatgccacccaacagagtttgatttctacctctgtagtcatgctggaatccagggaacaagtaggcccgctcactaccatgtcctctgggatgagaacaatttcacagcagacgaaatgcaaacactgacaaacaacctttgctacacttatgcccggtgcacacgctcggtttctgttgcattccgggcgcggttctacatggaaccagagatgtcggagaaccagacgtcgaagagctccaatggcacgaacggaggcttggtgaagcccctgcctgctgtgaaggagaaggtgaaaagggtgatgttctactgctgacgaggtgaccgctttaacaaccattcacatgctgtagctaacttggtagggttcagtaggggattagattagctttctccaggaacgaagaggaaacgggatgcgtatttggatcatgaacaatcaatctgttagcgatcgctgtaaaatactcggaaatgcctgtataatagttcttgttggttcagatgcatgcatccaatgttccagtgtactatgaaaagggggtgtagaagaaaccttctggtgttttctaggttgaattcaatcaattcattaacatcacgctggag

SEQ ID NO: 80279 - DNA, 1071 bp, Zea Mays
gtttcatctcaccgtggtatgtatctcttcggtttcgggtccggaacactgcatattttattttattttattttatttttctgtggctttctattgggcttttctttctccctccccccgaaccgaatggactggaccacattgtggtagtagctgtttccggcaacaaaacggtgcatttgcactgtgtcctgcagatgggaccggctcacagtctatgctactgccgctcgtatttcgagagcgatgaaacccccatcttgagcctagtgctcgtgtgtgccagcactagtagcggattattctgcacttgttgtcacgatccacgccttaataacattcctgacaccacggagcgagctatcggccaaccacacgaacatgcgcctacgccttttcaatagaaaaatccccatccacccccatggaaagcaccatccgaagccactgtctcgtgcgtgccccgagctcgttttgctcggcttttttttttaccggccgcgccccatcaccatgccatggcggctgccactagtggagctccagcacaatccccgcttctccgacgcctgccacctttggtaaaaacaggaggattcaatttcaatggctgtcgctgccatgtgttttcacaggccctgacctaggctctgagagaggagagagagagagaggaatttaccactcggccgcccccgttcctgtgtcgcccgcgccggacagtcccaagcaggtcaaacctgcgctgctgtgccgctggagagagaggttctaatgctcttctgtcccgcgccgcattaatttcgcgattttgagaggtctagtactccggtccggtgtagccgtgtaggaggacgcaagggcaaggcaagaccaccctttttcattttctatttttaccgcgcctcgcgtccgtccacagtgcggcaggcttcttggctcgttgctctcgttccgctcggcttctgcgttcgcctttgccgcctcgctgctgctccactgatcacgttataaggcttccgcgcaggcgagctgctgctgctgctgctgccgccgccgccgccttgtcgg

SEQ ID NO: 80280 - DNA, 2959 bp, Zea Mays
atggcgccgccgccaccaccgccgccgccgccgccgcatgcgcggcaccatcagggggcagccaagggcggccacgcggagcggaggaagcaaccgctgcagagcagcgtgacgcagcccaaggcggaaccggcggcggcggcggcggcggccgtgctgccggagggaggcaagaggtgcggaggaggcggcgggaggcgccgcggcgggcgcggccgggccaaggcaccacctggtgagcctcgcgtcgcgctagcgctggcgcctccgccgcgcacggtcattggcccgcccgtgccgagcaaggggctgtcgttctgccgccgccccggattcgggaccgtgggcgcgcgctgcgtcgtcaaggccaaccacttcctcgccgagctcccggacaaggacctcatccagtatgatgtgaagatcacgccggaggtgagctcgcggaccgtgaaccgggccataatggctgagctggtccgcctctaccgctcgtccgacctggggatgcggctcccggcctacgacggccgcaagaatctctacaccgccgggaccctcccgttcgacgctcgcgagttcgtcgtgcggctcaccgatgaggacgacggcaccggcgtcccgcctcgggagagggagtacagggtcgccatcaagttcgccgcgcgcgccgacctccaccacctcaggcagttcatcgccggacggcaggcggacgcgccgcaggaagccctacaggtactcgacatcgtgctccgcgagctcgccaaccagaggtacgtgtccatagggcggtccttctactcgccggacatcaggaagccgcagcggctcggcgacggcctgcagtcatggtgtgggttctaccagagcatccggccgacccagatgggattgtcactcaacatcgtttcccaattgatgaacaaatgaatatgaaatctgtcgtggagtacttcaaggaaatgtatggtttcaccattcagcatcctcatcttccttgccttcaggttggaaaccaaaagaaggcgaactatttaccaatggaggcctgcaagatcgttgaaggccagagatacacgaagaggttgaatgaaaaacagatcacatcgttgctaaaggttacatgccaaaggcctcgagaacaagagatggatattttacagacagttcatcaaaatggatatgagcaagatccatatgcgaaggaatttgggatcaacattagtgagaagctaacctatgttgaagcccgagtccttcctgcaccttggctgaagtatcatgacactggaaaagagaaagagtgcttaccacaggttggtcagtggaacatggtaaacaagaaagtgataaacggatgcaaggtgagccactgggcatgtataaacttctcaaggagtgttccagaagccacagctcggggattttgccaggaattggcacaaatgtgtcaaatttcgggcatggaatttaacagtgagcccgtgatgccaatatattcagctagaccagatcaagtagtgaaggcacttaaaagtgtgtataatattgcactgaacaaactcaagggtaaagaacttgaacttcttctggctatactccccgacaacaatggtccgttatatggtgacatcaaacgtatttgtgaaactgatttgggattgatatcacaatgttgcttaaccaagcatgtttttaagatcagcaaacagtacttggcaaatgtctcactgaaaattaatgttaagatgggaggaagaaacactgtgctcctggacgcaataagttggagcattcctttggtcagtgacatcccaactattatatttggtgcagatgtaacacaccctgaaaccggggaggactcaagtccatcaatcgctgccgttgttgcttctcaagattggccagaagttacaaagtatgctggattggtttgtgctcaggcacaccggcaagagctcattcaggacctttacaaaacatggcacgatcctcagagaggcactgtaacaggcggcatgatcagggagctgttaatatccttcaggaaggccactgggcagaagccattgagaataatattctacagggacggtgttagtgaaggccagttctatcaagttctcctttacgagttagatgccatccgtaaggcatgcgcatccctagaaccaaattaccagcctcctgtaacatttgtggtggttcaaaaacgtcatcatacgagactatttacaaacaatcacaaagacagaagtagcatggacaagagtggaaatattttgccaggaactgttgttgattctaagatatgccacccaacagagtttgatttctacctctgtagtcatgctggaatccagggaacaagtaggcccgctcactaccatgtcctctgggatgagaacaatttcacagcagacgaaatgcaaacactgacaaacaacctttgctacacttatgcccggtgcacacgctcggtttctgttgtccctcctgcatactacgcacacctggcagcattccgggcgcggttctacatggaaccagagatgtcggagaaccagacgtcgaagagctccaatggcacgaacggaggcttggtgaagcccctgcctgctgtgaaggagaaggtgaaaagggtgatgttctactgctgacgaggtgaccgctttaacaaccattcacatgctgtagctaacttggtagggttcagtaggggattagattagctttctccaggaacgaagaggaaacgggatgcgtatttggatcatgaacaatcaatctgttagcgatcgctgtaaaatactcggaaatgcctgtataatagttcttgttggttcagatgcatgcatccaatgttccagtgtactatgaaaagggggtgtagaagaaaccttctggtgttttctaggttgaattcaatcaattcattaacatcacgctggag

SEQ ID NO: 80281 - DNA, 3149 bp, Zea Mays
atggcgccgccgccaccaccgccgccgccgccgccgcatgcgcggcaccatcagggggcagccaagggcggccacgcggagcggaggaagcaaccgctgcagagcagcgtgacgcagcccaaggcggaaccggcggcggcggcggcggcggccgtgctgccggagggaggcaagaggtgcggaggaggcggcgggaggcgccgcggcgggcgcggccgggccaaggcaccacctggtgagcctcgcgtcgcgctagcgctggcgcctccgccgcgcacggtcattggcccgcccgtgccgagcaaggggctgtcgttctgccgccgccccggattcgggaccgtgggcgcgcgctgcgtcgtcaaggccaaccacttcctcgccgagctcccggacaaggacctcatccagtatgatgtgaagatcacgccggaggtgagctcgcggaccgtgaaccgggccataatggctgagctggtccgcctctaccgctcgtccgacctggggatgcggctcccggcctacgacggccgcaagaatctctacaccgccgggaccctcccgttcgacgctcgcgagttcgtcgtgcggctcaccgatgaggacgacggcaccggcgtcccgcctcgggagagggagtacagggtcgccatcaagttcgccgcgcgcgccgacctccaccacctcaggcagttcatcgccggacggcaggcggacgcgccgcaggaagccctacaggtactcgacatcgtgctccgcgagctcgccaaccagaggtacgtgtccatagggcggtccttctactcgccggacatcaggaagccgcagcggctcggcgacggcctgcagtcatggtgtgggttctaccagagcatccggccgacccagatgggattgtcactcaacatcgacatgtcgtccacggcgtttattgaacccctgccggtgatcgagttcgtggcccagatattaggaaaggatgtcatatcaaggccattggccgatgctaaccgaatcaagatcaagaaggcattacggggcgtaaaagttgaggtcacgcaccgggggaatgtaaggcgcaagtatcgcatatctgggctcacaacacagccaactcatgaactgattttcccaattgatgaacaaatgaatatgaaatctgtcgtggagtacttcaaggaaatgtatggtttcaccattcagcatcctcatcttccttgccttcaggttggaaaccaaaagaaggcgaactatttaccaatggaggcctgcaagatcgttgaaggccagagatacacgaagaggttgaatgaaaaacagatcacatcgttgctaaagattattctttattttcagacagttcatcaaaatggatatgagcaagatccatatgcgaaggaatttgggatcaacattagtgagaagctaacctatgttgaagcccgagtccttcctgcaccttggctgaagtatcatgacactggaaaagagaaagagtgcttaccacaggttggtcagtggaacatggtaaacaagaaagtgataaacggatgcaaggtgagccactgggcatgtataaacttctcaaggagtgttccagaagccacagctcggggattttgccaggaattggcacaaatgtgtcaaatttcgggcatggaatttaacagtgagcccgtgatgccaatatattcagctagaccagatcaagtagtgaaggcacttaaaagtgtgtataatattgcactgaacaaactcaagggtaaagaacttgaacttcttctggctatactccccgacaacaatggtccgttatatggtgacatcaaacgtatttgtgaaactgatttgggattgatatcacaatgttgcttaaccaagcatgtttttaagatcagcaaacagtacttggcaaatgtctcactgaaaattaatgttaagatgggaggaagaaacactgtgctcctggacgcaataagttggagcattcctttggtcagtgacatcccaactattatatttggtgcagatgtaacacaccctgaaaccggggaggactcaagtccatcaatcgctgccgttgttgcttctcaagattggccagaagttacaaagtatgctggattggtttgtgctcaggcacaccggcaagagctcattcaggacctttacaaaacatggcacgatcctcagagaggcactgtaacaggcggcatgatcagggagctgttaatatccttcaggaaggccactgggcagaagccattgagaataatattctacagggacggtgttagtgaaggccagttctatcaagttctcctttacgagttagatgccatccgtaaggcatgcgcatccctagaaccaaattaccagcctcctgtaacatttgtggtggttcaaaaacgtcatcatacgagactatttacaaacaatcacaaagacagaagtagcatggacaagagtggaaatattttgccaggaactgttgttgattctaagatatgccacccaacagagtttgatttctacctctgtagtcatgctggaatccagggaacaagtaggcccgctcactaccatgtcctctgggatgagaacaatttcacagcagacgaaatgcaaacactgacaaacaacctttgctacacttatgcccggtgcacacgctcggtttctgttgtccctcctgcatactacgcacacctggcagcattccgggcgcggttctacatggaaccagagatgtcggagaaccagacgtcgaagagctccaatggcacgaacggaggcttggtgaagcccctgcctgctgtgaaggagaaggtgaaaagggtgatgttctactgctgacgaggtgaccgctttaacaaccattcacatgctgtagctaacttggtagggttcagtaggggattagattagctttctccaggaacgaagaggaaacgggatgcgtatttggatcatgaacaatcaatctgttagcgatcgctgtaaaatactcggaaatgcctgtataatagttcttgttggttcagatgcatgcatccaatgttccagtgtactatgaaaagggggtgtagaagaaaccttctggtgttttctaggttgaattcaatcaattcattaacatcacgctggag

SEQ ID NO: 80282 - DNA, 3176 bp, Zea Mays
atggcgccgccgccaccaccgccgccgccgccgccgcatgcgcggcaccatcagggggcagccaagggcggccacgcggagcggaggaagcaaccgctgcagagcagcgtgacgcagcccaaggcggaaccggcggcggcggcggcggcggccgtgctgccggagggaggcaagaggtgcggaggaggcggcgggaggcgccgcggcgggcgcggccgggccaaggcaccacctggtgagcctcgcgtcgcgctagcgctggcgcctccgccgcgcacggtcattggcccgcccgtgccgagcaaggggctgtcgttctgccgccgccccggattcgggaccgtgggcgcgcgctgcgtcgtcaaggccaaccacttcctcgccgagctcccggacaaggacctcatccagtatgatgtgaagatcacgccggaggtgagctcgcggaccgtgaaccgggccataatggctgagctggtccgcctctaccgctcgtccgacctggggatgcggctcccggcctacgacggccgcaagaatctctacaccgccgggaccctcccgttcgacgctcgcgagttcgtcgtgcggctcaccgatgaggacgacggcaccggcgtcccgcctcgggagagggagtacagggtcgccatcaagttcgccgcgcgcgccgacctccaccacctcaggcagttcatcgccggacggcaggcggacgcgccgcaggaagccctacaggtactcgacatcgtgctccgcgagctcgccaaccagaggtacgtgtccatagggcggtccttctactcgccggacatcaggaagccgcagcggctcggcgacggcctgcagtcatggtgtgggttctaccagagcatccggccgacccagatgggattgtcactcaacatcgacatgtcgtccacggcgtttattgaacccctgccggtgatcgagttcgtggcccagatattaggaaaggatgtcatatcaaggccattggccgatgctaaccgaatcaagatcaagaaggcattacggggcgtaaaagttgaggtcacgcaccgggggaatgtaaggcgcaagtatcgcatatctgggctcacaacacagccaactcatgaactgattttcccaattgatgaacaaatgaatatgaaatctgtcgtggagtacttcaaggaaatgtatggtttcaccattcagcatcctcatcttccttgccttcaggttggaaaccaaaagaaggcgaactatttaccaatggaggcctgcaagatcgttgaaggccagagatacacgaagaggttgaatgaaaaacagatcacatcgttgctaaaggttacatgccaaaggcctcgagaacaagagatggatattttacagacagttcatcaaaatggatatgagcaagatccatatgcgaaggaatttgggatcaacattagtgagaagctaacctatgttgaagcccgagtccttcctgcaccttggctgaagtatcatgacactggaaaagagaaagagtgcttaccacaggttggtcagtggaacatggtaaacaagaaagtgataaacggatgcaaggtgagccactgggcatgtataaacttctcaaggagtgttccagaagccacagctcggggattttgccaggaattggcacaaatgtgtcaaatttcgggcatggaatttaacagtgagcccgtgatgccaatatattcagctagaccagatcaagtagtgaaggcacttaaaagtgtgtataatattgcactgaacaaactcaagggtaaagaacttgaacttcttctggctatactccccgacaacaatggtccgttatatggtgacatcaaacgtatttgtgaaactgatttgggattgatatcacaatgttgcttaaccaagcatgtttttaagatcagcaaacagtacttggcaaatgtctcactgaaaattaatgttaagatgggaggaagaaacactgtgctcctggacgcaataagttggagcattcctttggtcagtgacatcccaactattatatttggtgcagatgtaacacaccctgaaaccggggaggactcaagtccatcaatcgctgccgttgttgcttctcaagattggccagaagttacaaagtatgctggattggtttgtgctcaggcacaccggcaagagctcattcaggacctttacaaaacatggcacgatcctcagagaggcactgtaacaggcggcatgatcagggagctgttaatatccttcaggaaggccactgggcagaagccattgagaataatattctacagggacggtgttagtgaaggccagttctatcaagttctcctttacgagttagatgccatccgtaaggcatgcgcatccctagaaccaaattaccagcctcctgtaacatttgtggtggttcaaaaacgtcatcatacgagactatttacaaacaatcacaaagacagaagtagcatggacaagagtggaaatattttgccaggaactgttgttgattctaagatatgccacccaacagagtttgatttctacctctgtagtcatgctggaatccagggaacaagtaggcccgctcactaccatgtcctctgggatgagaacaatttcacagcagacgaaatgcaaacactgacaaacaacctttgctacacttatgcccggtgcacacgctcggtttctgttgtccctcctgcatactacgcacacctggcagcattccgggcgcggttctacatggaaccagagatgtcggagaaccagacgtcgaagagctccaatggcacgaacggaggcttggtgaagcccctgcctgctgtgaaggagaaggtgaaaagggtgatgttctactgctgacgaggtgaccgctttaacaaccattcacatgctgtagctaacttggtagggttcagtaggggattagattagctttctccaggaacgaagaggaaacgggatgcgtatttggatcatgaacaatcaatctgttagcgatcgctgtaaaatactcggaaatgcctgtataatagttcttgttggttcagatgcatgcatccaatgttccagtgtactatgaaaagggggtgtagaagaaaccttctggtgttttctaggttgaattcaatcaattcattaacatcacgctggag

SEQ ID NO: 80283 - DNA, 2277 bp, Zea Mays
cccaggagaccaggctggactgctctctgctggtgcgttcgctccccgttgactgccactctccttgcgtgcactatcgtcccggcgacgactccgctgccgtcgccgcctacgccaggttccgaagtcttcgtgagccccttctcctacaacgagcactcacaccaatcaccagtgatttattgcgcatgaggactgcatctccccttgaaatttgaggctttggaaaactgctgaatggagtattcctcaagtgaagacgagggattggttggagattttatcgacgctgaggataatacgttcactaagaatattgaccaaggaactggcgtgatggcttcccagatccatggtgatgatccctcggtgggatccatgccacctgttattggaaatgagctgctgatggcagctgatgtattggccaaaaatgacgaacctcgtatgggcatggaattcgactctgatgctgctgctcgcgcattctacaatgcatatgctttatgctttgggtttgggattcgtgttgcccgatcccgtagtgagcgaagaaagggcgtcgaggtgctcgtcatgaagcgttttgtgtgcttgaaagagggacatcacaggaagaagaagccagttgagcctagcaataagaaaaagaggaaacgactctctatacgggatgggtgcccagcaatgatggaggtggtgcgtaggggcccagataggtgggtcatcacgaagttggtgctggagcacacccatgttattgttagtgcagaccgggcacgggaggtccaactccatcgcctctctggaaagtttcaggaacatgagaaccagttgcaggaggacggaatcttcatacggctggatttttgagacgtggttgacagcaatggataatggcgcatcttgtctagatgcaagaagagactgactgatgcccgcacaaggtttcctgggttacatgaggagctcaagagatgtgtcaatgggtgtgataccgcggttatttttgacatgctctggggctccattcttgacaagtatggcctgagagacgataattggctgcagtcactgtatgaaattaggcacaaatgggttcctgcatacctaaccagcttcttcttcgctgagctttccttaactcacagagtagaaacagtcatttctgaaaaccgacatggtcttggaaaaacaagcgaggagtatctacaccagagctgcatttgaaacattccagctggaattggttgaagcaatgcaacattatgccgtcaaggttcaggatggatcatacatgaaatactacgtcgaaagaaacggtgatcctcctaccaggcacaccgttttctacaacgttgctgagaagaaggcatggtgcgagtgctgcagattcgctttctcggcgatactgtgcaggcatgtccttagtgtgttcctcttggccggtgtcatcatgcttccagagccttgcatcacaaagcgatggacaaagaaggctaagtcagggcctgaactcatcgggcttaacgttggaaatggaagtagcagtccagattctgtggcatcaagatataatgatctcgttcgtgatgcgatcaagtgtgcagagaagggaactgtatcggccggcgccttcagagttgcaaaggaagtgctgcgcaaagccttcatggatatcaggggtcacggggagaaactgtgcaaggatgctctgcgctctgcatcaagccgatagcagcgattcgttattttagagggcatttgagagattaacctgctatctttgccgctaaatttgttgagcgaacacgaggaacttcaagtgcttgcgacagtgacttaagccgcatgtcaggttgtcatgaaaaatccagatttgctaatcgagacatgtttagtcttgtttgctgaatcgttcctttttctaagtctctgatcagcagaccgtatatatagttctggaaaacactattttgtactctagattgtacgaaagcaaaatttgaaataggaagtaagatagaagatgagatgaaaatgagcaagaataataagagcctccaaacaggctaggtataggggagagatgaggagaggaaagaggtttacagtcggtttagacaaaaaaaaattaagaagccatgtgagaaagacaagtggagtcatgtattaatagtgaagagctaaatattatacaaatgagctaaatggtagactgcaactgtccttgccatcaatggtcggctatattattaaacttactctgacaacccg

SEQ ID NO: 80284 - DNA, 2310 bp, Zea Mays
cccaggagaccaggctggactgctctctgctggtgcgttcgctccccgttgactgccactctccttgcgtgcactatcgtcccggcgacgactccgctgccgtcgccgcctacgccaggttccgaagtcttcgtgagccccttctcctacaacgagcactcacaccaatcaccagtgatttattgcgcatgaggactgcatctccccttgaaatttgaggctttggaaaactgctgaatggagtattcctcaagtgaagacgagggattggttggagattttatcgacgctgaggataatacgttcactaagaatattgaccaaggaactggcgtgatggcttcccagatccatggtgatgatccctcggtgggatccatgccacctgttattggaaatgagctgctgatggcagctgatgtattggccaaaaatgacgaacctcgtatgggcatggaattcgactctgatgctgctgctcgcgcattctacaatgcatatgctttatgctttgggtttgggattcgtgttgcccgatcccgtagtgagcgaagaaagggcgtcgaggtgctcgtcatgaagcgttttgtgtgcttgaaagagggacatcacaggaagaagaagccagttgagcctagcaataagaaaaagaggaaacgactctctatacgggatgggtgcccagcaatgatggaggtggtgcgtaggggcccagataggtgggtcatcacgaagttggtgctggagcacacccatgttattgttagtgcagaccgggcacgggaggtccaactccatcgcctctctggaaagtttcaggaacatgagaaccagttgcaggaggacggaatcttcatacggctggatttttgagacgtggttgacagcaatggatagtaggttgccattttccttgactaccgatgaagatggcgcatcttgtctagatgcaagaagagactgactgatgcccgcacaaggtttcctgggttacatgaggagctcaagagatgtgtcaatgggtgtgataccgcggttatttttgacatgctctggggctccattcttgacaagtatggcctgagagacgataattggctgcagtcactgtatgaaattaggcacaaatgggttcctgcatacctaaccagcttcttcttcgctgagctttccttaactcacagagtagaaacagtcatttctgaaaaccgacatggtcttggaaaaacaagcgaggagtatctacaccagagctgcatttgaaacattccagctggaattggttgaagcaatgcaacattatgccgtcaaggttcaggatggatcatacatgaaatactacgtcgaaagaaacggtgatcctcctaccaggcacaccgttttctacaacgttgctgagaagaaggcatggtgcgagtgctgcagattcgctttctcggcgatactgtgcaggcatgtccttagtgtgttcctcttggccggtgtcatcatgcttccagagccttgcatcacaaagcgatggacaaagaaggctaagtcagggcctgaactcatcgggcttaacgttggaaatggaagtagcagtccagattctgtggcatcaagatataatgatctcgttcgtgatgcgatcaagtgtgcagagaagggaactgtatcggccggcgccttcagagttgcaaaggaagtgctgcgcaaagccttcatggatatcaggggtcacggggagaaactgtgcaaggatgctctgcgctctgcatcaagccgatagcagcgattcgttattttagagggcatttgagagattaacctgctatctttgccgctaaatttgttgagcgaacacgaggaacttcaagtgcttgcgacagtgacttaagccgcatgtcaggttgtcatgaaaaatccagatttgctaatcgagacatgtttagtcttgtttgctgaatcgttcctttttctaagtctctgatcagcagaccgtatatatagttctggaaaacactattttgtactctagattgtacgaaagcaaaatttgaaataggaagtaagatagaagatgagatgaaaatgagcaagaataataagagcctccaaacaggctaggtataggggagagatgaggagaggaaagaggtttacagtcggtttagacaaaaaaaaattaagaagccatgtgagaaagacaagtggagtcatgtattaatagtgaagagctaaatattatacaaatgagctaaatggtagactgcaactgtccttgccatcaatggtcggctatattattaaacttactctgacaacccg

SEQ ID NO: 80285 - DNA, 2570 bp, Zea Mays
aggagaccaggctggactgctctctgctggtgcgttcgctccccgttgactgccactctccttgcgtgcactatcgtcccggcgacgactccgctgccgtcgccgcctacgccaggttccgaagtcttcgtgagccccttctcctacaacgagcactcacaccaatcaccagtgatttattgcgcatgaggactgcatctccccttgaaatttgaggctttggaaaactgctgaatggagtattcctcaagtgaagacgagggattggttggagattttatcgacgctgaggataatacgttcactaagaatattgaccaaggaactggcgtgatggcttcccagatccatggtgatgatccctcggtgggatccatgccacctgttattggaaatgagctgctgatggcagctgatgtattggccaaaaatgacgaacctcgtatgggcatggaattcgactctgatgctgctgctcgcgcattctacaatgcatatgctttatgctttgggtttgggattcgtgttgcccgatcccgtagtgagcgaagaaagggcgtcgaggtgctcgtcatgaagcgttttgtgtgcttgaaagagggacatcacaggaagaagaagccagttgagcctagcaataagaaaaagaggaaacgactctctatacgggatgggtgcccagcaatgatggaggtggtgcgtaggggcccagataggtgggtcatcacgaagttggtgctggagcacacccatgttattgttagtgcagaccgggcacgggaggtccaactccatcgcctctctggaaagtttcaggaacatgagaaccagttgcaggaggtgcgaaggaacgtgtttggagatacgaatgcgcaagggctctttaattacttcaagaaaatgcaatcagataattctagttttttcttttctatacaagttgacagtaaaaactatgtgagcaatgcagtttgggttgatgcaagagctagaatggcatacacgtactttggggatgctgtttactttgacactacttgtagtcaaaatgagaacatgctgccctttgcagctttcacaggagttaatcaccatggtgacactgttgtttttggctgtgccttaattttggacaggacggaatcttcatacggctggatttttgagacgtggttgacagcaatggataatggcgcatcttgtctagatgcaagaagagactgactgatgcccgcacaaggtttcctgggttacatgaggagctcaagagatgtgtcaatgggtgtgataccgcggttatttttgacatgctctggggctccattcttgacaagtatggcctgagagacgataattggctgcagtcactgtatgaaattaggcacaaatgggttcctgcatacctaaccagcttcttcttcgctgagctttccttaactcacagagtagaaacagtcatttctgaaaaccgacatggtcttggaaaaacaagcgaggagtatctacaccagagctgcatttgaaacattccagctggaattggttgaagcaatgcaacattatgccgtcaaggttcaggatggatcatacatgaaatactacgtcgaaagaaacggtgatcctcctaccaggcacaccgttttctacaacgttgctgagaagaaggcatggtgcgagtgctgcagattcgctttctcggcgatactgtgcaggcatgtccttagtgtgttcctcttggccggtgtcatcatgcttccagagccttgcatcacaaagcgatggacaaagaaggctaagtcagggcctgaactcatcgggcttaacgttggaaatggaagtagcagtccagattctgtggcatcaagatataatgatctcgttcgtgatgcgatcaagtgtgcagagaagggaactgtatcggccggcgccttcagagttgcaaaggaagtgctgcgcaaagccttcatggatatcaggggtcacggggagaaactgtgcaaggatgctctgcgctctgcatcaagccgatagcagcgattcgttattttagagggcatttgagagattaacctgctatctttgccgctaaatttgttgagcgaacacgaggaacttcaagtgcttgcgacagtgacttaagccgcatgtcaggttgtcatgaaaaatccagatttgctaatcgagacatgtttagtcttgtttgctgaatcgttcctttttctaagtctctgatcagcagaccgtatatatagttctggaaaacactattttgtactctagattgtacgaaagcaaaatttgaaataggaagtaagatagaagatgagatgaaaatgagcaagaataataagagcctccaaacaggctaggtataggggagagatgaggagaggaaagaggtttacagtcggtttagacaaaaaaaaattaagaagccatgtgagaaagacaagtggagtcatgtattaatagtgaagagctaaatattatacaaatgagctaaatggtagactgcaactgtccttgccatcaatggtcggctatattattaaacttactctgacaacccg

SEQ ID NO: 80286 - DNA, 2603 bp, Zea Mays
aggagaccaggctggactgctctctgctggtgcgttcgctccccgttgactgccactctccttgcgtgcactatcgtcccggcgacgactccgctgccgtcgccgcctacgccaggttccgaagtcttcgtgagccccttctcctacaacgagcactcacaccaatcaccagtgatttattgcgcatgaggactgcatctccccttgaaatttgaggctttggaaaactgctgaatggagtattcctcaagtgaagacgagggattggttggagattttatcgacgctgaggataatacgttcactaagaatattgaccaaggaactggcgtgatggcttcccagatccatggtgatgatccctcggtgggatccatgccacctgttattggaaatgagctgctgatggcagctgatgtattggccaaaaatgacgaacctcgtatgggcatggaattcgactctgatgctgctgctcgcgcattctacaatgcatatgctttatgctttgggtttgggattcgtgttgcccgatcccgtagtgagcgaagaaagggcgtcgaggtgctcgtcatgaagcgttttgtgtgcttgaaagagggacatcacaggaagaagaagccagttgagcctagcaataagaaaaagaggaaacgactctctatacgggatgggtgcccagcaatgatggaggtggtgcgtaggggcccagataggtgggtcatcacgaagttggtgctggagcacacccatgttattgttagtgcagaccgggcacgggaggtccaactccatcgcctctctggaaagtttcaggaacatgagaaccagttgcaggaggtgcgaaggaacgtgtttggagatacgaatgcgcaagggctctttaattacttcaagaaaatgcaatcagataattctagttttttcttttctatacaagttgacagtaaaaactatgtgagcaatgcagtttgggttgatgcaagagctagaatggcatacacgtactttggggatgctgtttactttgacactacttgtagtcaaaatgagaacatgctgccctttgcagctttcacaggagttaatcaccatggtgacactgttgtttttggctgtgccttaattttggacaggacggaatcttcatacggctggatttttgagacgtggttgacagcaatggatagtaggttgccattttccttgactaccgatgaagatggcgcatcttgtctagatgcaagaagagactgactgatgcccgcacaaggtttcctgggttacatgaggagctcaagagatgtgtcaatgggtgtgataccgcggttatttttgacatgctctggggctccattcttgacaagtatggcctgagagacgataattggctgcagtcactgtatgaaattaggcacaaatgggttcctgcatacctaaccagcttcttcttcgctgagctttccttaactcacagagtagaaacagtcatttctgaaaaccgacatggtcttggaaaaacaagcgaggagtatctacaccagagctgcatttgaaacattccagctggaattggttgaagcaatgcaacattatgccgtcaaggttcaggatggatcatacatgaaatactacgtcgaaagaaacggtgatcctcctaccaggcacaccgttttctacaacgttgctgagaagaaggcatggtgcgagtgctgcagattcgctttctcggcgatactgtgcaggcatgtccttagtgtgttcctcttggccggtgtcatcatgcttccagagccttgcatcacaaagcgatggacaaagaaggctaagtcagggcctgaactcatcgggcttaacgttggaaatggaagtagcagtccagattctgtggcatcaagatataatgatctcgttcgtgatgcgatcaagtgtgcagagaagggaactgtatcggccggcgccttcagagttgcaaaggaagtgctgcgcaaagccttcatggatatcaggggtcacggggagaaactgtgcaaggatgctctgcgctctgcatcaagccgatagcagcgattcgttattttagagggcatttgagagattaacctgctatctttgccgctaaatttgttgagcgaacacgaggaacttcaagtgcttgcgacagtgacttaagccgcatgtcaggttgtcatgaaaaatccagatttgctaatcgagacatgtttagtcttgtttgctgaatcgttcctttttctaagtctctgatcagcagaccgtatatatagttctggaaaacactattttgtactctagattgtacgaaagcaaaatttgaaataggaagtaagatagaagatgagatgaaaatgagcaagaataataagagcctccaaacaggctaggtataggggagagatgaggagaggaaagaggtttacagtcggtttagacaaaaaaaaattaagaagccatgtgagaaagacaagtggagtcatgtattaatagtgaagagctaaatattatacaaatgagctaaatggtagactgcaactgtccttgccatcaatggtcggctatattattaaacttactctgacaacccg

SEQ ID NO: 80287 - DNA, 2566 bp, Zea Mays
aggagaccaggctggactgctctctgctggtgcgttcgctccccgttgactgccactctccttgcgtgcactatcgtcccggcgacgactccgctgccgtcgccgcctacgccaggttccgaagtcttcgtgagccccttctcctacaacgagcactcacaccaatcaccagtgatttattgcgcatgaggactgcatctccccttgaaatttgaggctttggaaaactgctgaatggagtattcctcaagtgaagacgagggattggttggagattttatcgacgctgaggataatacgttcactaagaatattgaccaaggaactggcgtgatggcttcccagatccatggtgatgatccctcggtgggatccatgccacctgttattggaaatgagctgctgatggcagctgatgtattggccaaaaatgacgaacctcgtatgggcatggaattcgactctgatgctgctgctcgcgcattctacaatgcatatgctttatgctttgggtttgggattcgtgttgcccgatcccgtagtgagcgaagaaagggcgtcgaggtgctcgtcatgaagcgttttgtgtgcttgaaagagggacatcacaggaagaagaagccagttgagcctagcaataagaaaaagaggaaacgactctctatacgggatgggtgcccagcaatgatggaggtggtgcgtaggggcccagataggtgggtcatcacgaagttggtgctggagcacacccatgttattgttagtgcagaccgggcacgggaggtccaactccatcgcctctctggaaagtttcaggaacatgagaaccagttgcaggaggtgcgaaggaacgtgtttggagatacgaatgcgcaagggctctttaattacttcaagaaaatgcaatcagataattctagttttttcttttctatacaagttgacagtaaaaactatgtgagcaatgcagtttgggttgatgcaagagctagaatggcatacacgtactttggggatgctgtttactttgacactacttgtagtcaaaatgagaacatgctgccctttgcagctttcacaggagttaatcaccatggtgacactgttgtttttggctgtgccttaattttggacaggacggaatcttcatacggctggatttttgagacgtggttgacagcaatggataatggcgcatcttgtctagatgcaagaagagactgactgatgcccgcacaaggtttcctgggttacatgaggagctcaagagatgtgtcaatgggtgtgataccgcggttatttttgacatgctctggggctccattcttgacaagtatggcctgagagacgataattggctgcagtcactgtatgaaattaggcacaaatgggttcctgcatacctaaccagcttcttcttcgctgagctttccttaactcacagagtagaaacatttctgaaaaccgacatggtcttggaaaaacaagcgaggagtatctacaccagagctgcatttgaaacattccagctggaattggttgaagcaatgcaacattatgccgtcaaggttcaggatggatcatacatgaaatactacgtcgaaagaaacggtgatcctcctaccaggcacaccgttttctacaacgttgctgagaagaaggcatggtgcgagtgctgcagattcgctttctcggcgatactgtgcaggcatgtccttagtgtgttcctcttggccggtgtcatcatgcttccagagccttgcatcacaaagcgatggacaaagaaggctaagtcagggcctgaactcatcgggcttaacgttggaaatggaagtagcagtccagattctgtggcatcaagatataatgatctcgttcgtgatgcgatcaagtgtgcagagaagggaactgtatcggccggcgccttcagagttgcaaaggaagtgctgcgcaaagccttcatggatatcaggggtcacggggagaaactgtgcaaggatgctctgcgctctgcatcaagccgatagcagcgattcgttattttagagggcatttgagagattaacctgctatctttgccgctaaatttgttgagcgaacacgaggaacttcaagtgcttgcgacagtgacttaagccgcatgtcaggttgtcatgaaaaatccagatttgctaatcgagacatgtttagtcttgtttgctgaatcgttcctttttctaagtctctgatcagcagaccgtatatatagttctggaaaacactattttgtactctagattgtacgaaagcaaaatttgaaataggaagtaagatagaagatgagatgaaaatgagcaagaataataagagcctccaaacaggctaggtataggggagagatgaggagaggaaagaggtttacagtcggtttagacaaaaaaaaattaagaagccatgtgagaaagacaagtggagtcatgtattaatagtgaagagctaaatattatacaaatgagctaaatggtagactgcaactgtccttgccatcaatggtcggctatattattaaacttactctgacaacccg

SEQ ID NO: 80288 - DNA, 2230 bp, Zea Mays
ggactgctctctgctggtgcgttcgctccccgttgactgccactctccttgcgtgcactatcgtcccggcgacgactccgctgccgtcgccgcctacgccaggttccgaagtcttcgtgagccccttctcctacaacgagcactcacaccaatcaccagtgatttattgcgcatgaggactgcatctccccttgaaatttgaggctttggaaaactgctgaatggagtattcctcaagtgaagacgagggattggttggagattttatcgacgctgaggataatacgttcactaagaatattgaccaaggaactggcgtgatggcttcccagatccatggtgatgatccctcggtgggatccatgccacctgttattggaaatgagctgctgatggcagctgatgtattggccaaaaatgacgaacctcgtatgggcatggaattcgactctgatgctgctgctcgcgcattctacaatgcatatgctttatgctttgggtttgggattcgtgttgcccgatcccgtagtgagcgaagaaagggcgtcgaggtgctcgtcatgaagcgttttgtgtgcttgaaagagggacatcacaggaagaagaagccagttgagcctagcaataagaaaaagaggaaacgactctctatacgggatgggtgcccagcaatgatggaggtggtgcgtaggggcccagataggtgggtcatcacgaagttggtgctggagcacacccatgttattgttagtgcagaccgggcacgggaggtccaactccatcgcctctctggaaagtttcaggaacatgagaaccagttgcaggaggacggaatcttcatacggctggatttttgagacgtggttgacagcaatggatagtaggttgccattttccttgactaccgatgaaggtaagggaatagcagctgctgttgcaaaagtatttcctcagtgtttccatcgtctttgcagatggcgcatcttgtctagatgcaagaagagactgactgatgcccgcacaaggtttcctgggttacatgaggagctcaagagatgtgtcaatgggtgtgataccgcggttatttttgacatgctctggggctccattcttgacaatttctgaaaaccgacatggtcttggaaaaacaagcgaggagtatctacaccagagctgcatttgaaacattccagctggaattggttgaagcaatgcaacattatgccgtcaaggttcaggatggatcatacatgaaatactacgtcgaaagaaacggtgatcctcctaccaggcacaccgttttctacaacgttgctgagaagaaggcatggtgcgagtgctgcagattcgctttctcggcgatactgtgcaggcatgtccttagtgtgttcctcttggccggtgtcatcatgcttccagagccttgcatcacaaagcgatggacaaagaaggctaagtcagggcctgaactcatcgggcttaacgttggaaatggaagtagcagtccagattctgtggcatcaagatataatgatctcgttcgtgatgcgatcaagtgtgcagagaagggaactgtatcggccggcgccttcagagttgcaaaggaagtgctgcgcaaagccttcatggatatcaggggtcacggggagaaactgtgcaaggatgctctgcgctctgcatcaagccgatagcagcgattcgttattttagagggcatttgagagattaacctgctatctttgccgctaaatttgttgagcgaacacgaggaacttcaagtgcttgcgacagtgacttaagccgcatgtcaggttgtcatgaaaaatccagatttgctaatcgagacatgtttagtcttgtttgctgaatcgttcctttttctaagtctctgatcagcagaccgtatatatagttctggaaaacactattttgtactctagattgtacgaaagcaaaatttgaaataggaagtaagatagaagatgagatgaaaatgagcaagaataataagagcctccaaacaggctaggtataggggagagatgaggagaggaaagaggtttacagtcggtttagacaaaaaaaaattaagaagccatgtgagaaagacaagtggagtcatgtattaatagtgaagagctaaatattatacaaatgagctaaatggtagactgcaactgtccttgccatcaatggtcggctatattattaaacttactctgacaacccg

SEQ ID NO: 80289 - DNA, 2641 bp, Zea Mays
cagtaatcttctggtccaaatgttaacacgcgcgcaattgtaaaagaaatatatgtctatatagtaaaacgcgaagagagagatacttctgcggaaacgaatggcagcagcaatggccaacaccacatgcctccgctcccgcctcctcgtcctcccaccgccaccggcgccccgcaccgtcgtgtcctttcgtctccgcccatgcgctactacgatctcctcgtcctcccgaaagaggagaccccgtctcgcggcacgggcggcgccgcccggcggcgctgtggccccggcgtcggccgcgtcgaaggaggatgaccagggggagatgggcagcggcgggggcctctctgcggatgatgcagagaggctgtgtcagtttctgcgggccgacctgccgcacctgttcgacgacgtcggcatcgaccggtccgcgtacgatgaccgcgtgcggttccgcgaccctatcacccgccacgacaccatcgacggctacctcttcaacatccgcctcctcaagctcctcttccgccccgacttctacctccacgccgtcaagcagacagggccgtacgagctcaccacgaggtggaccatggtgatgaagtttatgctccttccctggaagccggagctggtcttcactggcctgtcgatcatgggcgtcaacccgaagaatctcaagttcaacagccatgtggatctttgggattcgatacaaaacaacgagtacttctcttctgaaggactatgggatgttttcaaacagctacggatttacaagacccctgacatagaaacaccaaattaccttattctaaagaggactgcacattatgaggttaggagttatgcgccattcttagtggttgaagcaaaaggtgataaactgacaggatcgtcgggcttcaacaatgtaaccggatgtatccatccagatagttctgccaatgaacaaagacttggacagtttaccagctccaaatacagcagttactttgcggaaggtagaaggaggcattgctgcagtgaaaaaattcagtggacgaccaaaagaagaaattgtgctccagaaggagaaggatctgcgctcccagttacttaacgatggattgaagcctcatccaggctgtttgcttgcacgttacaatgatcccaggacaaagagcttcttaatgaggaacgaggtgcttatacggctaattgacttcacactggagttgtaatcgtcaatactggcatcagatcgatgtaacacactgggcttggagcttccagtgagtcattagaaaggagaaatgttgtagatgtcagatttgctttatgtaaatgtaaactctaaaaggtaataagctacatgctaaaacgacaggtcattttgattcgtttatcgaccaaaaatattgattaaaatataggaaaacattaaaatgaaaatacatgagaagtgcccttttacttatcttctcgtgcttctgcgattggattgggctgtcacgtttacatcctgggtccgctgatctgtttgggcttactttgcctggataatccgactctcaacattgaactcaataaggacaccctgactatgaacgttcagctgaactgactgtgctaaaatctaactagaatttagcgcttgtccacaggtttgtgtgataataagttaataactataaatatacacttcgtcatgcacagtgagaaaacatacacaatggataggccattatgtttagttatgaaatgcagttgcctccttcaattagtgtaatctggccagacgaacagacatgctgtctataattatgaaatgcagttgccacctttcggttgactggccaccaaacgcatcatccgaaacaggtttcagcgctgtcttaactatgtcctggtcagatgctcaaaaaccattgttgcattgcattgtttttcaagcaccacggcgacgagtgcatgcaacttgcaaatccagcacgtgtccatagatgctgaaggttggtgcgcctgtatccctatcaagctgtcctgaccctgcaggcatgcaagccgtacgggcagtagtaggtgagaactgccgatgtctccaaaaccattcattcccttttcgtttgcaatgtgggtaaccgaagatgtttaagaaacttggctgtaaggtaatctaacacttcaaatattacagcccaaaagctcatggttaaggattaaggatgatagtgttactattttcagtctgttgaacaccctttgttgaaaaccatttatggcactggacacgaccggatggtccggcctgcggacggtctgttcgtaggcgcgaacaatctgtgatatgattagatcagacgaattaaactcctacctccacgcttatttatctctctaaacccgtgggagttgttagagaacgcctacgggtctaggcctctcctctttatatatttgaaggggtacaattcattgaagcgaatcaaatcaatatattttccgttcctttactttttgttatagcagtagacagtaacgtagccctctttatctcaatctttacctttcttcaactctacatcgtctggaggcttcttgggtggcctgccgatctcaagacaaaccctaagatctctcctccctgacggggtccctc

SEQ ID NO: 80290 - DNA, 2582 bp, Zea Mays
tctatatagtaaaacgcgaagagagagatacttctgcggaaacgaatggcagcagcaatggccaacaccacatgcctccgctcccgcctcctcgtcctcccaccgccaccggcgccccgcaccgtcgtgtcctttcgtctccgcccatgcgctactacgatctcctcgtcctcccgaaagaggagaccccgtctcgcggcacgggcggcgccgcccggcggcgctgtggccccggcgtcggccgcgtcgaaggaggatgaccagggggagatgggcagcggcgggggcctctctgcggatgatgcagagaggctgtgtcagtttctgcgggccgacctgccgcacctgttcgacgacgtcggcatcgaccggtccgcgtacgatgaccgcgtgcggttccgcgaccctatcacccgccacgacaccatcgacggctacctcttcaacatccgcctcctcaagctcctcttccgccccgacttctacctccacgccgtcaagcagggccgtacgagctcaccacgaggtggaccatggtgatgaagtttatgctccttccctggaagccggagctggtcttcactggcctgtcgatcatgggcgtcaacccgaagaatctcaagttcaacagccatgtggatctttgggattcgatacaaaacaacgagtacttctcttctgaaggactatgggatgttttcaaacagctacggatttacaagacccctgacatagaaacaccaaattaccttattctaaagaggactgcacattatgaggttaggagttatgcgccattcttagtggttgaagcaaaaggtgataaactgacaggatcgtcgggcttcaacaatgtaaccggatgtatccatccagatagttctgccaatgaacaaagacttggacagtttaccagctccaaatacagcagttactttgcggaaggtagaaggaggcattgctgcagtgaaaaaattcagtggacgaccaaaagaagaaattgtgctccagaaggagaaggatctgcgctcccagttacttaacgatggattgaagcctcatccaggctgtttgcttgcacgttacaatgatcccaggacaaagagcttcttaatgaggaacgaggtgcttatacggctaattgacttcacactggagttgtaatcgtcaatactggcatcagatcgatgtaacacactgggcttggagcttccagtgagtcattagaaaggagaaatgttgtagatgtcagatttgctttatgtaaatgtaaactctaaaaggtaataagctacatgctaaaacgacaggtcattttgattcgtttatcgaccaaaaatattgattaaaatataggaaaacattaaaatgaaaatacatgagaagtgcccttttacttatcttctcgtgcttctgcgattggattgggctgtcacgtttacatcctgggtccgctgatctgtttgggcttactttgcctggataatccgactctcaacattgaactcaataaggacaccctgactatgaacgttcagctgaactgactgtgctaaaatctaactagaatttagcgcttgtccacaggtttgtgtgataataagttaataactataaatatacacttcgtcatgcacagtgagaaaacatacacaatggataggccattatgtttagttatgaaatgcagttgcctccttcaattagtgtaatctggccagacgaacagacatgctgtctataattatgaaatgcagttgccacctttcggttgactggccaccaaacgcatcatccgaaacaggtttcagcgctgtcttaactatgtcctggtcagatgctcaaaaaccattgttgcattgcattgtttttcaagcaccacggcgacgagtgcatgcaacttgcaaatccagcacgtgtccatagatgctgaaggttggtgcgcctgtatccctatcaagctgtcctgaccctgcaggcatgcaagccgtacgggcagtagtaggtgagaactgccgatgtctccaaaaccattcattcccttttcgtttgcaatgtgggtaaccgaagatgtttaagaaacttggctgtaaggtaatctaacacttcaaatattacagcccaaaagctcatggttaaggattaaggatgatagtgttactattttcagtctgttgaacaccctttgttgaaaaccatttatggcactggacacgaccggatggtccggcctgcggacggtctgttcgtaggcgcgaacaatctgtgatatgattagatcagacgaattaaactcctacctccacgcttatttatctctctaaacccgtgggagttgttagagaacgcctacgggtctaggcctctcctctttatatatttgaaggggtacaattcattgaagcgaatcaaatcaatatattttccgttcctttactttttgttatagcagtagacagtaacgtagccctctttatctcaatctttacctttcttcaactctacatcgtctggaggcttcttgggtggcctgccgatctcaagacaaaccctaagatctctcctccctgacggggtccctc

SEQ ID NO: 80291 - DNA, 3138 bp, Zea Mays
tctatatagtaaaacgcgaagagagagatacttctgcggaaacgaatggcagcagcaatggccaacaccacatgcctccgctcccgcctcctcgtcctcccaccgccaccggcgccccgcaccgtcgtgtcctttcgtctccgcccatgcgctactacgatctcctcgtcctcccgaaagaggagaccccgtctcgcggcacgggcggcgccgcccggcggcgctgtggccccggcgtcggccgcgtcgaaggaggatgaccagggggagatgggcagcggcgggggcctctctgcggatgatgcagagaggctgtgtcagtttctgcgggccgacctgccgcacctgttcgacgacgtcggcatcgaccggtccgcgtacgatgaccgcgtgcggttccgcgaccctatcacccgccacgacaccatcgacggctacctcttcaacatccgcctcctcaagctcctcttccgccccgacttctacctccacgccgtcaagcagacagggccgtacgagctcaccacgaggtggaccatggtgatgaagtttatgctccttccctggaagccggagctggtcttcactggcctgtcgatcatgggcgtcaacccgaagaatctcaagttcaacagccatgtgtgcaggatctttgggattcgatacaaaacaacgagtacttctcttctgaaggactatgggatgttttcaaacagctacggatttacaagacccctgacatagaaacaccaaattaccttattctaaagaggactgcacattatgaggttaggagttatgcgccattcttagtggttgaagcaaaaggtgataaactgacaggatcgtcgggcttcaacaatgtaaccggatgtatccatccagatagttctgccaatgaacaaagacttggacagtttaccagctccaaatacagcagttactttgcggaaggtagaaggaggcattgctgcagtgaaaaaattcagtggacgaccaaaagaagaaattgtgctccagaaggagaaggatctgcgctcccagttacttaacgatggattgaagcctcatccaggctgtttgcttgcacgttacaatgatcccaggacaaagagcttcttaatgaggaacgaggtgcttatacggctaattgacttcacactggagttgtaatcgtcaatactggcatcagatcgatgtaacacactgggcttggagcttccagtgagtcattagaaaggtaaatctgattctatttgtgtactttacctgaaaagaagtcgaagggttggctacagtagtgagagttatctcaccaagttacaaggtttaaacaatccctaaggcctggtttggtgaccagggaccacgagagaattcctcctcatggatccctccgtcatcctagtcaccaaacctatcctaagtatttgtagggaaaaaacttgcctctgaccctactgatgcaggaggctatggcaccggtcctgtcctttttttacctgcacataagtcatgtaaagctacttatcatttttcttcaaaacaatctttacatgttaaatttagagcactatcattctttctgctacactttcagccatttttctttaaaacaacatttacatgttaaatttagagcactgtatcattcttgctgctacactttcggtcatttttctgtaaaacaatatttacatgttaaatttagagcactatatctatcattcttgctgctacacttttagtccgtctgagctgcatttggttttttggtttctctgcaggagaaatgttgtagatgtcagatttgctttatgtaaatgtaaactctaaaaggtaataagctacatgctaaaacgacaggtcattttgattcgtttatcgaccaaaaatattgattaaaatataggaaaacattaaaatgaaaatacatgagaagtgcccttttacttatcttctcgtgcttctgcgattggattgggctgtcacgtttacatcctgggtccgctgatctgtttgggcttactttgcctggataatccgactctcaacattgaactcaataaggacaccctgactatgaacgttcagctgaactgactgtgctaaaatctaactagaatttagcgcttgtccacaggtttgtgtgataataagttaataactataaatatacacttcgtcatgcacagtgagaaaacatacacaatggataggccattatgtttagttatgaaatgcagttgcctccttcaattagtgtaatctggccagacgaacagacatgctgtctataattatgaaatgcagttgccacctttcggttgactggccaccaaacgcatcatccgaaacaggtttcagcgctgtcttaactatgtcctggtcagatgctcaaaaaccattgttgcattgcattgtttttcaagcaccacggcgacgagtgcatgcaacttgcaaatccagcacgtgtccatagatgctgaaggttggtgcgcctgtatccctatcaagctgtcctgaccctgcaggcatgcaagccgtacgggcagtagtaggtgagaactgccgatgtctccaaaaccattcattcccttttcgtttgcaatgtgggtaaccgaagatgtttaagaaacttggctgtaaggtaatctaacacttcaaatattacagcccaaaagctcatggttaaggattaaggatgatagtgttactattttcagtctgttgaacaccctttgttgaaaaccatttatggcactggacacgaccggatggtccggcctgcggacggtctgttcgtaggcgcgaacaatctgtgatatgattagatcagacgaattaaactcctacctccacgcttatttatctctctaaacccgtgggagttgttagagaacgcctacgggtctaggcctctcctctttatatatttgaaggggtacaattcattgaagcgaatcaaatcaatatattttccgttcctttactttttgttatagcagtagacagtaacgtagccctctttatctcaatctttacctttcttcaactctacatcgtctggaggcttcttgggtggcctgccgatctcaagacaaaccctaagatctctcctccctgacggggtccctc

SEQ ID NO: 80292 - DNA, 3215 bp, Zea Mays
tctatatagtaaaacgcgaagagagagatacttctgcggaaacgaatggcagcagcaatggccaacaccacatgcctccgctcccgcctcctcgtcctcccaccgccaccggcgccccgcaccgtcgtgtcctttcgtctccgcccatgcgctactacgatctcctcgtcctcccgaaagaggagaccccgtctcgcggcacgggcggcgccgcccggcggcgctgtggccccggcgtcggccgcgtcgaaggaggatgaccagggggagatgggcagcggcgggggcctctctgcggatgatgcagagaggctgtgtcagtttctgcgggccgacctgccgcacctgttcgacgacgtcggcatcgaccggtccgcgtacgatgaccgcgtgcggttccgcgaccctatcacccgccacgacaccatcgacggctacctcttcaacatccgcctcctcaagctcctcttccgccccgacttctacctccacgccgtcaagcagggccgtacgagctcaccacgaggtggaccatggtgatgaagtttatgctccttccctggaagccggagctggtcttcactggcctgtcgatcatgggcgtcaacccgaagaatctcaagttcaacagccatgtggatctttgggattcgatacaaaacaacgagtacttctcttctgaaggactatgggatgttttcaaacagctacggatttacaagacccctgacatagaaacaccaaattaccttattctaaagaggactgcacattatgaggttaggagttatgcgccattcttagtggttgaagcaaaaggtgataaactgacaggatcgtcgggcttcaacaatgtaaccggatatatatttggcaataatgcttcatctgaaaagattccgatgactacacctgtcttcactcaagcttctgacaacacactttcagatgtatccatccagatagttctgccaatgaacaaagacttggacagtttaccagctccaaatacagcagttactttgcggaaggtagaaggaggcattgctgcagtgaaaaaattcagtggacgaccaaaagaagaaattgtgctccagaaggagaaggatctgcgctcccagttacttaacgatggattgaagcctcatccaggctgtttgcttgcacgttacaatgatcccaggacaaagagcttcttaatgaggaacgaggtgcttatacggctaattgacttcacactggagttgtaatcgtcaatactggcatcagatcgatgtaacacactgggcttggagcttccagtgagtcattagaaaggtaaatctgattctatttgtgtactttacctgaaaagaagtcgaagggttggctacagtagtgagagttatctcaccaagttacaaggtttaaacaatccctaaggcctggtttggtgaccagggaccacgagagaattcctcctcatggatccctccgtcatcctagtcaccaaacctatcctaagtatttgtagggaaaaaacttgcctctgaccctactgatgcaggaggctatggcaccggtcctgtcctttttttacctgcacataagtcatgtaaagctacttatcatttttcttcaaaacaatctttacatgttaaatttagagcactatcattctttctgctacactttcagccatttttctttaaaacaacatttacatgttaaatttagagcactgtatcattcttgctgctacactttcggtcatttttctgtaaaacaatatttacatgttaaatttagagcactatatctatcattcttgctgctacacttttagtccgtctgagctgcatttggttttttggtttctctgcaggagaaatgttgtagatgtcagatttgctttatgtaaatgtaaactctaaaaggtaataagctacatgctaaaacgacaggtcattttgattcgtttatcgaccaaaaatattgattaaaatataggaaaacattaaaatgaaaatacatgagaagtgcccttttacttatcttctcgtgcttctgcgattggattgggctgtcacgtttacatcctgggtccgctgatctgtttgggcttactttgcctggataatccgactctcaacattgaactcaataaggacaccctgactatgaacgttcagctgaactgactgtgctaaaatctaactagaatttagcgcttgtccacaggtttgtgtgataataagttaataactataaatatacacttcgtcatgcacagtgagaaaacatacacaatggataggccattatgtttagttatgaaatgcagttgcctccttcaattagtgtaatctggccagacgaacagacatgctgtctataattatgaaatgcagttgccacctttcggttgactggccaccaaacgcatcatccgaaacaggtttcagcgctgtcttaactatgtcctggtcagatgctcaaaaaccattgttgcattgcattgtttttcaagcaccacggcgacgagtgcatgcaacttgcaaatccagcacgtgtccatagatgctgaaggttggtgcgcctgtatccctatcaagctgtcctgaccctgcaggcatgcaagccgtacgggcagtagtaggtgagaactgccgatgtctccaaaaccattcattcccttttcgtttgcaatgtgggtaaccgaagatgtttaagaaacttggctgtaaggtaatctaacacttcaaatattacagcccaaaagctcatggttaaggattaaggatgatagtgttactattttcagtctgttgaacaccctttgttgaaaaccatttatggcactggacacgaccggatggtccggcctgcggacggtctgttcgtaggcgcgaacaatctgtgatatgattagatcagacgaattaaactcctacctccacgcttatttatctctctaaacccgtgggagttgttagagaacgcctacgggtctaggcctctcctctttatatatttgaaggggtacaattcattgaagcgaatcaaatcaatatattttccgttcctttactttttgttatagcagtagacagtaacgtagccctctttatctcaatctttacctttcttcaactctacatcgtctggaggcttcttgggtggcctgccgatctcaagacaaaccctaagatctctcctccctgacggggtccctc

SEQ ID NO: 80293 - DNA, 1343 bp, Zea Mays
tctatatagtaaaacgcgaagagagagatacttctgcggaaacgaatggcagcagcaatggccaacaccacatgcctccgctcccgcctcctcgtcctcccaccgccaccggcgccccgcaccgtcgtgtcctttcgtctccgcccatgcgctactacgatctcctcgtcctcccgaaagaggagaccccgtctcgcggcacgggcggcgccgcccggcggcgctgtggccccggcgtcggccgcgtcgaaggaggatgaccagggggagatgggcagcggcgggggcctctctgcggatgatgcagagaggctgtgtcagtttctgcgggccgacctgccgcacctgttcgacgacgtcggcatcgaccggtccgcgtacgatgaccgcgtgcggttccgcgaccctatcacccgccacgacaccatcgacggctacctcttcaacatccgcctcctcaagctcctcttccgccccgacttctacctccacgccgtcaagcagggccgtacgagctcaccacgaggtggaccatggtgatgaagtttatgctccttccctggaagccggagctggtcttcactggcctgtcgatcatgggcgtcaacccgaagaatctcaagttcaacagccatgtggatctttgggattcgatacaaaacaacgagtacttctcttctgaaggactatgggatgttttcaaacagctacggatttacaagacccctgacatagaaacaccaaattaccttattctaaagaggactgcacattatgaggttaggagttatgcgccattcttagtggttgaagcaaaaggtgataaactgacaggatcgtcgggcttcaacaatgtaaccggatatatatttggcaataatgcttcatctgaaaagattccgatgactacacctgtcttcactcaagcttctgacaacacactttcagatgtatccatccagatagttctgccaatgaacaaagacttggacagtttaccagctccaaatacagcagttactttgcggaaggtagaaggaggcattgctgcagtgaaaaaattcagtggacgaccaaaagaagaaattgtgctccagaaggagaaggatctgcgctcccagttacttaacgatggattgaagcctcatccaggctgtttgcttgcacgttacaatgatcccaggacaaagagcttcttaatgaggaacgaggtgcttatacggctaattgacttcacactggagttgtaatcgtcaatactggcatcagatcgatgtaacacactgggcttggagcttccagtgagtcattagaaaggtttgcaaggcccttagacatttttg

SEQ ID NO: 80294 - DNA, 2313 bp, Zea Mays
ttttttttctcaacaatcatacatgccttcgtacttcttggcaaaaggtggcataatattttcaggtgccagctgcacagtgcggtgcccagctcaaatccttttggggccaaattagatttacagaactttacggaggggctagatgaactttcctcttcaacggcccccttgtcttctccatttgttcatttcgcgtggcttcccttgccccctattaaaccaccgagctgggcgcctccccgtggcgctcgcggccgcattagcgcggagatcgagagacaagagagggaaggcggcggcttgccggcttaagccttctctccctccgtcgtcgcctcctccttacgtccgcttcttcctcctggtacgcctgaaaaccttgatgactcgcccgcgttagatttggattttctgcggtttccaatctgaaccacgattttagagatccagaagttcttggctgagatcctggcatttgggactttctgacagcagtctctattgttttcagaatggagacgtcagcgccgcccaatgcccccgctccgccggcgcagccacggaggcggttgccggacttccagcagtcagtgcggctcaagtatgtgaagctggggtaccactacctcatatcccacgggatgtacctgctgctgtcgccgctgatggcgctcgtcgccgtgcagctctccaccgtctccccgcatgacctcgccgacctgtgggagcagctccgcttcaacctcctctccgtcgtcgcctgctccacgctgctcgtcttcctctccaccgtttacttcctcacccgcccgcgccccgtgtacctgctcgacttcgcctgctacaagccggagtcggagcgcaagtgcacgcgcgagaccttcatgcactgctccaagctcaccggatccttcacggacgagaacctcgagttccagcgcaagatcctcgagcgctccggcctcggcgaggacacgtaccttccccccgccgtgctccgggtgccccctaacccgtgcatggacgaggcgcgtaaggaggcgcgcgccgtcatgttcggcgccatcgaccagctgctcgagaagaccggtgtcaggcccaaggacattggtgtcctagtggtcaactgcagcctgttcaacccgacgccgtcgctgtcagccatggtggtgaaccattacaagctgagggggaatattgtgagctacaacctcggcgggatgggctgcagcgccgggcttctgtccatcgacctcgccaaggatctgctgcaggtgcaccccaactcttacgccctggtgatcagcatggagaacatcacactgaattggtactttgggaacaaccggtccatgcttgtgtcgaattgcctgttccggatgggtggcgcggccatcctgctctcgaacaggcggtctgacaggcggaggtccaagtatgagctggtgcacacggtgcgcacgcacaagggcgccaacgacaagtgcttcggctgcgtgacacaggaggaagatgagattggcaagattggcgtgtcactgtccaaggacctcatggcagtggccggagacgcacttaagaccaacatcaccacgctggggccgttggtgctcccattatcagagcaacttctcttcatgggcacattgattgccaagaaggtgctcaagatgaaaatcaagccatacatccctgacttcaagctggctttcgagcacttctgcatccacgcaggcggccgcgctgtgctggatgagctggagaagaacctggagctcactgactggcacatggagccatcgaggatgaccctgtacaggtttggcaacacatcaagcagctcactctggtacgagctggcgtacactgaggcaaagggtaggatcaggaagcgcgacaggatctggcagatcgcatttggttctggattcaagtgcaacagcgccgtctggaaggcactccggacggtgaacccggccaaggagaagagcccctggatggatgagattgacaacttcccggtggatgttccaaagatttcaaagtgctgtgcaggcgccctggaacggagtcagcataaaacggcgtttttccattttcctgtagcaggcaggcatgcagaagcctacaacgtcctgtgacactgactccatgtgaggatgaggccaacacaagatcagaattgcaagaccgtcctttggagtacgcaacttttttctcagaaaccatttgtcgtgtgcggtagttagatctgaggttctgaaccaatggtccgttccgtgacaacagcagtttggagcagaaattccc

SEQ ID NO: 80295 - DNA, 1818 bp, Zea Mays
cttccgcgcgcgcgcttctcttccttcttttttcgctcgacgagcagtgtaacattttccttcagccatgggtaaggagaagactcacatcaacattgtggtcattggccatgtcgactctggcaagtcgaccaccactggccacctgatctacaagcttggaggtattgacaagcgagtgattgagaggttcgagaaagaggctgccgagatgaacaagcggtcattcaagtatgcgtgggtgcttgacaagctcaaggctgagcgtgagagaggtattacaattgatattgccctgtggaagttcgagaccaccaagtactactgcactgttattgatgccccgggacaccgtgacttcatcaagaatatgatcactggcacttcccaagctgactgtgctgttcttatcattgactcaaccactggtggttttgaggctggtatctccaaggatggccagacccgtgagcatgctctccttgctttcacacttggtgtgaagcagatgatttgctgctgcaacaagatggatgctactacacccaagtattcaaaggcccgttatgatgagattgtgaaggaagtctcttcctacctgaagaaggttggatacaaccctgataagatccacttcgttccaatctctggttttgaaggtgacaacatgattgagaggtccaccaaccttgactggtacaagggcccaaccctacttgaggctctggacttgatcaatgagccaaagaggccttcagacaagcccctgcgtctcccccttcaggatgtgtacaagattggtggtattggaactgtccctgttgggacgtgttgagactggtgtcattaagcctggtatggttgttacttttgggcctactggtcttactactgaggttaagtccgttgagatgcaccatgaggctctccaggaggcccttcccggtgacaatgttggcttcaacgtgaagaatgttgctgtgaaggatctgaagcgtgggtatgtggcctccaactccaaggatgaccctgccaaggaggctgctagctttacctcccaggtcatcatcatgaaccaccctggccagattggcaatggctatgccccagttctggactgccacacctcacacattgctgtcaagtttgctgagctcgttaccaagattgataggcgatccggcaaggagctggagaaggagcccaaatttctcaagaacggtgatgctggtatggtgaagatggttcccactaagcccatggtggtggagaccttttctcagtatcctcctcttggtcgatttgctgtccgtgacatgaggcaaacggtggctgtcggagtcatcaagagtgtggagaagaaggacccaactggagccaaggtgacgaaggctgctgccaagaagaaatgatctatctgtctggtgctgtgcttgcttgttggttacctcgtggaagcttaaaatatctcgtcttgttgacatccttgcagttgtcgcgtgaacaagtaatctatgatggcaatgtttgcctggtcatgaagtattattactttcgttgaaaccgtgatgctattaagacttaatttttttatggaacatcgaatgtaaggcatacatggttatgagttttgtactaccctttgcagtgtgttcctgtttaccttttgtgctgatgattcgcttgtctttgtgtcttcaagttaatcttgcacttaactgtttttaatatgccagatcgtttcaaaagatttgaaatttggattcttccgaaacgtttttttgataataatgtagtcctgaaaacatgattttgatt

SEQ ID NO: 80296 - DNA, 599 bp, Zea Mays
agcaaatacaatatacgtacgagattaaaatcctctgcatgaatatttacaacacccatttgtgcgaccgaagattgtcatgcacatgaggcctcccttgtcttcgatctccccccgcttctgtctcttccagtccattgttcacactatttatatctcctctattgttcacacttcataattaaattagtttaggtctcgccctgtgtgacttgcttccaatagaggacgctagtaaccattctgatctttttgccaaatagtagtagtttgttgccaaaatcaccatcccgaacgtctcacacaattcaaattgaagatggaacaactgtttcttgggccttggttctcttaggcctccacatggtccgggccttcaccatggtcggacctgattcaaggctcagcacatgctcacagtgcaaggttgtttctccagactcactgttgcaatccgtgtgcacagaggtgtgtgattgcagcacactatcccggccacactcccttttgtaatccagcacaatgctcgccagctcatgattctcaagaatagagatgggtgcactctgaagcaaagataaaagtaatgttaactgcag

SEQ ID NO: 80297 - DNA, 1958 bp, Zea Mays
atcaattctttgctcgtcgctaaaaatcttgattgaaaaatatctgcgatttccggaatacagaaaaaatctaaaaaaaataaatatcctagagatcctatcccttccaccgccctccctcagattttttttaacgcgcgcgctctccttatctccatcgctcgcacgctcctccagccaagcggctccgtggcggtcgagctcctcctcgggtcttcttctttcgttggctcggccgaccacacgcgtctcccacggcgcgccctgcctttctctgtcccctccgtgcgaccctcctctgctccatctctgcgtgcccagatttttttttgcggcggctagtgatggcagaggtgaactccgctcggccatgggagagttcacgcgctccctccaagcctcctcctctgtgcaccgtcccagctccgctcggagctctctgctcgagctcctctagttcgcgcactcctcctttctccttccctgctcggcatcctccacagctcagatctcgcccatggcggatccctccactcgaccgtccatctccctcccagcgccgtgctcctttctcccagctcgcgagcacgctccttccttgctgagctcggttccatggccggcgttcctctcccttcctcgccttgctcctctgcgcgcagccgcatccctctgccgaccgtctatcttcctactcggagctcgcccagtttcttttccggatcggacgccgcacagcggtattgcttctccttgctccagctcggcacccacctctctgtgcgtcctgcagctctgttgccgcagtctcgccttgtctatgttgtagctcgtcgtcgttcagttcgccttcatcgcgttgtcgtgcgcgcgagactgctcgctgtcaaccctgcccggatctcgctcggccacgaccctagtacttttcggcgtcggtggtcctcgactatgtcttcgtccatgacaccatcaaccggtgtatctccttcggtgtgttgttggatccctgcctcgccatcaactctgatgtcgcgacgttcctgtgtcgtgttggtcatgcgccaaccgctcaacaaaatatgttgttggattcctcgtcgagcactgtatcgccatggcgcggatgcccgcatcctccatcttcgcgtcttctggatgtcagcacggcctctccgcgtcgtcgggctcatcggcacgctgctcgttcacacctcacgcgtccgcgatgtcgtcacatgtctccttgccagcagtgaacgcccaggagaagaaatcccagaaggtttgtatggacgataaataatcgtgtgatgcgggagacaacccaagtcaactccaagcgcgggctaatccgcaggatgacgctaatggacaaacctgaagatgttcgccaagtggacgtcgtctaacactaacctagtgttactcaggcaagccccggtgcatgcaaccctttccttgtgtttttaaatacttttcgcacactttaagtctagtgaaatgtgcattaggttcataggagttgcttggaaccctttgatgcattgctttccttgatatccatacctttatagatacttccgtgaagtatcaaaaatatgatttacaaaaatgcttagccttgcttagatcttgtggatagaggttgtccttagtctaacccgggagaggatggcttctacctgcaagaatattttcatttggagcaatagtgggatcttactgcaaagttccctgtgatgctctttcatcctaaggaacagacacaatcctgaggatggaaatacttaaattgagacttgggttaggaacaggtgatgttctacccaggttgattaaggattgatgcgtatgtaggcgtgctgaccgaggaccctttaactggtcacatgcctcgtcatgggtaagccttgcctcgggcagactaaggccagaataagataacacgaaatggg

SEQ ID NO: 80298 - DNA, 5361 bp, Zea Mays
aaacaacacaccaacacctctcctaaacattagagggaggcaccgccaagaaggaaagccctttggcaccggccaattgccatttttgcctttcctcctcagcagatctgaggagaagggtgaggtctggagtggctccatcaaacaccaccctattccgatgcttccaaaccatccaggcacccaagatgatgaggcaatccagacccttaactaatccagaaacaatgtctgaatatttcttccaccagtagatgtagcatccggctgagggcctagactgcgaagaccaaattttcttagcatggtgtaccagaagcctcttgtgaaaacataggacaccagcaggtggttgatggtttccagttcttggtcacagagaggacagctagcaggatgattcaagcctctttttgtcagtgttgcagtccaacatctattctaagccaccatgcacataaagaaccggcatttggagggggcccaagatctccaaatccttttgtgatgaccaaaggagcttgagcctaagaagaggccattataagcagattttgctgagtatttgccatccgatgccctggtaaaaatgtgtctatcctccatgttcggctgcagactcaggccagaaagagaatcccaaagatgtagatagtctatcagggctcccatagtcagagcaccctttatatttgaaatccaccttctgtttagcaaggcctcttgcacaattctcctgtatattattctttttgggattatggcaaacagtcttagagcaatatctgagactcttttaccatttatccatctatctatctagaacaaagtgttggatccattaccaatctcagtgatcaagactgcagagaagaaggatttggctttactagggacttgaattgggagctctgctcaatgcctggtaggatcagttttctccagccataaccattgcatgcgaagagcccagcagaggtcttgtaagctagaaatccccagaccccccaagtgcaagggtttgcacaccttgttccaagcgactagacaatgccccccttttgcttcttttctacctctctacaagaaacattttcttattttatcaatggcttcaaatagcccaatggggaaagtcgatcgccattgcagcaaagactgtcattccagaaagaacatgttgcacaagcacttttctgctagccctattcatcaaatcagccttccagcttgggagacgatctgcaatcttttccaccagaggaaagaactgttgtttggataatttgtgcaaggatagaggaaggcccaagtatttgcagggaaaggaagcaattgcacaaggcaacctattttggacctccacaatgatctcttcagagcatctgataggataaacatttgatttctgggtgttgttgtgcagaccagaggcatccccaaaaaggtagagaatatcaagagtggtggagatatcagcaacagaggggtgcaggaataaggccacatcatcggcataaatagagattctgtgtagcttctttttctggacaactgctgcagaaatccagcatcttcagttttggaggaaagaagacccagaacatccattgcaagaatgaacaatattggggaaaggggatcccctgtctaagccctcttctgtgttgtatcctttttcctggacatccattgagaagcacttgtgtggtggaagagccaagaagcccacaaatgatctctccaaagttgtccaaaacccatttgttgcattacctcaatcaagaatggccaagacacagaatcaaaagcttttgttatgtctaatttaaacaaaagagttgccaaattttgttgatgtagcagtcttgaagtctgctgcactagcatgaagttatcctgtataaaccttacttgaatgaatgtgctttggattggagagaccataccatttaatcttttagccagcctgttagcaaggaccttggtgactaactttgcaaagctgtgcactacacttattggtctgaaatctgtaacctggttagccccctctctctttggcaccattgtgatgtatgctgtattgagtctgtgaaggtttgcaaaatttctgctccaaattgcagacattgcatttagcacatcttccttgataatgttccaagttccaacacactttatagaatcttccagtgaacccatctgtccctggggccttgcaggtagactcctgagtcctgatggttccccacacttcctgttctgtaaaaggtgagtccaaatcagcaaggttatgtgttggcaaaccaagagccccaagatcaatggatctatttctgtcttcagaccgaccaatgagattagagaagaactgatccaccagagctgctttttcagcatgattgataaggatacactcatcatcccttagcctgaccaccagattctttctttttcgatgcctagcatgcatgtgaaagaatttggtatttgcatccccctccttcaaccacaaaattctcgatctcaatcttgccattattcttttgaaggaggccagcggcagggaatgcttcttgagcttattcttgagccataactcagccggtgaaaataccctatgatcttgagctatttctaatttatgcagtagctcttagtagctcttttgccagatataactgggaggtcacgtgtcacacttttttatcactctcctttagttttctttccaaggtcagaaaaggatatctggaaggttccactaaaatccaagcagcctgaacagtatcatgattcatgaaagccttctaacttggtccagaaagattcaaagtcaaacctcttttttccacaggttattctttgaggccaaggatcaatgggcagtggtctgaatcatgagaggctgtactttggagaaccacattggggaagatggattcccacaaaactgagcaaaagaccctgtccaacttaaccagcacagggttgtcctgttggttagacggttagaccaagtgaatttgcagccatggagctgaatttctttgagagcgagatcattgatcactgtcctaaaacgacccatcatggccctattcagattggagttatttttatcagagcttctatagatcaggttgaagtctcctgccaccacccaagggccagaacaagcagccttaacatcccttaattcttggaggaaaagaactttatcaaaatccccctgagggccatacacacaggttaaccaccaaggttgaccttcttctctgcagaactgaatagaaacacagtggttatccactctctgtaatcctatgtgcccaacatgtcttttccaagcaacaaagatgccaccactagaccccacagaagacagataaataaattcagtaaactctgttcccaacatagagagtataattcctctggaaaatatgttgcatttttgtttcctggcaacagagcacatccacttgagtagagtttacaacatccctcatcgcatattgcctaaccgaggagttaagaccccttacattccagactagaattttggaaggatccatgaacaaggattatcaacaaaaaaaacacacccgaggggggggggctactgggactctaagtccactggagtagaccagccgaatagagctgcaagggcctccacctgggtttgcgtcaaggggcgtttgaatagcatggcatattcattcaggcttcctgactaacttcttcagcttcattgatgatgcgcaaggctctcatggctgttctgactgatcgtttgttccaatattgcatgctgtattccactccaattcctgcaatacgcctgctgggcattgacggactgtgtggtcggggccttctggttagattttggtgttggaagaagctctgttgtaactctactgactttgctaatgaagtttttcagcccaagctccttgtgtccggttggaaaagcagaatggtcctccagaaacgcagggcaaatacatgacaaggaggaagcagaaagctcaatctaatggaaaattatgatagaagactcaagatttgtaaaattgagaaatgtcattaagactgcaagctaaccatcccaattactaagtaaattgtaactagtacaaatgtcagagatagatatactagtaatttagggaaaaaacatatcaagtgaagcacatctgtgatttgtgcatgcatgaaaatttgacagtggggatgcaggagttgtgtcccactcacgaggattccttccagtcgtggtgaaggactagcagctctcggacaactgatcaaatgaggaagggcttcaattccttagtaattctaggtgcttggaccatatggaaacataggcatagatgtgtctttgatgaatgtaatcctagcttggtcacaacccttagggtgtaaggaagagacggtgctttggtccttggctggagccaaggccctgtctttgctcaaggtcgaagagctgctggcttaaaacagctctgttgatcgtgttttttcctgttagccggtgatcacaagttagtttctagtgtgggtgtgtgtggtgtattggagttctctccgctttaattctctgcttaatacaaagttgtgcagttctcctgcgcatttcagaaaaaaaaaaattgacacaaatacctttccagtggacatagcgagttcccccaactgcttccactttgattcactatgtgcctcaatagcaatttcctgcaaagcaactagaattcagggtgcggcggtgcgcttaaggagaatttcttggacgatgtgtcctaaacagttgagagataagtggtatagggcttgtttggttcagcttttttctgaccagcttttttaaaaatctagctgtggggagaatctggatgtggggagaatctgagtatcattacgattacgtgtggaggaagataaaattgttcatagggctcaggatttagaaagtgacggattcctactattacaccgactcaaccattatgtgtttatgttgattttagatgatttttgctccaacgaattttatagaagctgactgaaaagctgaacgtttggtagtccgcagcagcttttggtggccagaagctgctagaaaccgaaacaaacaggcccataatactataattgcactatgcctttgcaacttcgaggcttccaagctgcacagccagatcaaatctgtaattagggtcagtggctatatcaagggcttcctccaacatgccacgtgattcaaggaaatgtgccacactgcaagccaaaagtaaatcatataaacattggggcacataaaagtttaaattaacaaccact

SEQ ID NO: 80299 - DNA, 3289 bp, Zea Mays
gtagatcccgcggcgcggccgcggtacctcggaccgggttttcgcgtgcgtgaatctgtctccgtgtgtttctgccaccgtgtgggaccatccctggccatgctgtgccccatccgtgcgtagaaatcggatcgaaacagactcttccccgctcaaatcggggatcgcaacagcattgggcggggctctcggaggctataaaaaaaccgtgtccttgggctctcttcctccgtctcatcctccgtgattgccatccatcgccggcgtgtggctctagacatcgcaatttctcatcggtctgatgcgggcaccaccgtgtcgccctacccgtggccagcgctcgtttcgtcgcggttcgccggtaagccaccccatacagttccctggcccctgggcatcgtgtcggtcacttcggagtagaggatagggctagatcgtctccggcgatgtccgccaccgtctacacccacggcgccaccgttcgtcgcccgcttggggggggctgaagcggtgtgtgggattgtccgtcgtcggatgctcgttcgacgatcgggatcgggtgctggacctgagaggatatatgaatctggggtcgtccgatcgttgttgagcggatgagattagatcgcacaaacaatgcttcaggtatgtagatctggagcattggtctgcgggctgccagctaggattaggggtcgggtaacgattcggtatggggccatctcgaccgttgatcggctgacgttcgacccagaacggaacatgcaatgccgctatgttgtatttgctaaagagacccccgtagatagttaaatcaacccgcggtccactgctgtgtaaaagcaattacacttgggtcttgaaattcacagatcagaccctggggtttataagaatcgtgtccgcagtccagaatgcttaggaaattcataatcaataaagaaaatgggtttttagtataaaaataaatctataaacttgtttaattcatattaaatccatcttaactccaaattgacccattccagttgcaataaattcatattaatattatttatcatctagtaaccctagtttgttatgaaacataggtaggaattatgcacttaatttctttttgtacctaacatttaaatcttcagtaaattgtaactcaataaccttaactccgaatttagcgattcttgttcctatgatctcgttatgacgcatagattattattatgcagtttgttcttaagtttagtgtgatgttaattttgcctataccctgtttgtttgtattgctacgactaacgtgaggttacgagtcacttgaagatcatcttggtacctggaatctcgagtcccaggcaaccatgacatgctcaggttaatttgatgggacccaataggtttccttagcattgtttatccctcaccttgcaagcataagagtttttggtagtcttgctattgctctatttggttttgggaaactaatgtttcactatgatcatgttccaattatgttgttgtttaattattgttcatgataagatcatattgttaattggaacatggagaaccacccgggaaaataatgctaccacaagggaggtaggggatgcccttggctgactaattaggaaagctagtggatgactattttacccgaaagggacaaggacattaggggagtggtcagtgtagggaggtccttgggttgattttgctgcgatggcggtcaggcgagggatccctgcattggagcttcctagaaactgtagcaggttttctaaagctagtggaactttgtaaaggccttgtagtggatccctatccattcacctcggtagtgtctaagggtctagctaaccctgacgatatgggatacacgacttgtgggtacagggtacaacctctgcatagtgtaaaactggtatactagccgtgctcgcggtcatgaacagctcaagactctcgcatgattaaattatggaattaaattcaatttgtcatttccatcgcattgggatttattattaattttgatctattattattttggtttggtacttacttacatctagtaaatggtaataaaatttgaccaacttattaaaagcaatgctcagctttaacccatattgttgatcagccttacatttcacatgaactctcacctttggtgagttcatgcacattattccccacaacttgttgagctatgatcttttatgagctcactcttgcgatatataaccccccataggagaagaacaggtggtccaggaggagccgtacaatgaggagtacgagttgatctaggtggcgtctcctagtcagctttgtgtcgccaaggaataatacttagttcgcttatttattatcatttatttttgtaagacttcagttatgtaataatgatatttatgatacttgtgacatttatctctatacactttgtcattatatgtgatgttcttctttggcgcacatatgagacgcacccggctttatctcttaaattcgggtgtgacataatcccactcaagtacaactaatccgtggagatcctagaataaacagatgtctcccgaggaggtgatcagcaagtttgtgagctttgaacttatgatcaaagactccaaacatattttcaacttgaagcaagacaccacctccacacccgaggtgcaacctgttacattcaaagcaatggaagaaaagaaggaagagtctacaccaacaagtaggctcccaattgatgcctccaggctcgacaacgaggagatggctcttatcatcaagagcttgcgacaaatcctcaaataaaggaaggagaaggactacaaaccccgctccaagagggtttgctacagatgtggtaagtccggtcattttattgctaaatgtccatatacaagtgatagtgacagggacgatgacaagaaagagaagaagaagatggagaagaaaaggtattacaacaagaagaagggtggcgaggcgcacatggggcggggatgggactccgacgagagatccaccgactcctgctccgacgaggacgtcgccaacatcgccgtcaacaaaggccttgtcttcccaaatgtcgaccacaaatgtgtcatggccaaggacagcaaaaagaagaaggtacaatctagaaatcccccaaaatacactacttctgatgatgagggtagctctagtgaaaatgatgatgatttgacctctctttttgcaaacctcaccaaagagcaaaagaagaaaactaatgaattgatagaaaccattaacgaaa

SEQ ID NO: 80300 - DNA, 1365 bp, Zea Mays
gcaggctcacctcgctcaccgacacctgggccctaaccccggcaactcgtgctcgccacccgattggccggtataaagccggtagcgcgtcgcgtgagccacacgcgcacggcgcacacatatcccttccttcactggctcactgcggtcccggcaaaagtcagtcaactcagccaacaagcgctgctgctcgggcacgggtggtttgggaggccggacgcaacgtcgggatgcagtcgctgcaggacaaggcgtcggagtggagcggggtggcggccgccgatgcctttgccatcgacgacgtcaacatattcgagtacctcggcggcactccgcagccattcgtcgacctctccaccaatttctacaccagggtttatgaggacgaagaggagtggtttcgggagatattcggggggtcgaagaaggaggatgccatccagaaccagtatgagttcctgatccagcgcatgggcggcccacctctattctcccagaggagaggacaccctgcccttataggacgacaccgaccattcttggttacccaccgagctgcagagcggtggctacaccacatgcaacaagctttggacgcaactgaaagcatagatgtggactcaaaaacgaaaatgatgaacttctttaggcacactgcttacttccttgttgctggcaatgagatgacaaggcaacagggccatggagtagcctgcaaacatgcaacaatgtgcctttatagcattccgtatacaatggagttgaaacaacctccacattcaaagaaacaatggtactgactctttgtaggctttatagccattcttgagcagagagtgtactcaaagtggatagttgtagcttctgccaatatgtttatccttcttcgtctcttgtgctcaagagttattcacagcagtttttcaaatttgacctcaccctagcaaggttaccacaccacatgttaaccatgccacacttatttaaggtcatatttgtttaattttcataagtttgggagccaaagaaagtcattgcctatttaggtcgctgccgagtagagcctagctggctggcagggacatgcggaaaacttatttggttcattgaatcaaaaagatcaggctgagtggagcgtttgtttgtttggttgtactaggatatgttgaatcaaactgaaagaggaaacaatcactaagataatttttattttgcctgaatcgattgtataatacatattttcaccatattgaggcttaatttactttgaaatatatcagtatgccttaaattatgctaatcatatactaatactgttgacactttttcggagcgccaaatactcaagaagaaccggcggcggtg

SEQ ID NO: 80301 - DNA, 1481 bp, Zea Mays
gcaggctcacctcgctcaccgacacctgggccctaaccccggcaactcgtgctcgccacccgattggccggtataaagccggtagcgcgtcgcgtgagccacacgcgcacggcgcacacatatcccttccttcactggctcactgcggtcccggcaaaagtcagtcaactcagccaacaagcgctgctgctcgggcacgggtggtttgggaggccggacgcaacgtcgggatgcagtcgctgcaggacaaggcgtcggagtggagcggggtggcggccgccgatgcctttgccatcgacgacgtcaacatattcgagtacctcggcggcactccgcagccattcgtcgacctctccaccaatttctacaccagggtttatgaggacgaagaggagtggtttcgggagatattcggggggtcgaagaaggaggatgccatccagaaccagtatgagttcctgatccagcgcatgggcggcccacctctattctcccagaggagagatggtctgcccaaaatgattgaagaaacgagtatcttcatgacaccctgcccttataggacgacaccgaccattcttggttacccaccgagctgcagagcggtggctacaccacatgcaacaagctttggacgcaactgaaagcatagatgtggactcaaaaacgaaaatgatgaacttctttaggcacactgcttacttccttgttgctggcaatgagatgacaaggcaacagggccatggagtagcctgcaaacatgcaacaagtaaaccagctgagtaaccattttagccgtggagctggtaaccattggaataattactgataagccttttatccagtgtgcctttatagcattccgtatacaatggagttgaaacaacctccacattcaaagaaacaatggtactgactctttgtaggctttatagccattcttgagcagagagtgtactcaaagtggatagttgtagcttctgccaatatgtttatccttcttcgtctcttgtgctcaagagttattcacagcagtttttcaaatttgacctcaccctagcaaggttaccacaccacatgttaaccatgccacacttatttaaggtcatatttgtttaattttcataagtttgggagccaaagaaagtcattgcctatttaggtcgctgccgagtagagcctagctggctggcagggacatgcggaaaacttatttggttcattgaatcaaaaagatcaggctgagtggagcgtttgtttgtttggttgtactaggatatgttgaatcaaactgaaagaggaaacaatcactaagataatttttattttgcctgaatcgattgtataatacatattttcaccatattgaggcttaatttactttgaaatatatcagtatgccttaaattatgctaatcatatactaatactgttgacactttttcggagcgccaaatactcaagaagaaccggcggcggtg

SEQ ID NO: 80302 - DNA, 3077 bp, Zea Mays
atggcacagggaggtgggcaagatcaccgccgcggacagtggcggatgcacaggaaactaaaatggaaaaagaaagaaaaatatatctggactggacgagatgacgagtggacgctaaggcccatcacccatgacacagcagagagcacgccgctccttggtctggcccgtcgcgcgcagatccgtagcccaccgcgcgcgtcggaaactgagagtctgagagccgccctagtgccctgccgccgccacccttcaggacgctactcttattttaataagatcgtgtctcaaaaatggatattaagaatcataaaagctgttcggagcagctgccgtagttctatcttcactctcaaatcactgtaccgactagcgacaacgtcttgtagccaaaatcacgtcagcctgggctcgcactcgcacgcgcaaatcccactacatgtatacatacatatgatggaagcccaatctcgtgcagagattcgtcccattttcctgtcggaaacaaccctggccttaggaggccaggcgattctccgccgcctcgtctcgtctttgctatgcgccacgagcgcctccgccgctccaacgctccaacgccctgagcgcctccaacaccactccaacgccacgagcgcctccgccgctccaccgaacaactccaacgccactccagctcttgcagcagtagaactctactgcagccagggcatcgacgccgtgctcttcgtgccggatgacgccaaggccacgcagaccgccgacccgaacaggaagcctcccgccattgtcacccacaagaagaagatcaagctccggtgagcttcctagctctgtccacactcatacaaaaatcgcaacagattctaggttcatgccattttttcagaactgcattggtgcaatcgacggtacacatatacccatcaccatagcagaacatagggcccctccatatagaaacaggaaaggaactctttcacacaatgttatggtagcctgggacttcgacctcaatttcacatttgtttcatgtggatgggaggggtcagcctcagatgcaggggtgcctcgatctgctattagcaaaggatttagtgtgccagaaggaaagttttatctagtagatggtggttatgcaaatacgtcatccttcattgcaccgtatagaggggttcgataccatctcaacgagtttaggaggcgtcgttcatcacaaagtggttatgcgaactacagagagttgttcaaccaccgccatgcaattctccgtaaccatatagagagggccatcggtgttctaaagaaaaggttcccgattctaaaagtaggcacatttcatcccatagagaaccaaatcaagatcacagctgcaactgttgcatttcacaacataattagagggcaaaatggagacgaaagatggcttgacaaccaaccaaattacatctctccaagtcaatatgttgatgttccagagggagataccaactatctcaatgacacagaatcaaggatgatttggaacaatgtgtacgagaaaggcttagtcgatgtgatgcatgatcacaaagataatccaaaattcaaaggtcaaaatggttggaatcgtgatggatggaatagtatcactaccaagttcaatgaaaagttccctctagctcatttctctaaacaacaactgcaagagaaggagagagagcttaaaggatactacaaggcaataagggattcaagaaaagaaagcggggttggttggaatgacaccctatgcatggtactagctgaaccagaagtttggccaaggctgattcgcgtaagcaaactttctttgtataattctatctttgtgcattcaatatgttcgcttttgctactaataatatatttcatgttgcatttaattggctcacccaaaggtatcaaagtttcgcaataggccattccctcttttttacagtttagaagggctatatgaaggtagtgtggctaccggagagttgaatttcacatcaaccgctgttgatcttcctccaccttcagctccatccaggagtgtgtctggacaaagtctcagtcctttgagtactaattcacttgatttggatggacaagaaaccacaagtgtgttcaatctatcttgtgatgctcaatctgtccgagtcaatactaatgaacccactgaagctcaatttgtcccatctaatcaagaatcaagccagagagaaggtggcagtgggagaaagcgtaagcaaagccatgttggattagctcttgaaagttatgtggagtttaaaaagatccaaaatacagaaacacttgaaactcttaaagaacataagaggcaagaggatcaattttctattagcaagtgtcaggctgaattgaaaggaatggatggattaacagcagtagacaaatcatatgctttggagcttttcgtatctgtgacaaaccgagaaattttcttaacaacaacagagcatgatgttagagaaatttggctcaagcgcaaaattaggttgcttcgtggtagtgatgcatggcctgaacaaatgatatgagcaaatttgacaactgcagttctgttatggtgaatggtgattgtagttcagtttcagctctaacctatggaaaattgaatggcagttgcactaatctgttggtggaatgattttcccagtaatttcctggacaagcagatcactgagaaccatttaccttatgagaaatgatgccctgtatggttcagtatagttcttgtattgctagtttaaattaattcttgtatggcagttgcactaaactgaatggcagctgaactttgagatatgcttctattgttggtttaaaaccatggtgatgactgttcttgtatgcattctgtatgcattcttgtttataacctggttgcttatgtatgcattcttgtatgccgtgtatgcatggtgactgttcttatatgtgttcgtgtatgcaatctgccccaaactgaatgtcatacggaaaaatgtcaccggtatgagttcgtgtatgtatttagttttgtactaaactggatcactagtacaaaaagg

SEQ ID NO: 80303 - DNA, 3049 bp, Zea Mays
atggcacagggaggtgggcaagatcaccgccgcggacagtggcggatgcacaggaaactaaaatggaaaaagaaagaaaaatatatctggactggacgagatgacgagtggacgctaaggcccatcacccatgacacagcagagagcacgccgctccttggtctggcccgtcgcgcgcagatccgtagcccaccgcgcgcgtcggaaactgagagtctgagagccgccctagtgccctgccgccgccacccttcaggacgctactcttattttaataagatcgtgtctcaaaaatggatattaagaatcataaaagctgttcggagcagctgccgtagttctatcttcactctcaaatcactgtaccgactagcgacaacgtcttgtagccaaaatcacgtcagcctgggctcgcactcgcacgcgcaaatcccactacatgtatacatacatatgatggaagcccaatctcgtgcagagattcgtcccattttcctgtcggaaacaaccctggccttaggaggccaggcgattctccgccgcctcgtctcgtctttgctatgcgccacgagcgcctccgccgctccaacgctccaacgccctgagcgcctccaacaccactccaacgccacgagcgcctccgccgctccaccgaacaactccaacgccactccagctcttgcagcagtagaactctactgcagccagggcatcgacgccgtgctcttcgtgccggatgacgccaaggccacgcagaccgccgacccgaacaggaagcctcccgccattgtcacccacaagaagaagatcaagctccggtgagcttcctagctctgtccacactcatacaaaaatcgcaacagattctaggttcatgccattttttcagaactgcattggtgcaatcgacggtacacatatacccatcaccatagcagaacatagggcccctccatatagaaacaggaaaggaactctttcacacaatgttatggtagcctgggacttcgacctcaatttcacatttgtttcatgtggatgggaggggtcagcctcagatgcaggggtgcctcgatctgctattagcaaaggatttagtgtgccagaaggaaagttttatctagtagatggtggttatgcaaatacgtcatccttcattgcaccgtatagaggggttcgataccatctcaacgagtttaggaggcgtcgttcatcacaaagtggttatgcgaactacagagagttgttcaaccaccgccatgcaattctccgtaaccatatagagagggccatcggtgttctaaagaaaaggttcccgattctaaaagtaggcacatttcatcccatagagaaccaaatcaagatcacagctgcaactgttgcatttcacaacataattagagggcaaaatggagacgaaagatggcttgacaaccaaccaaattacatctctccaagtcaatatgttgatgttccagagggagataccaactatctcaatgacacagaatcaagtgatggaagcgctctaagagatcagatcgctcttcagatgtgggcttcctacaatatatagatttttgaataaaggatgatttggaacaatgtgtacgagaaaggcttagtcgatgtgatgcatgatcacaaagataatccaaaattcaaaggtcaaaatggttggaatcgtgatggatggaatagtatcactaccaagttcaatgaaaagttccctctagctcatttctctaaacaacaactgcaagagaaggagagagagcttaaaggatactacaaggcaataagggattcaagaaaagaaagcggggttggttggaatgacaccctatgcatggtactagctgaaccagaagtttggccaaggctgattcgcgtatcaaagtttcgcaataggccattccctcttttttacagtttagaagggctatatgaaggtagtgtggctaccggagagttgaatttcacatcaaccgctgttgatcttcctccaccttcagctccatccaggagtgtgtctggacaaagtctcagtcctttgagtactaattcacttgatttggatggacaagaaaccacaagtgtgttcaatctatcttgtgatgctcaatctgtccgagtcaatactaatgaacccactgaagctcaatttgtcccatctaatcaagaatcaagccagagagaaggtggcagtgggagaaagcgtaagcaaagccatgttggattagctcttgaaagttatgtggagtttaaaaagatccaaaatacagaaacacttgaaactcttaaagaacataagaggcaagaggatcaattttctattagcaagtgtcaggctgaattgaaaggaatggatggattaacagcagtagacaaatcatatgctttggagcttttcgtatctgtgacaaaccgagaaattttcttaacaacaacagagcatgatgttagagaaatttggctcaagcgcaaaattaggttgcttcgtggtagtgatgcatggcctgaacaaatgatatgagcaaatttgacaactgcagttctgttatggtgaatggtgattgtagttcagtttcagctctaacctatggaaaattgaatggcagttgcactaatctgttggtggaatgattttcccagtaatttcctggacaagcagatcactgagaaccatttaccttatgagaaatgatgccctgtatggttcagtatagttcttgtattgctagtttaaattaattcttgtatggcagttgcactaaactgaatggcagctgaactttgagatatgcttctattgttggtttaaaaccatggtgatgactgttcttgtatgcattctgtatgcattcttgtttataacctggttgcttatgtatgcattcttgtatgccgtgtatgcatggtgactgttcttatatgtgttcgtgtatgcaatctgccccaaactgaatgtcatacggaaaaatgtcaccggtatgagttcgtgtatgtatttagttttgtactaaactggatcactagtacaaaaagg

SEQ ID NO: 80304 - DNA, 4142 bp, Zea Mays
atggcacagggaggtgggcaagatcaccgccgcggacagtggcggatgcacaggaaactaaaatggaaaaagaaagaaaaatatatctggactggacgagatgacgagtggacgctaaggcccatcacccatgacacagcagagagcacgccgctccttggtctggcccgtcgcgcgcagatccgtagcccaccgcgcgcgtcggaaactgagagtctgagagccgccctagtgccctgccgccgccacccttcaggacgctactcttattttaataagatcgtgtctcaaaaatggatattaagaatcataaaagctgttcggagcagctgccgtagttctatcttcactctcaaatcactgtaccgactagcgacaacgtcttgtagccaaaatcacgtcagcctgggctcgcactcgcacgcgcaaatcccactacatgtatacatacatatgatggaagcccaatctcgtgcagagattcgtcccattttcctgtcggaaacaaccctggccttaggaggccaggcgattctccgccgcctcgtctcgtctttgctatgcgccacgagcgcctccgccgctccaacgctccaacgccctgagcgcctccaacaccactccaacgccacgagcgcctccgccgctccaccgaacaactccaacgccactccagctcttgcagcagtagaactctactgcagccagctacgacaccctgcgcttgccgcactaggtacgtttgattctggtttctgccgcacaagatccgttacctcttggacccggacatctacaccgacgacaggatctccgtgcagggcatcgacgccgtgctcttcgtgccggatgacgccaaggccacgcagaccgccgacccgaacaggaagcctcccgccattgtcacccacaagaagaagatcaagctccggtgaggttagtacctacctaccttcagatctggacctgctcctttgtgtcctccgccaacccgaacaggaagtatcccaccactgcattgtccttttttcaataatagcaccgaaatttacagctcgtaatatctagattagggaggtcattacgtcaaaaaaaagaagattggggaggtgtgtagattagtttcacaactgatcgctagcatcaatcaatgccagttcatctattggtcagaatgttgccggtgagtgatgagtcctgggtagtagaataaagacgaacgcattggcataaaatagaaacaacaattcgagttccttattactttcctattgacatggccgtattggatttggaggaaggcatatgggcctgtcggtgcccgtctggacattttctaccatcactgaactacaactactgtagtttccgtaggtttttttataccatgtgtgacagatgctcaaccttagtattggccaacgtgaaaacatggaggtgaagtgaagcaagtggtagttgagcatatgctggtggctggttgtcttcatgaacatctctttgatggctgacaccgttcctgggactgcaagccaacactgtcctttaacccatgacccatgagcaacaatttcttctttttcatagtttaggtggaagtatcatgccgaagccttagtcacgtccttgctttgttgtccttgttttcatagtttaggtcgagtggtagctaattaaattggttatgggtacaggtagggcaaggccgaattgtgtgccttgtagggaaaataacaatcgttggtagtattacaaactgcagaaattccatgttttgcattatctccatgttttgcatgattaagatccttataagagctatctccacttctctagatatgggttcttgggagaagcaagttagacaatttttgttagatgaggaagaagacgatgatgagttgttctttgttattctccctgctataattccatacctctcagaagagaaagagcccatccacacctcctcactcactggcgctaaaaagcttcctagctctgtccacactcatacaaaaatcgcaacagattctaggttcatgccattttttcagaactgcattggtgcaatcgacggtacacatatacccatcaccatagcagaacatagggcccctccatatagaaacaggaaaggaactctttcacacaatgttatggtagcctgggacttcgacctcaatttcacatttgtttcatgtggatgggaggggtcagcctcagatgcaggggtgcctcgatctgctattagcaaaggatttagtgtgccagaaggaaagttttatctagtagatggtggttatgcaaatacgtcatccttcattgcaccgtatagaggggttcgataccatctcaacgagtttaggaggcgtcgttcatcacaaagtggttatgcgaactacagagagttgttcaaccaccgccatgcaattctccgtaaccatatagagagggccatcggtgttctaaagaaaaggttcccgattctaaaagtaggcacatttcatcccatagagaaccaaatcaagatcacagctgcaactgttgcatttcacaacataattagagggcaaaatggagacgaaagatggcttgacaaccaaccaaattacatctctccaagtcaatatgttgatgttccagagggagataccaactatctcaatgacacagaatcaaggatgatttggaacaatgtgtacgagaaaggcttagtcgatgtgatgcatgatcacaaagataatccaaaattcaaaggtcaaaatggttggaatcgtgatggatggaatagtatcactaccaagttcaatgaaaagttccctctagctcatttctctaaacaacaactgcaagagaaggagagagagcttaaaggatactacaaggcaataagggattcaagaaaagaaagcggggttggttggaatgacaccctatgcatggtactagctgaaccagaagtttggccaaggctgattcgcgtatcaaagtttcgcaataggccattccctcttttttacagtttagaagggctatatgaaggtagtgtggctaccggagagttgaatttcacatcaaccgctgttgatcttcctccaccttcagctccatccaggagtgtgtctggacaaagtctcagtcctttgagtactaattcacttgatttggatggacaagaaaccacaagtgtgttcaatctatcttgtgatgctcaatctgtccgagtcaatactaatgaacccactgaagctcaatttgtcccatctaatcaagaatcaagccagagagaaggtggcagtgggagaaagcgtaagcaaagccatgttggattagctcttgaaagttatgtggagtttaaaaagatccaaaatacagaaacacttgaaactcttaaagaacataagaggcaagaggatcaattttctattagcaagtgtcaggctgaattgaaaggaatggatggattaacagcagtagacaaatcatatgctttggagcttttcgtatctgtgacaaaccgagaaattttcttaacaacaacagagcatgatgttagagaaatttggctcaagcgcaaaattaggttgcttcgtggtagtgatgcatggcctgaacaaatgatatgagcaaatttgacaactgcagttctgttatggtgaatggtgattgtagttcagtttcagctctaacctatggaaaattgaatggcagttgcactaatctgttggtggaatgattttcccagtaatttcctggacaagcagatcactgagaaccatttaccttatgagaaatgatgccctgtatggttcagtatagttcttgtattgctagtttaaattaattcttgtatggcagttgcactaaactgaatggcagctgaactttgagatatgcttctattgttggtttaaaaccatggtgatgactgttcttgtatgcattctgtatgcattcttgtttataacctggttgcttatgtatgcattcttgtatgccgtgtatgcatggtgactgttcttatatgtgttcgtgtatgcaatctgccccaaactgaatgtcatacggaaaaatgtcaccggtatgagttcgtgtatgtatttagttttgtactaaactggatcactagtacaaaaagg

SEQ ID NO: 80305 - DNA, 4207 bp, Zea Mays
atggcacagggaggtgggcaagatcaccgccgcggacagtggcggatgcacaggaaactaaaatggaaaaagaaagaaaaatatatctggactggacgagatgacgagtggacgctaaggcccatcacccatgacacagcagagagcacgccgctccttggtctggcccgtcgcgcgcagatccgtagcccaccgcgcgcgtcggaaactgagagtctgagagccgccctagtgccctgccgccgccacccttcaggacgctactcttattttaataagatcgtgtctcaaaaatggatattaagaatcataaaagctgttcggagcagctgccgtagttctatcttcactctcaaatcactgtaccgactagcgacaacgtcttgtagccaaaatcacgtcagcctgggctcgcactcgcacgcgcaaatcccactacatgtatacatacatatgatggaagcccaatctcgtgcagagattcgtcccattttcctgtcggaaacaaccctggccttaggaggccaggcgattctccgccgcctcgtctcgtctttgctatgcgccacgagcgcctccgccgctccaacgctccaacgccctgagcgcctccaacaccactccaacgccacgagcgcctccgccgctccaccgaacaactccaacgccactccagctcttgcagcagtagaactctactgcagccagggcatcgacgccgtgctcttcgtgccggatgacgccaaggccacgcagaccgccgacccgaacaggaagcctcccgccattgtcacccacaagaagaagatcaagctccggtgaggttagtacctacctaccttcagatctggacctgctcctttgtgtcctccgccaacccgaacaggaagtatcccaccactgcattgtccttttttcaataatagcaccgaaatttacagctcgtaatatctagattagggaggtcattacgtcaaaaaaaagaagattggggaggtgtgtagattagtttcacaactgatcgctagcatcaatcaatgccagttcatctattggtcagaatgttgccggtgagtgatgagtcctgggtagtagaataaagacgaacgcattggcataaaatagaaacaacaattcgagttccttattactttcctattgacatggccgtattggatttggaggaaggcatatgggcctgtcggtgcccgtctggacattttctaccatcactgaactacaactactgtagtttccgtaggtttttttataccatgtgtgacagatgctcaaccttagtattggccaacgtgaaaacatggaggtgaagtgaagcaagtggtagttgagcatatgctggtggctggttgtcttcatgaacatctctttgatggctgacaccgttcctgggactgcaagccaacactgtcctttaacccatgacccatgagcaacaatttcttctttttcatagtttaggtggaagtatcatgccgaagccttagtcacgtccttgctttgttgtccttgttttcatagtttaggtcgagtggtagctaattaaattggttatgggtacaggtagggcaaggccgaattgtgtgccttgtagggaaaataacaatcgttggtagtattacaaactgcagaaattccatgttttgcattatctccatgttttgcatgattaagatccttataagagctatctccacttctctagatatgggttcttgggagaagcaagttagacaatttttgttagatgaggaagaagacgatgatgagttgttctttgttattctccctgctataattccatacctctcagaagagaaagagcccatccacacctcctcactcactggcgctaaaaagcttcctagctctgtccacactcatacaaaaatcgcaacagattctaggttcatgccattttttcagaactgcattggtgcaatcgacggtacacatatacccatcaccatagcagaacatagggcccctccatatagaaacaggaaaggaactctttcacacaatgttatggtagcctgggacttcgacctcaatttcacatttgtttcatgtggatgggaggggtcagcctcagatgcaggggtgcctcgatctgctattagcaaaggatttagtgtgccagaaggaaagttttatctagtagatggtggttatgcaaatacgtcatccttcattgcaccgtatagaggggttcgataccatctcaacgagtttaggaggcgtcgttcatcacaaagtggttatgcgaactacagagagttgttcaaccaccgccatgcaattctccgtaaccatatagagagggccatcggtgttctaaagaaaaggttcccgattctaaaagtaggcacatttcatcccatagagaaccaaatcaagatcacagctgcaactgttgcatttcacaacataattagagggcaaaatggagacgaaagatggcttgacaaccaaccaaattacatctctccaagtcaatatgttgatgttccagagggagataccaactatctcaatgacacagaatcaagtgatggaagcgctctaagagatcagatcgctcttcagatgtgggcttcctacaatatatagatttttgaataaaggatgatttggaacaatgtgtacgagaaaggcttagtcgatgtgatgcatgatcacaaagataatccaaaattcaaaggtcaaaatggttggaatcgtgatggatggaatagtatcactaccaagttcaatgaaaagttccctctagctcatttctctaaacaacaactgcaagagaaggagagagagcttaaaggatactacaaggcaataagggattcaagaaaagaaagcggggttggttggaatgacaccctatgcatggtactagctgaaccagaagtttggccaaggctgattcgcgtaagcaaactttctttgtataattctatctttgtgcattcaatatgttcgcttttgctactaataatatatttcatgttgcatttaattggctcacccaaaggtatcaaagtttcgcaataggccattccctcttttttacagtttagaagggctatatgaaggtagtgtggctaccggagagttgaatttcacatcaaccgctgttgatcttcctccaccttcagctccatccaggagtgtgtctggacaaagtctcagtcctttgagtactaattcacttgatttggatggacaagaaaccacaagtgtgttcaatctatcttgtgatgctcaatctgtccgagtcaatactaatgaacccactgaagctcaatttgtcccatctaatcaagaatcaagccagagagaaggtggcagtgggagaaagcgtaagcaaagccatgttggattagctcttgaaagttatgtggagtttaaaaagatccaaaatacagaaacacttgaaactcttaaagaacataagaggcaagaggatcaattttctattagcaagtgtcaggctgaattgaaaggaatggatggattaacagcagtagacaaatcatatgctttggagcttttcgtatctgtgacaaaccgagaaattttcttaacaacaacagagcatgatgttagagaaatttggctcaagcgcaaaattaggttgcttcgtggtagtgatgcatggcctgaacaaatgatatgagcaaatttgacaactgcagttctgttatggtgaatggtgattgtagttcagtttcagctctaacctatggaaaattgaatggcagttgcactaatctgttggtggaatgattttcccagtaatttcctggacaagcagatcactgagaaccatttaccttatgagaaatgatgccctgtatggttcagtatagttcttgtattgctagtttaaattaattcttgtatggcagttgcactaaactgaatggcagctgaactttgagatatgcttctattgttggtttaaaaccatggtgatgactgttcttgtatgcattctgtatgcattcttgtttataacctggttgcttatgtatgcattcttgtatgccgtgtatgcatggtgactgttcttatatgtgttcgtgtatgcaatctgccccaaactgaatgtcatacggaaaaatgtcaccggtatgagttcgtgtatgtatttagttttgtactaaactggatcactagtacaaaaagg

SEQ ID NO: 80306 - DNA, 4400 bp, Zea Mays
atggcacagggaggtgggcaagatcaccgccgcggacagtggcggatgcacaggaaactaaaatggaaaaagaaagaaaaatatatctggactggacgagatgacgagtggacgctaaggcccatcacccatgacacagcagagagcacgccgctccttggtctggcccgtcgcgcgcagatccgtagcccaccgcgcgcgtcggaaactgagagtctgagagccgccctagtgccctgccgccgccacccttcaggacgctactcttattttaataagatcgtgtctcaaaaatggatattaagaatcataaaagctgttcggagcagctgccgtagttctatcttcactctcaaatcactgtaccgactagcgacaacgtcttgtagccaaaatcacgtcagcctgggctcgcactcgcacgcgcaaatcccactacatgtatacatacatatgatggaagcccaatctcgtgcagagattcgtcccattttcctgtcggaaacaaccctggccttaggaggccaggcgattctccgccgcctcgtctcgtctttgctatgcgccacgagcgcctccgccgctccaacgctccaacgccctgagcgcctccaacaccactccaacgccacgagcgcctccgccgctccaccgaacaactccaacgccactccagctcttgcagcagtagaactctactgcagccagctacgacaccctgcgcttgccgcactagggcatcgacgccgtgctcttcgtgccggatgacgccaaggccacgcagaccgccgacccgaacaggaagcctcccgccattgtcacccacaagaagaagatcaagctccggtgaggttagtacctacctaccttcagatctggacctgctcctttgtgtcctccgccaacccgaacaggaagtatcccaccactgcattgtccttttttcaataatagcaccgaaatttacagctcgtaatatctagattagggaggtcattacgtcaaaaaaaagaagattggggaggtgtgtagattagtttcacaactgatcgctagcatcaatcaatgccagttcatctattggtcagaatgttgccggtgagtgatgagtcctgggtagtagaataaagacgaacgcattggcataaaatagaaacaacaattcgagttccttattactttcctattgacatggccgtattggatttggaggaaggcatatgggcctgtcggtgcccgtctggacattttctaccatcactgaactacaactactgtagtttccgtaggtttttttataccatgtgtgacagatgctcaaccttagtattggccaacgtgaaaacatggaggtgaagtgaagcaagtggtagttgagcatatgctggtggctggttgtcttcatgaacatctctttgatggctgacaccgttcctgggactgcaagccaacactgtcctttaacccatgacccatgagcaacaatttcttctttttcatagtttaggtggaagtatcatgccgaagccttagtcacgtccttgctttgttgtccttgttttcatagtttaggtcgagtggtagctaattaaattggttatgggtacaggtagggcaaggccgaattgtgtgccttgtagggaaaataacaatcgttggtagtattacaaactgcagaaattccatgttttgcattatctccatgttttgcatgattaagatccttataagagctatctccacttctctagatatgggttcttgggagaagcaagttagacaatttttgttagatgaggaagaagacgatgatgagttgttctttgttattctccctgctataattccatacctctcagaagagaaagagcccatccacacctcctcactcactggcgctaaaaaggttagagaaattcttaaaggacatgagagttggtgcaaatccgagtttagaatggagccaacaatattcaaaaccatatcaaattttcttagaagagacaatttactgcgagacacacaagcaacttgggatgttcatgtacatgatctcccacaatgctagtaaccaaatgctgcagaaggcttttcaacatagtggagagactatccatagaaaaatatctgaagtatttgatcttgttcccacactaactcagtgttttgtgaagcttcctagctctgtccacactcatacaaaaatcgcaacagattctaggttcatgccattttttcagaactgcattggtgcaatcgacggtacacatatacccatcaccatagcagaacatagggcccctccatatagaaacaggaaaggaactctttcacacaatgttatggtagcctgggacttcgacctcaatttcacatttgtttcatgtggatgggaggggtcagcctcagatgcaggggtgcctcgatctgctattagcaaaggatttagtgtgccagaaggaaagttttatctagtagatggtggttatgcaaatacgtcatccttcattgcaccgtatagaggggttcgataccatctcaacgagtttaggaggcgtcgttcatcacaaagtggttatgcgaactacagagagttgttcaaccaccgccatgcaattctccgtaaccatatagagagggccatcggtgttctaaagaaaaggttcccgattctaaaagtaggcacatttcatcccatagagaaccaaatcaagatcacagctgcaactgttgcatttcacaacataattagagggcaaaatggagacgaaagatggcttgacaaccaaccaaattacatctctccaagtcaatatgttgatgttccagagggagataccaactatctcaatgacacagaatcaagtgatggaagcgctctaagagatcagatcgctcttcagatgtgggcttcctacaatatatagatttttgaataaaggatgatttggaacaatgtgtacgagaaaggcttagtcgatgtgatgcatgatcacaaagataatccaaaattcaaaggtcaaaatggttggaatcgtgatggatggaatagtatcactaccaagttcaatgaaaagttccctctagctcatttctctaaacaacaactgcaagagaaggagagagagcttaaaggatactacaaggcaataagggattcaagaaaagaaagcggggttggttggaatgacaccctatgcatggtactagctgaaccagaagtttggccaaggctgattcgcgtatcaaagtttcgcaataggccattccctcttttttacagtttagaagggctatatgaaggtagtgtggctaccggagagttgaatttcacatcaaccgctgttgatcttcctccaccttcagctccatccaggagtgtgtctggacaaagtctcagtcctttgagtactaattcacttgatttggatggacaagaaaccacaagtgtgttcaatctatcttgtgatgctcaatctgtccgagtcaatactaatgaacccactgaagctcaatttgtcccatctaatcaagaatcaagccagagagaaggtggcagtgggagaaagcgtaagcaaagccatgttggattagctcttgaaagttatgtggagtttaaaaagatccaaaatacagaaacacttgaaactcttaaagaacataagaggcaagaggatcaattttctattagcaagtgtcaggctgaattgaaaggaatggatggattaacagcagtagacaaatcatatgctttggagcttttcgtatctgtgacaaaccgagaaattttcttaacaacaacagagcatgatgttagagaaatttggctcaagcgcaaaattaggttgcttcgtggtagtgatgcatggcctgaacaaatgatatgagcaaatttgacaactgcagttctgttatggtgaatggtgattgtagttcagtttcagctctaacctatggaaaattgaatggcagttgcactaatctgttggtggaatgattttcccagtaatttcctggacaagcagatcactgagaaccatttaccttatgagaaatgatgccctgtatggttcagtatagttcttgtattgctagtttaaattaattcttgtatggcagttgcactaaactgaatggcagctgaactttgagatatgcttctattgttggtttaaaaccatggtgatgactgttcttgtatgcattctgtatgcattcttgtttataacctggttgcttatgtatgcattcttgtatgccgtgtatgcatggtgactgttcttatatgtgttcgtgtatgcaatctgccccaaactgaatgtcatacggaaaaatgtcaccggtatgagttcgtgtatgtatttagttttgtactaaactggatcactagtacaaaaagg

SEQ ID NO: 80307 - DNA, 3158 bp, Zea Mays
atggcacagggaggtgggcaagatcaccgccgcggacagtggcggatgcacaggaaactaaaatggaaaaagaaagaaaaatatatctggactggacgagatgacgagtggacgctaaggcccatcacccatgacacagcagagagcacgccgctccttggtctggcccgtcgcgcgcagatccgtagcccaccgcgcgcgtcggaaactgagagtctgagagccgccctagtgccctgccgccgccacccttcaggacgctactcttattttaataagatcgtgtctcaaaaatggatattaagaatcataaaagctgttcggagcagctgccgtagttctatcttcactctcaaatcactgtaccgactagcgacaacgtcttgtagccaaaatcacgtcagcctgggctcgcactcgcacgcgcaaatcccactacatgtatacatacatatgatggaagcccaatctcgtgcagagattcgtcccattttcctgtcggaaacaaccctggccttaggaggccaggcgattctccgccgcctcgtctcgtctttgctatgcgccacgagcgcctccgccgctccaacgctccaacgccctgagcgcctccaacaccactccaacgccacgagcgcctccgccgctccaccgaacaactccaacgccactccagctcttgcagcagtagaactctactgcagccagggcatcgacgccgtgctcttcgtgccggatgacgccaaggccacgcagaccgccgacccgaacaggaagcctcccgccattgtcacccacaagaagaagatcaagctccggtgaggtgaagcttcctagctctgtccacactcatacaaaaatcgcaacagattctaggttcatgccattttttcagaactgcattggtgcaatcgacggtacacatatacccatcaccatagcagaacatagggcccctccatatagaaacaggaaaggaactctttcacacaatgttatggtagcctgggacttcgacctcaatttcacatttgtttcatgtggatgggaggggtcagcctcagatgcaggggtgcctcgatctgctattagcaaaggatttagtgtgccagaaggaaagttttatctagtagatggtggttatgcaaatacgtcatccttcattgcaccgtatagaggggttcgataccatctcaacgagtttaggaggcgtcgttcatcacaaagtggttatgcgaactacagagagttgttcaaccaccgccatgcaattctccgtaaccatatagagagggccatcggtgttctaaagaaaaggttcccgattctaaaagtaggcacatttcatcccatagagaaccaaatcaagatcacagctgcaactgttgcatttcacaacataattagagggcaaaatggagacgaaagatggcttgacaaccaaccaaattacatctctccaagtcaatatgttgatgttccagagggagataccaactatctcaatgacacagaatcaagtgatggaagcgctctaagagatcagatcgctcttcagatgtgggcttcctacaatatatagatttttgaataaaggatgatttggaacaatgtgtacgagaaaggcttagtcgatgtgatgcatgatcacaaagataatccaaaattcaaaggtcaaaatggttggaatcgtgatggatggaatagtatcactaccaagttcaatgaaaagttccctctagctcatttctctaaacaacaactgcaagagaaggagagagagcttaaaggatactacaaggcaataagggattcaagaaaagaaagcggggttggttggaatgacaccctatgcatggtactagctgaaccagaagtttggccaaggctgattcgcgtaagcaaactttctttgtataattctatctttgtgcattcaatatgttcgcttttgctactaataatatatttcatgttgcatttaattggctcacccaaaggtatcaaagtttcgcaataggccattccctcttttttacagtttagaagggctatatgaaggtagtgtggctaccggagagttgaatttcacatcaaccgctgttgatcttcctccaccttcagctccatccaggagtgtgtctggacaaagtctcagtcctttgagtactaattcacttgatttggatggacaagaaaccacaagtgtgttcaatctatcttgtgatgctcaatctgtccgagtcaatactaatgaacccactgaagctcaatttgtcccatctaatcaagaatcaagccagagagaaggtggcagtgggagaaagcgtaagcaaagccatgttggattagctcttgaaagttatgtggagtttaaaaagatccaaaatacagaaacacttgaaactcttaaagaacataagaggcaagaggatcaattttctattagcaagtgtcaggctgaattgaaaggaatggatggattaacagcagtagacaaatcatatgctttggagcttttcgtatctgtgacaaaccgagaaattttcttaacaacaacagagcatgatgttagagaaatttggctcaagcgcaaaattaggttgcttcgtggtagtgatgcatggcctgaacaaatgatatgagcaaatttgacaactgcagttctgttatggtgaatggtgattgtagttcagtttcagctctaacctatggaaaattgaatggcagttgcactaatctgttggtggaatgattttcccagtaatttcctggacaagcagatcactgagaaccatttaccttatgagaaatgatgccctgtatggttcagtatagttcttgtattgctagtttaaattaattcttgtatggcagttgcactaaactgaatggcagctgaactttgagatatgcttctattgttggtttaaaaccatggtgatgactgttcttgtatgcattctgtatgcattcttgtttataacctggttgcttatgtatgcattcttgtatgccgtgtatgcatggtgactgttcttatatgtgttcgtgtatgcaatctgccccaaactgaatgtcatacggaaaaatgtcaccggtatgagttcgtgtatgtatttagttttgtactaaactggatcactagtacaaaaagg

SEQ ID NO: 80308 - DNA, 4560 bp, Zea Mays
atggcacagggaggtgggcaagatcaccgccgcggacagtggcggatgcacaggaaactaaaatggaaaaagaaagaaaaatatatctggactggacgagatgacgagtggacgctaaggcccatcacccatgacacagcagagagcacgccgctccttggtctggcccgtcgcgcgcagatccgtagcccaccgcgcgcgtcggaaactgagagtctgagagccgccctagtgccctgccgccgccacccttcaggacgctactcttattttaataagatcgtgtctcaaaaatggatattaagaatcataaaagctgttcggagcagctgccgtagttctatcttcactctcaaatcactgtaccgactagcgacaacgtcttgtagccaaaatcacgtcagcctgggctcgcactcgcacgcgcaaatcccactacatgtatacatacatatgatggaagcccaatctcgtgcagagattcgtcccattttcctgtcggaaacaaccctggccttaggaggccaggcgattctccgccgcctcgtctcgtctttgctatgcgccacgagcgcctccgccgctccaacgctccaacgccctgagcgcctccaacaccactccaacgccacgagcgcctccgccgctccaccgaacaactccaacgccactccagctcttgcagcagtagaactctactgcagccaggtacgtttgattctggtttctgccgcacaagatccgttacctcttggacccggacatctacaccgacgacaggatctccgtgcagggcatcgacgccgtgctcttcgtgccggatgacgccaaggccacgcagaccgccgacccgaacaggaagcctcccgccattgtcacccacaagaagaagatcaagctccggtgaggttagtacctacctaccttcagatctggacctgctcctttgtgtcctccgccaacccgaacaggaagtatcccaccactgcattgtccttttttcaataatagcaccgaaatttacagctcgtaatatctagattagggaggtcattacgtcaaaaaaaagaagattggggaggtgtgtagattagtttcacaactgatcgctagcatcaatcaatgccagttcatctattggtcagaatgttgccggtgagtgatgagtcctgggtagtagaataaagacgaacgcattggcataaaatagaaacaacaattcgagttccttattactttcctattgacatggccgtattggatttggaggaaggcatatgggcctgtcggtgcccgtctggacattttctaccatcactgaactacaactactgtagtttccgtaggtttttttataccatgtgtgacagatgctcaaccttagtattggccaacgtgaaaacatggaggtgaagtgaagcaagtggtagttgagcatatgctggtggctggttgtcttcatgaacatctctttgatggctgacaccgttcctgggactgcaagccaacactgtcctttaacccatgacccatgagcaacaatttcttctttttcatagtttaggtggaagtatcatgccgaagccttagtcacgtccttgctttgttgtccttgttttcatagtttaggtcgagtggtagctaattaaattggttatgggtacaggtagggcaaggccgaattgtgtgccttgtagggaaaataacaatcgttggtagtattacaaactgcagaaattccatgttttgcattatctccatgttttgcatgattaagatccttataagagctatctccacttctctagatatgggttcttgggagaagcaagttagacaatttttgttagatgaggaagaagacgatgatgagttgttctttgttattctccctgctataattccatacctctcagaagagaaagagcccatccacacctcctcactcactggcgctaaaaaggttagagaaattcttaaaggacatgagagttggtgcaaatccgagtttagaatggagccaacaatattcaaaaccatatcaaattttcttagaagagacaatttactgcgagacacacaagcaacttgggatgttcatgtacatgatctcccacaatgctagtaaccaaatgctgcagaaggcttttcaacatagtggagagactatccatagaaaaatatctgaagtatttgatcttgttcccacactaactcagtgttttgtgaagcttcctagctctgtccacactcatacaaaaatcgcaacagattctaggttcatgccattttttcagaactgcattggtgcaatcgacggtacacatatacccatcaccatagcagaacatagggcccctccatatagaaacaggaaaggaactctttcacacaatgttatggtagcctgggacttcgacctcaatttcacatttgtttcatgtggatgggaggggtcagcctcagatgcaggggtgcctcgatctgctattagcaaaggatttagtgtgccagaaggaaagttttatctagtagatggtggttatgcaaatacgtcatccttcattgcaccgtatagaggggttcgataccatctcaacgagtttaggaggcgtcgttcatcacaaagtggttatgcgaactacagagagttgttcaaccaccgccatgcaattctccgtaaccatatagagagggccatcggtgttctaaagaaaaggttcccgattctaaaagtaggcacatttcatcccatagagaaccaaatcaagatcacagctgcaactgttgcatttcacaacataattagagggcaaaatggagacgaaagatggcttgacaaccaaccaaattacatctctccaagtcaatatgttgatgttccagagggagataccaactatctcaatgacacagaatcaagtgatggaagcgctctaagagatcagatcgctcttcagatgtgggcttcctacaatatatagatttttgaataaaggatgatttggaacaatgtgtacgagaaaggcttagtcgatgtgatgcatgatcacaaagataatccaaaattcaaaggtcaaaatggttggaatcgtgatggatggaatagtatcactaccaagttcaatgaaaagttccctctagctcatttctctaaacaacaactgcaagagaaggagagagagcttaaaggatactacaaggcaataagggattcaagaaaagaaagcggggttggttggaatgacaccctatgcatggtactagctgaaccagaagtttggccaaggctgattcgcgtaagcaaactttctttgtataattctatctttgtgcattcaatatgttcgcttttgctactaataatatatttcatgttgcatttaattggctcacccaaaggtatcaaagtttcgcaataggccattccctcttttttacagtttagaagggctatatgaaggtagtgtggctaccggagagttgaatttcacatcaaccgctgttgatcttcctccaccttcagctccatccaggagtgtgtctggacaaagtctcagtcctttgagtactaattcacttgatttggatggacaagaaaccacaagtgtgttcaatctatcttgtgatgctcaatctgtccgagtcaatactaatgaacccactgaagctcaatttgtcccatctaatcaagaatcaagccagagagaaggtggcagtgggagaaagcgtaagcaaagccatgttggattagctcttgaaagttatgtggagtttaaaaagatccaaaatacagaaacacttgaaactcttaaagaacataagaggcaagaggatcaattttctattagcaagtgtcaggctgaattgaaaggaatggatggattaacagcagtagacaaatcatatgctttggagcttttcgtatctgtgacaaaccgagaaattttcttaacaacaacagagcatgatgttagagaaatttggctcaagcgcaaaattaggttgcttcgtggtagtgatgcatggcctgaacaaatgatatgagcaaatttgacaactgcagttctgttatggtgaatggtgattgtagttcagtttcagctctaacctatggaaaattgaatggcagttgcactaatctgttggtggaatgattttcccagtaatttcctggacaagcagatcactgagaaccatttaccttatgagaaatgatgccctgtatggttcagtatagttcttgtattgctagtttaaattaattcttgtatggcagttgcactaaactgaatggcagctgaactttgagatatgcttctattgttggtttaaaaccatggtgatgactgttcttgtatgcattctgtatgcattcttgtttataacctggttgcttatgtatgcattcttgtatgccgtgtatgcatggtgactgttcttatatgtgttcgtgtatgcaatctgccccaaactgaatgtcatacggaaaaatgtcaccggtatgagttcgtgtatgtatttagttttgtactaaactggatcactagtacaaaaagg

SEQ ID NO: 80309 - DNA, 1111 bp, Zea Mays
ctctgacacaagtgttcctgctgaaaggaaagagaatctgcagtgcttgccggccggcccgtccctgccctgcagagcgcggggatctgcaggcatcatggtgcaatcaaagaagaagttccgcggcgtcaggcagcgccactggggctcctgggtctccgagatcaggcacccgctgcttaagaggagggtgtggctgggcaccttcgagacggcagaggaggcggcgcgggcgtacgacgaggccgccgtcctcatgagcggccgcaacgccaagaccaacttccccgtgccaaggagcggcaccggggagctgctggcccctgcagtgccggccgcacgggaggcgcgtggtggcggcggcggcggcaccagcctgtcgcagatcctcagcgccaagctccgcaggtgctgcaagacgccgtcgccgtcgctcacctgcctccgcctcgacccggagaagtcccacattggcgtctggcagaagcgcgccggcgcgcgcgccgactccagctgggtcatgaccgtcgagctcagcaaggacgcgccgccgccgccgtcctccggcgaggagcccgcgcccagctacggcggcgcggccaccacgcccacgtcgtccactgtcacggccgggtcgcctccacctgagatgatggatgacgaggagagtgttgcgctgcagatgatcgaggagctgctgggatcacatgggatgatgctccagggtgcagcaggcagcctcgtcatctgaaggaaaccgcatggttctacaagctattatgatatgatcaggacatcatcatcaggtcactgtcccagatcagaccaagcagttaagattgcatcatatatatataatatatataggtacacctctattactacatcaagcttaggaaaaaaccatatagtaagatgaatcactactgtgtgaagctctgtaattatatatattaaaggcttttacttgtataagcatatgcagacccacagtcatggtagtcacactgtaataccacccctttatttgttatgtatcaacaatataatatcaggctatatatatatcagcatcagcgggccggtgttattgtgtttggccatgcattat

SEQ ID NO: 80310 - DNA, 1388 bp, Zea Mays
aaggtcaccctgacagaacagcaacttggacgcagcgcagccgtggcactgcacgcgcacgcacagcacaacacaacacacagccggccgggggcgtcgtcgctgtatctaaccgcattaacgctgccctgcggacgcaagtacagtgcgggggtagcgctaaaatattcaccggaatggaagggaaagagggccggccggccggcatctacacatacccacccccactccctgatccggaggcactcactcactcgcatcactgactgactggactgctgctcactccttccttccttcccctggcagagaatctgcagtgcttgccggccggcccgtccctgccctgcagagcgcggggatctgcaggcatcatggtgcaatcaaagaagaagttccgcggcgtcaggcagcgccactggggctcctgggtctccgagatcaggcacccgctgcttaagaggagggtgtggctgggcaccttcgagacggcagaggaggcggcgcgggcgtacgacgaggccgccgtcctcatgagcggccgcaacgccaagaccaacttccccgtgccaaggagcggcaccggggagctgctggcccctgcagtgccggccgcacgggaggcgcgtggtggcggcggcggcggcaccagcctgtcgcagatcctcagcgccaagctccgcaggtgctgcaagacgccgtcgccgtcgctcacctgcctccgcctcgacccggagaagtcccacattggcgtctggcagaagcgcgccggcgcgcgcgccgactccagctgggtcatgaccgtcgagctcagcaaggacgcgccgccgccgccgtcctccggcgaggagcccgcgcccagctacggcggcgcggccaccacgcccacgtcgtccactgtcacggccgggtcgcctccacctgagatgatggatgacgaggagagtgttgcgctgcagatgatcgaggagctgctgggatcacatgggatgatgctccagggtgcagcaggcagcctcgtcatctgaaggaaaccgcatggttctacaagctattatgatatgatcaggacatcatcatcaggtcactgtcccagatcagaccaagcagttaagattgcatcatatatatataatatatataggtacacctctattactacatcaagcttaggaaaaaaccatatagtaagatgaatcactactgtgtgaagctctgtaattatatatattaaaggcttttacttgtataagcatatgcagacccacagtcatggtagtcacactgtaataccacccctttatttgttatgtatcaacaatataatatcaggctatatatatatcagcatcagcgggccggtgttattgtgtttggccatgcattat

SEQ ID NO: 80311 - DNA, 2335 bp, Zea Mays
cccccggcccgaacggcagtcccccgcattcccctaacgttcaatcgcgtaccgtcgctcgccgtattcccctgccgcgcacagttcactcgcgcacctctcgccccctcgctctacgacgactagtgggccgccggcgctggcgccgccttacgccaggtgccgaggtcttcgttgatctcttcgccggcgacgagcacccaccagctgggaaaaaatctatagccaaacataataatggctatgattgatgaacctctctacccgattgctgtactgattgatgaactgaaaaatgaagatattcagttgcgccttaactccatcaaaaagctttctacaattgcccgggcattgggtgaagaaagaacaaggaaagagctgattccattccttagtgaaaacaacgatgatgaagatgaggtgcttcttgcaatggcagaagagttgggcgtttttattccttatgttggaggagtagagcatgcacatgttttgcttccaccactggaaacattgtgtactgtggaggagacctgcgtcagagacaaggctgtggaatcactttgtcagataggagcacagatgaaggaaaatgatattgtggactggtttgcccatgtcgtaaagttatgtcaagacgacatgcctatggtacggagagctgctgcatccaatcttgggaagttcgctgcaacagtggaacaaagtcatttgaagacagaaatcatgtcaatgtttgatgatctaactcaagatgaccaagattcagtgcgactattggcagttgagggttgtgctgctcttgggaagttgttggagccccaagattgtgcagcacatattctcccagttattgtaaatttctctcaggataaatcttggcgtgtgcgctatatggtggcaaatcaactgtatgaactatgtgaagctgttggtactgaacccacaaggggtgatctggtgtcagcgtatgttcgccttctctgtgacaatgaggctgaagtgcggattgcagctgctggaaaagttacaaaattctgcaaaatattaaacccacaaattgcaattgaacatattcttccgtgtatcaaggaattatcatcagattcatctcagcatgttcgttcagctttggcatcggttattatgggaatggctcctgtattgggaaaggacgccactcttgaacaactgcttcccatttttctttctttgctgaaggatgagttccctgatgttcgactcaacattataagcaaacttgatcaagttaaccaggttattggaattgacttgttgtcgcaatcacttctgccagccattgtagagctctctgaagataggcactggagagttcggcttgccataattgagtacatacctttgttggccagccagttaggtgttggtttttttgatgacaagttaggggcactttgcatgcagtggttggaagataaggttttctcgatcagagatgctggtgccaataatttaaagcgtttgacagaggaatttggccctgagtgggcgatgcaacatataattcctcaggttttggagaagataaacaacccacattatctgtatcggatgaccactttgcaagctatttctttgctagctcctgtcatgggtcctgatatcacatgccaacagttgctccctgtcgtcattgcttcttcaaaggacagggttccgaacatgaaattcaatgttgctaaagtcctgcaatcacttgtaccaatccttgaccaatctgttgtggagaagacagtgaaaccatgcctagttgagctcagtgaggacccagatgtagatgtaagatactacgcacaccaagcccttcgggcgtgtgaccaaatggtgatatctagttgactagcctgtccaggaattagcaaatgagatacatattggtctattctttttgaacattttaaagtgttatgtagtcttaaaaattattgtaccaccaatgaagttgatgcatctttttattaattatgtgttttttgatttaggtttagtttagtttttggatttaatcaaccatgggaagtaggtgcacacatgatatttgtgtgattgacctgtgcatgtcttgtgctgttggtaggtcactagtgtaagcacattattttatagtctgctttgcttagcgttgtgcgcggaaactgtatgcgttgcttgttcagacatgaagtttgcgcagaaattgtgtactctctcgtccctccaattttgaggtaattggagagggataactggagaaaacactgagatagtcctgtctcaacccttgactctgaactaaacaactttatttgag

SEQ ID NO: 80312 - DNA, 2359 bp, Zea Mays
cccccggcccgaacggcagtcccccgcattcccctaacgttcaatcgcgtaccgtcgctcgccgtattcccctgccgcgcacagttcactcgcgcacctctcgccccctcgctctacgacgactagtgggccgccggcgctggcgccgccttacgccaggtgccgaggtcttcgttgatctcttcgccggcgacgagcacccaccagctgggaaaaaatctatagccaaacataataatggctatgattgatgaacctctctacccgattgctgtactgattgatgaactgaaaaatgaagatattcagttgcgccttaactccatcaaaaagctttctacaattgcccgggcattgggtgaagaaagaacaaggaaagagctgattccattccttagtgaaaacaacgatgatgaagatgaggtgcttcttgcaatggcagaagagttgggcgtttttattccttatgttggaggagtagagcatgcacatgttttgcttccaccactggaaacattgtgtactgtggaggagacctgcgtcagagacaaggctgtggaatcactttgtcagataggagcacagatgaaggaaaatgatattgtggactggtttgcccatgtcgtaaagaggttggcggtaggtgagtggtttacagctcgagtttcttcatgtggcctttttcatatcgcctatcctagtgcacctgaacaactgaaggcagaactgaggacaatttatggccagttatgtcaagacgacatgcctatggtacggagagctgctgcatccaatcttgggaagttcgctgcaacagtggaacaaagtcatttgaagacagaaatcatgtcaatgtttgatgatctaactcaagatgaccaagattcagtgcgactattggcagttgagggttgtgctgctcttgggaagttgttggagccccaagattgtgcagcacatattctcccagttattgtaaatttctctcaggataaatcttggcgtgtgcgctatatggtggcaaatcaactgtatgaactatgtgaagctgttggtactgaacccacaaggggtgatctggtgtcagcgtatgttcgccttctctgtgacaatgaggctgaagtgcggattgcagctgctggaaaagttacaaaattctgcaaaatattaaacccacaaattgcaattgaacatattcttccgtgtatcaaggaattatcatcagattcatctcagcatgttcgttcagctttggcatcggttattatgggaatggctcctgtattgggaaaggacgccactcttgaacaactgcttcccatttttctttctttgctgaaggatgagttccctgatgttcgactcaacattataagcaaacttgatcaagttaaccaggttattggaattgacttgttgtcgcaatcacttctgccagccattgtagagctctctgaagataggcactggagagttcggcttgccataattgagtacatacctttgttggccagccagttaggtgttggtttttttgatgacaagttaggggcactttgcatgcagtggttggaagataaggttttggagaagataaacaacccacattatctgtatcggatgaccactttgcaagctatttctttgctagctcctgtcatgggtcctgatatcacatgccaacagttgctccctgtcgtcattgcttcttcaaaggacagggttccgaacatgaaattcaatgttgctaaagtcctgcaatcacttgtaccaatccttgaccaatctgttgtggagaagacagtgaaaccatgcctagttgagctcagtgaggacccagatgtagatgtaagatactacgcacaccaagcccttcgggcgtgtgaccaaatggtgatatctagttgactagcctgtccaggaattagcaaatgagatacatattggtctattctttttgaacattttaaagtgttatgtagtcttaaaaattattgtaccaccaatgaagttgatgcatctttttattaattatgtgttttttgatttaggtttagtttagtttttggatttaatcaaccatgggaagtaggtgcacacatgatatttgtgtgattgacctgtgcatgtcttgtgctgttggtaggtcactagtgtaagcacattattttatagtctgctttgcttagcgttgtgcgcggaaactgtatgcgttgcttgttcagacatgaagtttgcgcagaaattgtgtactctctcgtccctccaattttgaggtaattggagagggataactggagaaaacactgagatagtcctgtctcaacccttgactctgaactaaacaactttatttgag

SEQ ID NO: 80313 - DNA, 2156 bp, Zea Mays
atacacatccgcgcatattcccttccctccccttcttcccccgtcgcctttccctcccccgtccgctgcattccttcccgtcccatccccgagcagaaaccaaccccaccaccaccgcgccctcctcctccgcgtcccagccccacgccgcggcgcccgcggggaagagagcgggatgcgagccggtgcggaaggcggggcccgtgaccatggagcacgtgctgctagcgctccatgagacggaggccgagcgggaggcgcggatccgggacatgtttgccttcttcgacaccgcgggcagtgggcagctcgactacgcgcagatcgaggctggcctcgccgctctgcaggtgcccgccgagtgcaagtacgcgagggagctgctccgcgcctgcgaccgcgatcgcgacggccgcgtcggctacgatgacttcaggcgctacatggatgacaaagagctcgagctctaccgcatcttccaggccatagacgtcgagcacaacggatgcatcctccccgaggagctctgggacgcgctcatcaaggctgaatcacatatgatgaagatctgattacctcctgtgtctagatttctgaaaatcgcctcatgatctttgcttcgctgctagcgcttttgatatactcttctatgtctttgtgaccaggttatttcaagcttcagttaaatttgtatatataatctatcttacaagcaatgtcagtttgctgtctgcaggtatagagattaatgatgaagagctggcaagatttgttgagcatgtggataaggacaacaatgggattattacttttgaagaatggagagattttcttctactgtaccccaatgaggcgaccattgagaacatttatcatcactgggaaagagtctgccttgttgatataggtgaacaggctgctataccagaaggcataagtaaacatgtcaatgcaagcaaatatcttattgctggagggattgctggtgcagcatctcgtactgcaactgctcctctggatcgcctcaaagtgatcatgcaagtacaaacaacacgtacttcagtcatgcatgcaattaaagatatctggactaaaggtggcatgctgggattttttagagggaatggattgaatgttgtaaaagttgctccagaaagtgcaataagattttatgcctatgaaatgttaaaagaatatattatgaagagaaaaggagaaaataagagtgaagttggtgcttctgaacgtctcattgctggtggtttagcaggtgcagtggctcaaacagcaatttatcctatagagttagtaaagactcgtctacagacttattcaggtgaggttggttatgttcctagaattggtcagctctcaagggatattttggtgcatgaaggtccccgagctttttatagaggtcttgttccatctttgcttggtatcgtaccttatgctggaattgatcttgctgtatatgagactttgaaagatgtgtcgaagacatatatactgaaggacagtgatcctggtcctctagtacagcttggttgtgggacggtctctggagccctaggggcaacatgtgtttaccctttacaggttatcagaacaagactgcaagctcaacaagccaattcagaatctgcctatagaggaatgtctgatgtcttttggagaaccctacatcatgagggtgtttctggattctacaagggaattctaccaaatctccttaaagtggtgcctgctgcaagtattacctatctagtttacgaggcgatgaagaaaaatttgtctcttgattaaattgtggagttgttggtgggaaaaacagccatcattattggcatggctgactgtagagataatgacgacacatgaattttactggttgaatagttcctttttgaagataaagatggtgccttcaatatagaactagaagcaacggtggcattttcctcctaattttgattcagcagaaatgaagtgataattatgagatcatcgagacatccatgcctggcatactggttagtgtgcaagcccgaggcttccccaaatttactgagaatagctctcgacaattgtagatcaccatcagatggcttgagaaagaggactacatcatccgcataaagagagagccgctgaat

SEQ ID NO: 80314 - DNA, 2500 bp, Zea Mays
atacacatccgcgcatattcccttccctccccttcttcccccgtcgcctttccctcccccgtccgctgcattccttcccgtcccatccccgagcagaaaccaaccccaccaccaccgcgccctcctcctccgcgtcccagccccacgccgcggcgcccgcggggaagagagcgggatgcgagccggtgcggaaggcggggcccgtgaccatggagcacgtgctgctagcgctccatgagacggaggccgagcgggaggcgcggatccgggacatgtttgccttcttcgacaccgcgggcagtgggcagctcgactacgcgcagatcgaggctggcctcgccgctctgcaggtgcccgccgagtgcaagtacgcgagggagctgctccgcgcctgcgaccgcgatcgcgacggccgcgtcggctacgatgacttcaggcgctacatggatgacaaagagctcgagctctaccgcatcttccaggccatagacgtcgagcacaacggatgcatcctccccgaggagctctgggacgcgctcatcaaggctgtttgctgtctgcaggtatagagattaatgatgaagagctggcaagatttgttgagcatgtggataaggacaacaatgggattattacttttgaagaatggagagattttcttctactgtaccccaatgaggcgaccattgagaacatttatcatcactgggaaagagtctgccttgttgatataggtgaacaggctgctataccagaaggcataagtaaacatgtcaatgcaagcaaatatcttattgctggagggattgctggtgcagcatctcgtactgcaactgctcctctggatcgcctcaaagtgatcatgcaagtacaaacaacacgtacttcagtcatgcatgcaattaaagatatctggactaaaggtggcatgctgggattttttagagggaatggattgaatgttgtaaaagttgctccagaaagtgcaataagattttatgcctatgaaatgttaaaagaatatattatgaagagaaaaggagaaaataagagtgaagttggtgcttctgaacgtctcattgctggtggtttagcaggtgcagtggctcaaacagcaatttatcctatagagttagtaaagactcgtctacagacttattcaggtgaggttggttatgttcctagaattggtcagctctcaagggatattttggtgcatgaaggtccccgagctttttatagaggtcttgttccatctttgcttggtatcgtaccttatgctggaattgatcttgctgtatatgagactttgaaagatgtgtcgaagacatatatactgaaggacagtgatcctggtcctctagtacagcttggttgtgggacggtctctggagccctaggggcaacatgtgtttaccctttacaggttatcagaacaagactgcaagctcaacaagccaattcagaatctgcctatagaggaatgtctgatgtcttttggagaaccctacatcatgagggtgtttctggattctacaagggaattctaccaaatctccttaaagtggtgcctgctgcaagtattacctatctagtttacgaggcgatgaagaaaaatttgtctcttgattaaattgtggagttgttggtgggaaaaacagccatcattattggcatggctgactgtagagataatgacgacacatgaattttactggttgaatagttcctttttgaagataaagatggtgccttcaatatagaactagaagcaacggtggcattttcctcctaattttgattcagcagaaatgaagtgataattatgagatcatcgagacatccatgcctggcatactgcttacgacaccatcgacaccgagttaactgttcatgaatttccgaaggcttgttttatcccccgtctggggcgagttttgttagtctgtaacacactgggaaactctcctaacttaattgcaatcccttgtgctcctcaacttgactggagctgtgacatttgctgacagccaaaaaaaaaacccggcaaaaagggtgctggtgatacctgtacgtattttccacggcgacttggcataaatcaatgcctagtgaatgtaataatccgcccgttcccgttagtcttacttatggtttccaatgaccctgttgcatatatttgcattgccaaagcaaggtgtgtgtgcataaaaagtgccaaagcagatggcaaacaactcacaaggtgcataaggggtttgtagacaaccgcaaggtgcaaaagctgcttagtgcttcatgaggaacatgagcatgccccccacgttgtacgggtaggttcgtgaaataggagtggtaacggatcatgatttaaatgatttttttacaatttatttgagtctttaattaattttagttcaaaaataaataaaaatagacctgatcttaatgcaacctgatccttatattttgtagtgtaaagtttagagtccattactag

SEQ ID NO: 80315 - DNA, 1988 bp, Zea Mays
ccttgtgttaactgtgattgaatgatgcgtgcattctgaatgttttcaatggtatagagattaatgatgaagagctggcaagatttgttgagcatgtggataaggacaacaatgggattattacttttgaagaatggagagattttcttctactgtaccccaatgaggcgaccattgagaacatttatcatcactgggaaagagtctgccttgttgatataggtgaacaggctgctataccagaaggcataagtaaacatgtcaatgcaagcaaatatcttattgctggagggattgctggtgcagcatctcgtactgcaactgctcctctggatcgcctcaaagtgatcatgcaagtacaaacaacacgtacttcagtcatgcatgcaattaaagatatctggactaaaggtggcatgctgggattttttagagggaatggattgaatgttgtaaaagttgctccagaaagtgcaataagattttatgcctatgaaatgttaaaagaatatattatgaagagaaaaggagaaaataagagtgaagttggtgcttctgaacgtctcattgctggtggtttagcaggtgcagtggctcaaacagcaatttatcctatagagttagtaaagactcgtctacagacttattcaggtgaggttggttatgttcctagaattggtcagctctcaagggatattttggtgcatgaaggtccccgagctttttatagaggtcttgttccatctttgcttggtatcgtaccttatgctggaattgatcttgctgtatatgagactttgaaagatgtgtcgaagacatatatactgaaggacagtgatcctggtcctctagtacagcttggttgtgggacggtctctggagccctaggggcaacatgtgtttaccctttacaggttatcagaacaagactgcaagctcaacaagccaattcagaatctgcctatagaggaatgtctgatgtcttttggagaaccctacatcatgagggtgtttctggattctacaagggaattctaccaaatctccttaaagtggtgcctgctgcaagtattacctatctagtttacgaggcgatgaagaaaaatttgtctcttgattaaattgtggagttgttggtgggaaaaacagccatcattattggcatggctgactgtagagataatgacgacacatgaattttactggttgaatagttcctttttgaagataaagatggtgccttcaatatagaactagaagcaacggtggcattttcctcctaattttgattcagcagaaatgaagtgataattatgagatcatcgagacatccatgcctggcatactgcttacgacaccatcgacaccgagttaactgttcatgaatttccgaaggcttgttttatcccccgtctggggcgagttttgttagtctgtaacacactgggaaactctcctaacttaattgcaatcccttgtgctcctcaacttgactggagctgtgacatttgctgacagccaaaaaaaaaacccggcaaaaagggtgctggtgatacctgtacgtattttccacggcgacttggcataaatcaatgcctagtgaatgtaataatccgcccgttcccgttagtcttacttatggtttccaatgaccctgttgcatatatttgcattgccaaagcaaggtgtgtgtgcataaaaagtgccaaagcagatggcaaacaactcacaaggtgcataaggggtttgtagacaaccgcaaggtgcaaaagctgcttagtgcttcatgaggaacatgagcatgccccccacgttgtacgggtaggttcgtgaaataggagtggtaacggatcatgatttaaatgatttttttacaatttatttgagtctttaattaattttagttcaaaaataaataaaaatagacctgatcttaatgcaacctgatccttatattttgtagtgtaaagtttagagtccattactag

SEQ ID NO: 80316 - DNA, 1055 bp, Zea Mays
gcctctgcctcagctgaatcctccctccggctcctagtagattcctaaccccctcccccaatcccagcctgacaccggtccacggcagaatcccattccgattcctccctccccgtcccgtctcccctctcgccctaggggccggggggttagggttcgcttcaccgccggcctctccctccgacgcggcaccggcccccgcgcaccgggcccggatgctatgctgctgagctgcaggaccctctccacctgggtgcgccgcctcgtcgcttgcatgggaggttgctttggatgctgtgctaagccaactccaataatagcagtagacgagccttccaagcggttgaggatccaggggcgatcagtaaggaaggctagcctctcggaggacttttggagcacgagtgcgcatgagatggagaacagcgggatccaatcgcagaggagcatgtcttcgatcagcacgttggctcagtccagcgatcagcatacggcaggaagtagcagcaacccgaatgagtttatgaatcaaggtcttatgctctggaaccagaccagacaacagtgggttggaagcaaaaaacgccactctagatctcaacagcctcgagaaccaaagttgagttggaacacaacgtatgaaagtctgctaggaagcaataagccattctcccaaccgatacctcttggcatttgcttgtggacgcttgggagcaagaaggcctttatgattaggcctgtggagttcattatttgactcggattaatcgcttaatgcagaagctctaggttctcaagcgttatattttctgagcacaatggtgtaccatggatgtatcatgaaacatggcagcatccttatattaagcaattgtaatatattattcctgtcaagcttatgagaacattggatgacattgtacctggtgtttttatatgaaaactttgggtgatctaggcaactggattaaaacaaaaaaggggcatgccttgttgtaaactgagccatgggaagtgaaattaattgaaaacagaagaaatgtgaagttattgcc

SEQ ID NO: 80317 - DNA, 1039 bp, Zea Mays
gcctctgcctcagctgaatcctccctccggctcctagtagattcctaaccccctcccccaatcccagcctgacaccggtccacggcagaatcccattccgattcctccctccccgtcccgtctcccctctcgccctaggggccggggggttagggttcgcttcaccgccggcctctccctccgacgcggcaccggcccccgcgcaccgggcccggatgctatgctgctgagctgcaggaccctctccacctggaggttgctttggatgctgtgctaagccaactccaataatagcagtagacgagccttccaagcggttgaggatccaggggcgatcagtaaggaaggctagcctctcggaggacttttggagcacgagtgcgcatgagatggagaacagcgggatccaatcgcagaggagcatgtcttcgatcagcacgttggctcagtccagcgatcagcatacggcaggaagtagcagcaacccgaatgagtttatgaatcaaggtcttatgctctggaaccagaccagacaacagtgggttggaagcaaaaaacgccactctagatctcaacagcctcgagaaccaaagttgagttggaacacaacgtatgaaagtctgctaggaagcaataagccattctcccaaccgatacctcttggcgaaatggtagatttgcttgtggacgcttgggagcaagaaggcctttatgattaggcctgtggagttcattatttgactcggattaatcgcttaatgcagaagctctaggttctcaagcgttatattttctgagcacaatggtgtaccatggatgtatcatgaaacatggcagcatccttatattaagcaattgtaatatattattcctgtcaagcttatgagaacattggatgacattgtacctggtgtttttatatgaaaactttgggtgatctaggcaactggattaaaacaaaaaaggggcatgccttgttgtaaactgagccatgggaagtgaaattaattgaaaacagaagaaatgtgaagttattgcc

SEQ ID NO: 80318 - DNA, 2268 bp, Zea Mays
acgaattgcgcccaacttgggcaacttgccttccttgttcgccaccacataaaaagccagcgccaccgggcactccttccccaccgcaccaccaccaccacctcctcctcttccccaaacccgtccgttcccttcccttcatccggctcctccgccattttttccctgtcgcggtaagcgatagggttcggcttcggcgtccgacctctaaatccgccctcggatccagtggtgcagttgcttctccgcctcttcttcgttttgcttcttccggcgttctcggagcaacctttggcttcgtcgacggcgttctcggtcctttgcggcccgacatgtctccgttccagggatacagaggcgatggggttctcgccggcgtccggtcgcggaagcgcgtgttcgcgacggcggccgctgagcccgtgacggcggcggccaagagacagaagcgcagggatgagccatccctggacgcggtgccggacgagtgcctcttcgaggtcctgcgccgcgtgcagggcacccgcgcgcgctgcgcgtcggcctgcgtctcccgccgctggctcgcgctcctcgctggcatccgcgcctctgaggccgtgctcgccccggccgcccccgccgtgccggacctcaaccaggagtacctcagcgaggacgacgaggccgatctgatggaccacgacggcgacgcccgcgagaggaccctcgagggcatgttggccacggacgcgcgcctcacggcggcggccgtggccggccgtctggcttccgtctccgtccgcgggagccacccggcgcgtggcgtcaccgacgccggcgtctgtgctctcgcccgcggctgcccagagctccgctcccttaccctgtgggatgttccgcaggtgacggatgccgggctcgccgagatcgccgccgagtgccactcgctggagcggctcgacatcactggctgccctatgatcacggacaagggcctcgtcgctgtggcccagggttgcccggaactgaagtcgctcaccatcgaggcctgctccggcgtggctaacgagggtctcaaggcaattggccggtgctgcgccaagctacaggcggttagcgtcaagaactgcgcacatgtcgacgaccagggtgtgtctggcctcgtctgctctgcgacagcctcgttggcaaaggtccggcttcagggtttgaacatcactgatgcttctctcgccgtgattgggtactatgggaagtcaatcaaggacctgaccctcgctcgcctccctgctgtcggcgagaggggattttgggtgatggccaatgccctcggcctgcagaagctcaggtgtatgactgtcgtctcctgcccgggactcacggatctcgcccttgcatctgtcgccaagttcagcccaagcttgaagactgtgaacctcaagaagtgcagcaaggtctcagacggatgcctcaaggaattcgcagaatcgtccagggtcctggagagtttgcagatcgaggagtgcagcaaggttactcttgtgggcattcttgctttcctcctgaactgcaaccccaagttcaaggctctctccttgtccaagtgcatcgggatcaaggacatctgctcggcacctgcgcagctcccagtatgcaagtcgctgcgttccctgaccatcaaggattgcccaggattcacggacgctagccttgccgtggtgggcatgatctgccctcagttggagagcatcgatctgagcggtctcggtgcagtcaccgacaacggcttccttccgttgatgaagaagggttcggagagtgggctggtccgtgtgggcttgaacggctgcgagagcctcacggacgcggcggtttccgccttggcgaaggcccacggcgcttctcttgcgcaccttagcctggagggatgcagcaagatcactgacgccagcctgttcgccatctccgagagctgcagccagcttgccgagcttgatctctccaactgcatggtgagcgactacggtgtcgcggtcctggcagcggcgaggcagctcaagctgcgtgtcctctcgctgtctggctgtatgaaggtgacacagaagagcgttcctttcttgggcagcatgtcttcatccttggaggcgctgaatctccagttcaacttcatcggtaaccacaacatcgcttccttggagaagcagctctggcggtgcgacatccttgcttagagggaacaagggcgattggttgctggagactctgggaaagactaatggttgcacc

SEQ ID NO: 80319 - DNA, 1227 bp, Zea Mays
agaaaggtccccgtagaaattcgaaaccacaccaccacctggaaacccagacaaagcacgagccacgcacggcccccgctgcctcccttccgccgccgccgccgccggcggcgcgccaccgtcgctgctctcccgccttcaccgcgcccaactccaatccttgcctcccccgcgcgcttcagcctcttcactccccatcgttttcgcctggccagtctagtttgacgcggattcatttgctggtcggcatagcatgatcctgcggtgattgcggatagcttgtgcaagctggtggcttgggtgttgtctttttaatctggcctaaagatatcctgagacggtagcgtcacatggatgctagtacagaggttactgatgctattggtgcggtgggctttgacaatggggccgcggggaagttgccgcccagtgatagtgtagaggggcacgcagaagaacacgatgtgctggctgatggagcccattcgggcgagagcgaggtgatcaacccatctgaagaagtagaaatggaagccacctcgcagtcccaggacataaagcctcgagttcctgagggggttcaaggccattcaatgaaggttggtactaaatctcagcgacagagccctcgaggcggggataagagtcaaactaggaaaagctcttttagtccttcttatcctaaggcgcccattgcacgggtttctgatccagatctagttgattgctctttgagcaatggtgatgctggttccagtaagaaaaaggccgaaaagagcagtttccgcccagttgccaaggagaccccatcacttgaggactcaaatgagaagaaaaaaactcagaaggcatcaaaccaacattctgtcaaaaaggatattgaagaagaatcaaatgaaagtgtgaaacctcaaagggttggcagcactccttcatatggatttagttttaagtgtgatgagagagctgaaaaacgaagagagttctactcaaagctcgaggagaagattcatgcacaggaactagagaaaagcaacttgcaggcaaaatcaaaggaaactgaagaagctgaactcaaaatgctgagaaagagtttaaatttcaaggcaacaccaatgcccagcttttataaggaaccacctccccccaaggttgagttgaagaagtgcggtgctccagccgccaacctacagacgcatcgcgcccacacgccacagccgtggtgcc

SEQ ID NO: 80320 - DNA, 1409 bp, Zea Mays
agaaaggtccccgtagaaattcgaaaccacaccaccacctggaaacccagacaaagcacgagccacgcacggcccccgctgcctcccttccgccgccgccgccgccggcggcgcgccaccgtcgctgctctcccgccttcaccgcgcccaactccaatccttgcctcccccgcgcgcttcagcctcttcactccccatcgttttcgcctggccagacctcgcctgccttacgcctccggtcggattcttcgccgtccttgtccccactgggcaccgctggggtggagcggagatcggatccgccgggagctgattccttctctcgcagtctagtttgacgcggattcatttgctggtcggcatagcatgatcctgcggtgattgcggatagcttgtgcaagctggtggcttgggtgttgtctttttaatctggcctaaagatatcctgagacggtagcgtcacatggatgctagtacagaggttactgatgctattggtgcggtgggctttgacaatggggccgcggggaagttgccgcccagtgatagtgtagaggggcacgcagaagaacacgatgtgctggctgatggagcccattcgggcgagagcgaggtgatcaacccatctgaagaagtagaaatggaagccacctcgcagtcccaggacataaagcctcgagttcctgagggggttcaaggccattcaatgaaggttggtactaaatctcagcgacagagccctcgaggcggggataagagtcaaactaggaaaagctcttttagtccttcttatcctaaggcgcccattgcacgggtttctgatccagatctagttgattgctctttgagcaatggtgatgctggttccagtaagaaaaaggccgaaaagagcagtttccgcccagttgccaaggagaccccatcacttgaggactcaaatgagaagaaaaaaactcagaaggcatcaaaccaacattctgtcaaaaaggatattgaagaagaatcaaatgaaagtgtgaaacctcaaagggttggcagcactccttcatatggatttagttttaagtgtgatgagagagctgaaaaacgaagagagttctactcaaagctcgaggagaagattcatgcacaggaactagagaaaagcaacttgcaggcaaaatcaaaggaaactgaagaagctgaactcaaaatgctgagaaagagtttaaatttcaaggcaacaccaatgcccagcttttataaggaaccacctccccccaaggttgagttgaagaagtgcggtgctccagccgccaacctacagacgcatcgcgcccacacgccacagccgtggtgccgccagccgccagccgccgtcgaccgtcctccaccgccctcctggtccaggactccaggcgcaaccgccc

SEQ ID NO: 80321 - DNA, 1835 bp, Zea Mays
gcaggcagtaatcaagaggttcattgtgaaccactagaagttattcgtgaaagacactccacagaaccaaacatcaatgctgcagctattctaccatcaagacctgtgagcaatacatttaacctgcttctggaaggtgacatgaatccaagtcatggcaatgggcttgctgaaatagagaacataatcaaccagagatatttttctagggatgagacactacgtcttatagagatcatgcggtcaaggacttctgattttactgttgaagaccagagacctccagtatctactgcaaaaggttttgaaacaaaattttttacacctgccaaactgatcgaggctcagccatcttggaggactgatatcgttccatcatccaatgtgcatgatattggttcttcgccagttgaaattgccaaagcttttatggaagcgcagacctcagcttctgtacacgagtccaaaaagcggaaattcagagctttgagtcatggagttgcggttgacaattcgacatcagaagttttccctacaataactactgattcttctgtaagatggcctgactcagttgttcaaggtggtcccaattatcttacaccacaaagtaataaaggaaggactctgtctcagcctctttctcgcacaccatacaatagctcagttattcgaagatatattaagaacagcaggcatggtgatatgcacaataatggacagacacaatttcccactccattttctattggaagtaagagaatactagaggatacacatgtatcagcaagtggtggtatagcgcagccatcatcttccaggggacagatagatgtttttggttctattctaagagaaggttcgactgcaataaacaatgttgcattcaacctgcaagagtcagatggtaaaagcatgacagaaagcagaacaacttttggacgtgcttcaggtgtagacaatatctcaagggttgcttcagtatctgttcatcccaagtcaagcgaaacagcattcaaaatacttaagcaacttgacagaactattccttcccctacatcaaagccactagggctgagacagacattagccaagaaaaatactttttctgttgctacctacagacagattaaagagcctgatatcattatcggtaatgataataaacagagcagcattaatgagagtggtagtgctagctcggagactacatatggaaaaaaggttcagcaacctcaaagcagtcctatttcaggagagtcaagtgaaaaagtccagagaagcggagctaactcagatgtttatgaagcaggcacttctcagcgtcctctgaaatcaaatctaacacccacttcagtcgccgaggtcttggataataacaacaccagcaaaggtttcagcttcacatttcctattcctaaagctccaagctctctacttgaaccgcctcctacaccaaccatggcctcgccaccaaggaccttgccaatcactaacgaggatgttcccaagttcacctttggctcatccagcatggccaacaaactcgttttctccttcaactccacaagcagttctcctggtgctggtggaacagacccaaccttcaaatttggatctgataataagcgagagcttgtgttttgatacagtttttttttgatagacaccatgcccgcggatctgaactgtaccactctatctattcttggtgtaagacgtcttaagagagttggagtgtgctacttgagctacacaacatgacattcttttcattcattagcatattcaaacattacatattttagacgtcctgcgttggcaggacatttccc

SEQ ID NO: 80322 - DNA, 1724 bp, Zea Mays
aagaggttcattgtgaaccactagaagttattcgtgaaagacactccacagaaccaaacatcaatgctgcagctattctaccatcaagacctgtgagcaatacatttaacctgcttctggaaggtgacatgaatccaagtcatggcaatgggcttgctgaaatagagaacataatcaaccagagatatttttctagggatgagacactacgtcttatagagatcatgcggtcaaggacttctgattttactgttgaagaccagagacctccagtatctactgcaaaaggttttgaaacaaaattttttacacctgccaaactgatcgaggctcagccatcttggaggactgatatcgttccatcatccaatgtgcatgatattggttcttcgccagttgaaattgccaaagcttttatggaagcgcagacctcagcttctgtacacgagtccaaaaagcggaaattcagagctttgagtcatggagttgcggttgacaattcgacatcagaagttttccctacaataactactgattcttctgtaagatggcctgactcagttgttcaaggtggtcccaattatcttacaccacaaagtaataaaggaaggactctgtctcagcctctttctcgcacaccatacaatagctcagttattcgaagatatattaagaacagcaggcatggtgatatgcacaataatggacagacacaatttcccactccattttctattggaaagaatactagaggatacacatgtatcagcaagtggtggtatagcgcagccatcatcttccaggggacagatagatgtttttggttctattctaagagaaggtgtagacaatatctcaagggttgcttcagtatctgttcatcccaagtcaagcgaaacagcattcaaaatacttaagcaacttgacagaactattccttcccctacatcaaagccactagggctgagacagacattagccaagaaaaatactttttctgttgctacctacagacagattaaagagcctgatatcattatcggtaatgataataaacagagcagcattaatgagagtggtagtgctagctcggagactacatatggaaaaaaggttcagcaacctcaaagcagtcctatttcaggagagtcaagtgaaaaagtccagagaagcggagctaactcagatgtttatgaagcaggcacttctcagcgtcctctgaaatcaaatctaacacccacttcagtcgccgaggtcttggataataacaacaccagcaaaggtttcagcttcacatttcctattcctaaagctccaagctctctacttgaaccgcctcctacaccaaccatggcctcgccaccaaggaccttgccaatcactaacgaggatgttcccaagttcacctttggctcatccagcatggccaacaaactcgttttctccttcaactccacaagcagttctcctggtgctggtggaacagacccaaccttcaaatttggatctgataataagcgagagcttgtgttttgatacagtttttttttgatagacaccatgcccgcggatctgaactgtaccactctatctattcttggtgtaagacgtcttaagagagttggagtgtgctacttgagctacacaacatgacattcttttcattcattagcatattcaaacattacatattttagacgtcctgcgttggcaggacatttccc

SEQ ID NO: 80323 - DNA, 1242 bp, Zea Mays
cgacacgcacgcacagagcaccacaccaccgccacggcgcctgcccctgtcctgctacttccgcacccggctcggctgcttcctccccctcccactccactccgcgttttcaaaaatcaaaaccccagccggaacagcgaaaccccttccaccatagcccgtaggaaacggagcagcggttgcggtttctctctccgtcgctctcaccgctcgccgccgtctccgtatccggtccgcaaggcgggcctggcgtcaaggtcctccgctccgtccccttcactcgcgaccggagtcccctcttcgttggttcgccaatctacttcgtcggcccaccccttttcccccgatcgatctctcctcgctaagcgaactatcttgacctccctccctcgtgcgagattagccagtagaaagttccccgcttttcatccaggcacacttccaccacctcgctttgctgcttcactgcttgcttctgttgggcggagtgctaataggacggcacgggagtcaagattcctcctccttaacctgccctttcgtgttgccgttgttggtggtttggtttgtgattgcggtggcgctggagttgcggtgtgtgtgaagcgagggatccgagattcttgtggattctgttctacttttcgattgctgctgattctctctcccgtgcgacggcacaagcggcggtgtggggagagcatccgccgttgcccggccttggagggccccggtccgtctatggaacttgccgccccggtgccacgccccggcccggaactgaagtgctcagcaaggcgcttcttgcctgccactctcacgctgctggtgcctactgtggcagtcccctgtttggttcccgctcctcactgaccggctacggggctgcgataatggtgcctcagatggtgctgctcctttgctgctgtctcctggcgttcccgccacatgaatgttcaagctgggggttggattttacagcattgggctacagttcttttatgtagttttcattttttgagggccatagtgacttgaggacggcatacacatccgtagtaaagggtacaattgagcaagttagaatgttgctattgggaagttcacaatgaaaatccaaataatagtaccgctgcaataatctcttctcctgaggctgtcctgctttgctgcttaaaaccgtactcagttattgttctaaaaaatgattcatacctgctgaaaaccgttctcactctatct

SEQ ID NO: 80324 - DNA, 1020 bp, Zea Mays
atgaaaaattccgctttacatttcttgcgagagaagaagcaaagcctgtgttctgcttctgcattctggaaaaacagggtccacctccgtaaaaaaaaaaagaaagcctcgcgccgccgccgccgccgaggaaggttgaggaagaggatggccgagggcggggaagaagcccgccgccgtgctgcgatcgccgagtaccgcaagaagctcctcacctgccgggagctcgaggcgcgggtcaaaactgggagggagaatctaaaaaatgcaaagaaaaacttggaaaaaactgaagaggatctaaaatcactgcaaagtgttggtcaaattatcggtgaagtgcttcgacctttggacaaggaacgatttattgtcaaggctagcagcggaccacgttatgttgttgcctgccgaagtaaagttgacaaagaaaagttgattgctggtacacgagttgttcttgacatgacaacacttaccattatgcgcattctgccacgtgaggtcgaccctgtggtttacaacatgctacatgaagatcctggcaatgtaagttactcagctgtaggtgggttgtcagatcaaataagggaactcagagaatccattgaattacctcttatgaacccagaattgtttctccgtgtcgggattaaaccgccgaagggcgtgctgctctacggtccacctggaactgggaagacgctcctagctagagccattgctagcaacattgatgctaattttttgaaggtggtgtcaagtgctatcattgataaatacattggtgaaagtgcacgcttaattcgtgaaatgtttaactatgcacgtgagcatcagccatgcatcattttcatggatgaaattgatgccattggtggccgaagatttagtgagggcacaagtgcagatcgtgagattcagaggacattgatggagcttctaaatcagttagatggattcgatgagcttgggaagtgatgctgtaattttggtgtacaaagctagagactataaaga

SEQ ID NO: 80325 - DNA, 1565 bp, Zea Mays
atgaaaaattccgctttacatttcttgcgagagaagaagcaaagcctgtgttctgcttctgcattctggaaaaacagggtccacctccgtaaaaaaaaaaagaaagcctcgcgccgccgccgccgccgaggaaggttgaggaagaggatggccgagggcggggaagaagcccgccgccgtgctgcgatcgccgagtaccgcaagaagctcctcacctgccgggagctcgaggcgcgggtcaaaactgggagggagaatctaaaaaatgcaaagaaaaacttggaaaaaactgaagaggatctaaaatcactgcaaagtgttggtcaaattatcggtgaagtgcttcgacctttggacaaggaacgatttattgtcaaggctagcagcggaccacgttatgttgttgcctgccgaagtaaagttgacaaagaaaagttgattgctggtacacgagttgttcttgacatgacaacacttaccattatgcgcattctgccacgtgaggtcgaccctgtggtttacaacatgctacatgaagatcctggcaatgtggtgtcaagtgctatcattgataaatacattggtgaaagtgcacgcttaattcgtgaaatgtttaactatgcacgtgagcatcagccatgcatcattttcatggatgaaattgatgccattggtggccgaagatttagtgagggcacaagtgcagatcgtgagattcagaggacattgatggagcttctaaatcagttagatggattcgatgagcttgggaaggtgaaaatgatcatggcaaccaaccggcctgatgttttggatcctgcactccttcgacctggtcggttggacaggaagatcgagatcccactgccgaatgaacaagggaggatggaggtcctcaagattcatgcagctggcatcgcaaagcatggggagattgactatgaagctgtagtcaaactagctgagggcttcaatggagccgatatgcgcaacttgtgcacagaagccggcatggctgctatccgagcggagcgtgactatgtcattcacgaggacttcatgaaggctgtgcgcaagctgaatgatgccaagaagctcgagtccagtgcgcactacagtgctgacttcggcaaggattgaacggggtatcagtgtatcacctgatccggagctgttctgatcatattgcaaactgtgttaggctgtattcatcttatcctggatggaagaactctcatccagacgccctgggagcaagagcaagcaaactcttgatttttctaaattctatctgatatctgatagattccaggatggttgtggagggaaatttggcagttggatagattccaggatggatgtggagggacatctggcagttgggtcatggatgtagtctgtagacgtccaaattcatgtgaagctcttgttcttgctttttatctctcaatacagggtgcgttcttttgcttatggtatggatacatactcctttacattattttaggatatgaaaaaaaaatcaaagaaggctatttttaatatatattattatattatcatag

SEQ ID NO: 80326 - DNA, 1652 bp, Zea Mays
atgaaaaattccgctttacatttcttgcgagagaagaagcaaagcctgtgttctgcttctgcattctggaaaaacagggtccacctccgtaaaaaaaaaaagaaagcctcgcgccgccgccgccgccgaggaaggttgaggaagaggatggccgagggcggggaagaagcccgccgccgtgctgcgatcgccgagtaccgcaagaagctcctcacctgccgggagctcgaggcgcgggtcaaaactgggagggagaatctaaaaaatgcaaagaaaaacttggaaaaaactgaagaggatctaaaatcactgcaaagtgttggtcaaattatcggtgaagtgcttcgacctttggacaaggaacgatttattgtcaaggctagcagcggaccacgttatgttgttgcctgccgaagtaaagttgacaaagaaaagttgattgctggtacacgagttgttcttgacatgacaacacttaccattatgcgcattctgccacgtgaggtcgaccctgtggtttacaacatgctacatgaagatcctggcaatggcgtgctgctctacggtccacctggaactgggaagacgctcctagctagagccattgctagcaacattgatgctaattttttgaaggtggtgtcaagtgctatcattgataaatacattggtgaaagtgcacgcttaattcgtgaaatgtttaactatgcacgtgagcatcagccatgcatcattttcatggatgaaattgatgccattggtggccgaagatttagtgagggcacaagtgcagatcgtgagattcagaggacattgatggagcttctaaatcagttagatggattcgatgagcttgggaaggtgaaaatgatcatggcaaccaaccggcctgatgttttggatcctgcactccttcgacctggtcggttggacaggaagatcgagatcccactgccgaatgaacaagggaggatggaggtcctcaagattcatgcagctggcatcgcaaagcatggggagattgactatgaagctgtagtcaaactagctgagggcttcaatggagccgatatgcgcaacttgtgcacagaagccggcatggctgctatccgagcggagcgtgactatgtcattcacgaggacttcatgaaggctgtgcgcaagctgaatgatgccaagaagctcgagtccagtgcgcactacagtgctgacttcggcaaggattgaacggggtatcagtgtatcacctgatccggagctgttctgatcatattgcaaactgtgttaggctgtattcatcttatcctggatggaagaactctcatccagacgccctgggagcaagagcaagcaaactcttgatttttctaaattctatctgatatctgatagattccaggatggttgtggagggaaatttggcagttggatagattccaggatggatgtggagggacatctggcagttgggtcatggatgtagtctgtagacgtccaaattcatgtgaagctcttgttcttgctttttatctctcaatacagggtgcgttcttttgcttatggtatggatacatactcctttacattattttaggatatgaaaaaaaaatcaaagaaggctatttttaatatatattattatattatcatag

SEQ ID NO: 80327 - DNA, 1519 bp, Zea Mays
ggaagagaggaaaagagaaggcggatggcgggcctggaggtcgtagcggcggcggctggcagccactgcatctccgctaggctgtttctctgggttaaatctgcttgctcgagttcctttcaccgccagccatccatagctgccacccgccggcctcagtgccggaccggacaccgtcgagcgtctgcaccgcacctgcctgctcgcttcgagtctttactgctgtcacccgttcccatctggctgtctacctggtcgaccctgtggtttacaacatgctacatgaagatcctggcaatgtaagttactcagctgtaggtgggttgtcagatcaaataagggaactcagagaatccattgaattacctcttatgaacccagaattgtttctccgtgtcgggattaaaccgccgaagggcgtgctgctctacggtccacctggaactgggaagacgctcctagctagagccattgctagcaacattgatgctaattttttgaaggtggtgtcaagtgctatcattgataaatacattggtgaaagtgcacgcttaattcgtgaaatgtttaactatgcacgtgagcatcagccatgcatcattttcatggatgaaattgatgccattggtggccgaagatttagtgagggcacaagtgcagatcgtgagattcagaggacattgatggagcttctaaatcagttagatggattcgatgagcttgggaaggtgaaaatgatcatggcaaccaaccggcctgatgttttggatcctgcactccttcgacctggtcggttggacaggaagatcgagatcccactgccgaatgaacaagggaggatggaggtcctcaagattcatgcagctggcatcgcaaagcatggggagattgactatgaagctgtagtcaaactagctgagggcttcaatggagccgatatgcgcaacttgtgcacagaagccggcatggctgctatccgagcggagcgtgactatgtcattcacgaggacttcatgaaggctgtgcgcaagctgaatgatgccaagaagctcgagtccagtgcgcactacagtgctgacttcggcaaggattgaacggggtatcagtgtatcacctgatccggagctgttctgatcatattgcaaactgtgttaggctgtattcatcttatcctggatggaagaactctcatccagacgccctgggagcaagagcaagcaaactcttgatttttctaaattctatctgatatctgatagattccaggatggttgtggagggaaatttggcagttggatagattccaggatggatgtggagggacatctggcagttgggtcatggatgtagtctgtagacgtccaaattcatgtgaagctcttgttcttgctttttatctctcaatacagggtgcgttcttttgcttatggtatggatacatactcctttacattattttaggatatgaaaaaaaaatcaaagaaggctatttttaatatatattattatattatcatag

SEQ ID NO: 80328 - DNA, 1423 bp, Zea Mays
ctcagtgccggaccggacaccgtcgagcgtctgcaccgcacctgcctgctcgcttcgagtctttactgctgtcacccgttcccatctggctgtctacctggtcgaccctgtggtttacaacatgctacatgaagatcctggcaatgtaagttactcagctgtaggtgggttgtcagatcaaataagggaactcagagaatccattgaattacctcttatgaacccagaattgtttctccgtgtcgggattaaaccgccgaagggcgtgctgctctacggtccacctggaactgggaagacgctcctagctagagccattgctagcaacattgatgctaattttttgaaggtggtgtcaagtgctatcattgataaatacattggtgaaagtgcacgcttaattcgtgaaatgtttaactatgcacgtgagcatcagccatgcatcattttcatggatgaaattgatgccattggtggccgaagatttagtgagggcacaagtgcagatcgtgagattcagaggacattgatggagcttctaaatcagttagatggattcgatgagcttgggaagggctggtgcaagaaagttccatcagctcttggtcagggcttcggccttggatgtttaggtgaaaatgatcatggcaaccaaccggcctgatgttttggatcctgcactccttcgacctggtcggttggacaggaagatcgagatcccactgccgaatgaacaagggaggatggaggtcctcaagattcatgcagctggcatcgcaaagcatggggagattgactatgaagctgtagtcaaactagctgagggcttcaatggagccgatatgcgcaacttgtgcacagaagccggcatggctgctatccgagcggagcgtgactatgtcattcacgaggacttcatgaaggctgtgcgcaagctgaatgatgccaagaagctcgagtccagtgcgcactacagtgctgacttcggcaaggattgaacggggtatcagtgtatcacctgatccggagctgttctgatcatattgcaaactgtgttaggctgtattcatcttatcctggatggaagaactctcatccagacgccctgggagcaagagcaagcaaactcttgatttttctaaattctatctgatatctgatagattccaggatggttgtggagggaaatttggcagttggatagattccaggatggatgtggagggacatctggcagttgggtcatggatgtagtctgtagacgtccaaattcatgtgaagctcttgttcttgctttttatctctcaatacagggtgcgttcttttgcttatggtatggatacatactcctttacattattttaggatatgaaaaaaaaatcaaagaaggctatttttaatatatattattatattatcatag

SEQ ID NO: 80329 - DNA, 1083 bp, Zea Mays
ttcccatctggctgtctacctggtcgaccctgtggtttacaacatgctacatgaagatcctggcaatgtggtgtcaagtgctatcattgataaatacattggtgaaagtgcacgcttaattcgtgaaatgtttaactatgcacgtgagcatcagccatgcatcattttcatggatgaaattgatgccattggtggccgaagatttagtgagggcacaagtgcagatcgtgagattcagaggacattgatggagcttctaaatcagttagatggattcgatgagcttgggaaggtgaaaatgatcatggcaaccaaccggcctgatgttttggatcctgcactccttcgacctggtcggttggacaggaagatcgagatcccactgccgaatgaacaagggaggatggaggtcctcaagattcatgcagctggcatcgcaaagcatggggagattgactatgaagctgtagtcaaactagctgagggcttcaatggagccgatatgcgcaacttgtgcacagaagccggcatggctgctatccgagcggagcgtgactatgtcattcacgaggacttcatgaaggctgtgcgcaagctgaatgatgccaagaagctcgagtccagtgcgcactacagtgctgacttcggcaaggattgaacggggtatcagtgtatcacctgatccggagctgttctgatcatattgcaaactgtgttaggctgtattcatcttatcctggatggaagaactctcatccagacgccctgggagcaagagcaagcaaactcttgatttttctaaattctatctgatatctgatagattccaggatggttgtggagggaaatttggcagttggatagattccaggatggatgtggagggacatctggcagttgggtcatggatgtagtctgtagacgtccaaattcatgtgaagctcttgttcttgctttttatctctcaatacagggtgcgttcttttgcttatggtatggatacatactcctttacattattttaggatatgaaaaaaaaatcaaagaaggctatttttaatatatattattatattatcatag

SEQ ID NO: 80330 - DNA, 959 bp, Zea Mays
gtcggatcgacgccttgggggcgagcggcgccatgcatcattttcatggatgaaattgatgccattggtggccgaagatttagtgagggcacaagtgcagatcgtgagattcagaggacattgatggagcttctaaatcagttagatggattcgatgagcttgggaaggtgaaaatgatcatggcaaccaaccggcctgatgttttggatcctgcactccttcgacctggtcggttggacaggaagatcgagatcccactgccgaatgaacaagggaggatggaggtcctcaagattcatgcagctggcatcgcaaagcatggggagattgactatgaagctgtagtcaaactagctgagggcttcaatggagccgatatgcgcaacttgtgcacagaagccggcatggctgctatccgagcggagcgtgactatgtcattcacgaggacttcatgaaggctgtgcgcaagctgaatgatgccaagaagctcgagtccagtgcgcactacagtgctgacttcggcaaggattgaacggggtatcagtgtatcacctgatccggagctgttctgatcatattgcaaactgtgttaggctgtattcatcttatcctggatggaagaactctcatccagacgccctgggagcaagagcaagcaaactcttgatttttctaaattctatctgatatctgatagattccaggatggttgtggagggaaatttggcagttggatagattccaggatggatgtggagggacatctggcagttgggtcatggatgtagtctgtagacgtccaaattcatgtgaagctcttgttcttgctttttatctctcaatacagggtgcgttcttttgcttatggtatggatacatactcctttacattattttaggatatgaaaaaaaaatcaaagaaggctatttttaatatatattattatattatcatag

SEQ ID NO: 80331 - DNA, 243 bp, Zea Mays
tacagaaagaaaaatatgaacatgagatttaacattaatccatgcaccaatacccctgcttgccagtggatgatgcgatgctgatttctcatcatcaactgctcttcagcatacctcacaacactatcactaccaatgccaccttcaatattgtgaaaacattcaagggaactccttaatttctccaccttccgttgaataattttgagttcaagcctcttttcagaaatgatatcaagttct

SEQ ID NO: 80332 - DNA, 890 bp, Zea Mays
attcatttacttgtggacaacttttctttggtgactggattctaagcgaggctactcatcacctgtaactttggaagtgtgagttagttgacatactattcacttgtacctcgtgcgatttcttatacgtgtacttgtgtgcgttctatgggacgcactgagcccataaatcgattcgtgactatgtaggtatgtgtagtgctgttgtgtgtaccttgaatttctttctacatcttcctgtggtggcatagaatgcgtgcagtaagctgcattccaccaatggtcagattgatgcataaatcatcatgtgcgtggtgattcaggataaactaattgcctgattgggttttgggtgctgccaatttatctgcataagtttttgtattgttatcatacatctccataagcttttctaatctacacaagcttttctaactggtttgaatagagaataagattaacatcttatgaaggattgttgggatatataatagtgcaaatgtagttcaggcgaccttttggatctccctgcaattacttattaactagacgtataactcagatttacaagaaggcagaaaatgatgcaaaatctacgtgtccttttggatctcaccaattgtcagcacgtctgcttataacgaagttctagagaaggaaaagatggaatgaaactcaaattttggtggctgcataagtgtggagacttgaattcatatatacttagttaggctcaacgttagcgcaaatagttgatgaccaagtttttccattagtattttagtttggatttaaagtacacttatgtatgagttatttgacaatgcttatttatgagatattgaatgatacttatctatattatattaattataatgttattaaatata

SEQ ID NO: 80333 - DNA, 859 bp, Zea Mays
ctctgttgctccctctgggtaacagattgttattgacttgggtgttgcctaatggcccttgtgcctcctacctcgcctctaatctggggtagtgggaccttcaggcctacaaagttgttttattgagctagcaatgaagctagtaccggatgcaacttgcatcatatctctcttacatttatgaactagcggttgatccaatccatatgtgtgatctcccctcatctacttgtagctgcattccaccaatggtcagattgatgcataaatcatcatgtgcgtggtgattcaggataaactaattgcctgattgggttttgggtgctgccaatttatctgcataagtttttgtattgttatcatacatctccataagcttttctaatctacacaagcttttctaactggtttgaatagagaataagattaacatcttatgaaggattgttgggatatataatagtgcaaatgtagttcaggcgaccttttggatctccctgcaattacttattaactagacgtataactcagatttacaagaaggcagaaaatgatgcaaaatctacgtgtccttttggatctcaccaattgtcagcacgtctgcttataacgaagttctagagaaggaaaagatggaatgaaactcaaattttggtggctgcataagtgtggagacttgaattcatatatacttagttaggctcaacgttagcgcaaatagttgatgaccaagtttttccattagtattttagtttggatttaaagtacacttatgtatgagttatttgacaatgcttatttatgagatattgaatgatacttatctatattatattaattataatgttattaaatata

SEQ ID NO: 80334 - DNA, 1350 bp, Zea Mays
tgtccgttgtgaaatagcagctgagcctctcaacccaagtgagcttcctaaaatggttgaaggtcttcgtaaaattagcaagagctatcctcttgctattactaaggttgaggagtctggagagcacactattctggggactggtgaactatatctggattccataatgaaggacctgagagagctttattcagaggtcgaagtgaaggtagcagatcctgttgttacattttgtgaaacagttgttgacacttcttctatgaaatgttttgctgaaacacctaacaagaggaacaaaattactatgcttgctgaaccattagagaagggcttagcagaagatattgagaatggtcttgttagccttgattcaagacagaaagaaattactgacttctttcgccaacgctaccagtgggatgtgcttgcagcaaggtcaatatgggcttttggacctgacaagcagggtcctaacattcttttggatgacacactttcaattgaggttgacaagaacttgctcaatgcagtgaaagattcaattgttcaaggatccaaacaccaattgattgtgtctctgcaatttatacggtgctatcccggcggcgtggtcatgtaacagctgatgtacccaagccaggcactccaatatacattgttaaggcatttttacctgttatagagtcttttggatttgagacagatctcagataccatacacagggacaagccttttgtttgtcagtattcgatcactgggctatagttcctggtgatcccttagataagagtattgtccttcgccctctggagccagcacctatgcagcaccttgcccgtgagttcatggtaaagaccaggcgaaggaagggcatgagtgaagatgtgagcatcaataaattcttcgacgaggccatgatgaatgagctggcccaacaggctgctgatatccacttgcaaatgatgtagtcaaaaagcgagatgaagtgcacacgtggaagatgcaaatgccctcagcttcttcataccatacatgctgcagatgggactgccggagttccagtcgcacctttatgctggcatttgcccctacctgtttcgttttgattaacacattatgattgctgggtatcatgtagcgaatgtttaaagtgggtaccgtatgcaaatcatgtatgtactgtactagtttttacaccatctgaccaatcagcacccttgaggacagagactatttttaaatgtctttattgaactctgagcggcaatggcatcttcgccggtgtagatttgtagtaagattttacttatttgatccctttttgcttttcctgctaagtttcttgaaat

SEQ ID NO: 80335 - DNA, 105 bp, Zea Mays
catgaatctttaagtaaagatgcgcaaaagactgtaaggtaaaagaccagccagcagcaccacttgcaaaacatacgtttccagcaataggatccaccagctgag

SEQ ID NO: 80336 - DNA, 804 bp, Zea Mays
gtgtcagtaaaccgcacatgacgctccccctcggagtcgaaggtgtccacttcgtgtgtctgctctacgagcatgtccatgaacaccgtcttcccgtgctggaggtggccgacgagagtgacgttgcggacgagcgcggggttgcccgcgagaccgaggaggaagtcggtggacgcgtaggtagacgtggccgcggcgcgggtcccgacctcgaacttcacgacgcgtggtggcgcgatgatgggcatctcgagcggctgctcgtcctcgtccatgacgagcgcctccacgccaggcccgtacacctcctcggcggtgggatagtacttcttgtcctcggcgagcaccacggcctgctgggacgggtcgccctcgtcttcgtcgacgtccatgagcgccgcagggcgggagggggagcccgacggggagcgcgccgcgggggacggcgagcgggacgcggtggaggacggtgaggcgccggcggcgtcggagtcatcatcagcgtcggagtcggcgagctctgggcctatgtagtttccgaactcgtcgtagaggctgtcgtccatcgcggcggcggcgttataggaagcccctagggttttgctcggcggcggagctgggatcaggttttgggatttgggaggagggaagacagtaaactagttgtcttggtgtttgtttggtttgtaagagcaatacagtagaactagttgtcaaggaacttgtcactagtgtggtgtttgtttggtttgtaagagcaattccaatagttatgtaaactttaactctttaaatcacagattt

SEQ ID NO: 80337 - DNA, 1013 bp, Zea Mays
ggaaagcaacgactccgcgtccgcctgacctgacgtccgcctgatgaccgattatcttccttctccgtccgagtaaaggaaagcaacgactccgcgtcccgcttccctttccccgcacggcggagttcacaatccccaccggccggcgtagcggatattgcgagttacgacggggaaggagaggaagatccgtcgatccgcgcagattcgtttcgatcgtggtttggtgacttggtaagaggggaggggagaagcggcgatgtcgggcgtgttcggcagggtgttcgggaagtccaaggagcagagccaggcgaccgcgctggcctcgctcgacaagctcaacgagacacttgaaatgttggaaaagaaggaaaacttgctagtgaaaaaggccaatcttgaggtcgagaaggctaagaattttaccaaagccaagaataaaagagctgcaatacagtgcttgaagaggaaaagactatacgagcaacagattgagcagcttggaaatttccagcttaggatacatgatcagatgattatgctggaagcagcaaaagctacaacagagaccgtggatgcattgagaactggagcatcagcaatgaaagctatgcataagtcaacaaatattgatgatgttgataaaaccatggatgaaattaatgacaatatggagaacatgagacaaattcaggatctgttgtcagcgcctatgggagcagcagctgattttgatgaggatgaactagaagctgaacttgcggatcttgagggggaggagttggaggcagagctgcttgcacctaccacaacagctccgtccacagctccagtgcgtgtgcgtgtacctactgctcagcagtccactaggccatctggtcagagtagcaaagctgaagacgacgagctggcagcactacaggcagaaatggctatgtaaatatagctcacaaggagatcaagatgtcaaatccccatgaaataaattattttacagaatactaaaatctgca

SEQ ID NO: 80338 - DNA, 1102 bp, Zea Mays
gccatgtctacttgttggctacatcggctcacacaagccctgcatctcctttctcccgtgcgcttcccagcctcgctccctctggcgctgtgggcccgacatgcaggcgtggttctcctccggctccgggccctcctcctcgtctgcggcgtcctcatcgcagccgtcgctgctcgcagagtggaactcctacgctgccgcccgctccgctgaggacgcgggcgatggcttcgggatcgacatcgaggcggccgtccgctccgccaacgaccgcgtcgccggcaccttcggcgtggtctcaaaaggtgttaaagggtttccaggcagctttaagtccacaacaagcagtgttccatctggcagatctctcatgtatttcggtctgtttcttggtagtggtgtattcctagttttcatcgcattcacgatatttctgccagtcatggtgataatgccacaaaagtttgcaatatgtttcacggtgggatgtgctttcataattggatcattctttgcgctgaaagggcctaagaatcagctctatcatatgatttccaaagagagattacctttcaccatgggatttgtcgggagcatggttgctacgatctacgtgtcaatggtgcttcatagctacatactttctgttttcttctctgtgcttcagcatattatgccatctcatacttccctggtggatctgctggaatgaagtttatatcttctgccgttgtgtcctcagtgttgagatgctttgggcgatgagttcacctgactgctgctttcctgtgctgattgcagtatttctagtggatgatctagcacctttgtggctttgtcgtttagcctgtgcggcttcattaatttcagaagtttgatgccagttgaagcaccgaggtgaactgtgaggaaaggatgttgtggacccagccaacgcttgttaggggcaaaaaaattgtaatgtagtacattgggaacaacagcttagtctaaaaagtacattgtacaaaacatctcactgaacactgggccacaatctaacgcccatggcgctcatttctttcatcttttctgtcgtaaaagggaaaaagaaattgcgagc

SEQ ID NO: 80339 - DNA, 1367 bp, Zea Mays
gctctgcggccacacgcgtttggattttgctcctttgctcccttgatccatccacttctgaaagggtcaccatgtctgcctttgtggggaagtacacagatgagctgatcaagaccgccaagtgcctcgcaacgccgggcaagggcatcctggcctccgacgagtcgacgggcaccatcggcaagcgcctgtccagcatcaacctcgagaacgtggagtcgaaccggcaggcgctccgcgagctgctcttcacggcgcccggcgtgttcgactacctctccggggtcatcctcttcgaggagacgctgtaccagaagacctccgacgggaagccgttcgtggacgtgctcatcgcgggcggagtggtccctgggatcaaggtcgacaagggcaccgtggagatcgcgggcaccgacggcgagaccaccacgcagggcctcgactccctgggcgcacgctgcgccaagtactacgaggccggcgcgcgctttgccaagtggcgcgccgtgctcaaggtcggccccgcggggcaggggcagccctccgagctcgccgtcaggcagaacgtcgagggcctcgcgcggtacgcgctcatctgccaggagaacgggctggtgcccatcgtggagcccgagatactcaccgacggcggccacgacatcgggacctgcgccgccgccacggagcgcgtcctcgccgccctctacaagtcgctcagcgaccacaaagtcctgctcgaggccacgctcctcaagaccaacatggtcacccccggttccgatagccccaaggtctccgcggaggtgatagcggagtacacggtggcggcgctgcggcgcaccgtgccgccggcggtgcccggggtggtgttcctgtcgggcgggcagagcgaggaggaggcgacgcagaacctggacgcgatgaacaagctggaggtgctcaagccctggacgctgtccttctccttcggccgcgcgctgcagcagagcaccctcaagaagtgggtcggcaagaaggagaacgtcgccgccgcgctgggcaagtacgccggctccggcgccggggacgccgccgcctccgagagcctgtacgtcaaggggtacaagtactaaagccgccactgctgactgtgccgacccaatccttgtgtcccacgtcgcagcgctcggactgtgccgagatatatgtgctacactagtgtttgtgtactaaattctcttctcttcgtccggctcctatttgagcaaaacatacacacacacacacacacaacacgttgatctatttgcagctcgcaatgtacagtattactggaacataagtgcaatatatatagatgtgaccatcttacttattactgaagcttt

SEQ ID NO: 80340 - DNA, 1842 bp, Zea Mays
ggctctgccagccggtccagctgctctaccgcacggttcgcaccgcgcgcgtactggatccattagccgcgcgcgcgcgcatctctcgtgatatctctctctctctctctccctctctcgcccgagagatcctcctcgtcgggtcctactcctacctcatcagtcctccggtccatctgccctcctccggcacaaggacgacgatgcaggtcacgccggcggcgaccctgcggccggcggcggcgcacgcgttgcggctgtctacagatcactgcagggaagggccaaagattagggttcggttcggatcgaggaaactatcgtggacagaaacacttgatgatgccactagtctgacgagagccaccggaaggcaacgcaggcattcctcaatcctcaaagtgagctgctgggcagctgctcatcaccaacacaattctaatccccagcactttaaggcgactggcatacgaatcgcaaagacgctgcatgccttctatcagttctgccgaccacacacaatatttggaaccataataggcattacttcggtgtctctcctgccagtgaagagcctggacgattttacgttgatagctatatggggatttctcgaggctttggtcgccgcattatgtatgaacgtttatgtagtagggctgaaccagatatttgacattgagattgacaagaatttcgggtaaccttttgaaggtcaataagccaaccctcccgttggcgtccggagagttttcggtgccaactgcagtagtattagtagtggcattcttggtcatgagcattagcatcggaataagatcgaagtctgctccattgatgtgtgctttgcttgttagcttccttcttggaagcgcatactccattgatgttccattactccggtggaagcgacatgcttttctagctgcattctgtataatctttgtgagggctgtagtggtccagttagctttctttgcacacatgcagcaacacgttctgaagaggcccttggcacctacaagatcggtggtctttgcaacatttttcatgtgttgcttcgctgcagtaatagcgctattcaaggatattcctgatgtcgatggagatagagatttcggcattcagtccatgactgtacgattaggccaacagagagtgcataggctctgcattaacattctcatgacagcatacgcagctgcaattttggtaggcgcatcatctacaaacctgtatcagaagattgtcattgtgtctggtcatgtcttgcttgcctccacactctggcaaagagcacaacaatttgacattgagaataaggattgtatcacacaattttatatgttcatttggaagttattctacgctgagtattttcttataccatttgtgtagtaaagaatcatgcgaagaacagcacccgtgctatagacatgtgaaggtttattgctaatgttactctaccgaatggtctgaatgcctatgcgtcatttgtatgtaatatgactatttgttgtatcagggtaacaactggagcaaatgtaccgtatatattaagcattaatttaactttatcagttagttgtgggaatattactaactagcaagctagattatgaaccttgatctctcgatgataaaaaatatctaaaacatttggtttgtcttgagtcaaagttttgaaactttgaccaacaatatctataaaaaatatttttaaattaaagaaattatatattgcggtagatgttttaataataaatgtaatagtttaatttttatttagtcaatatttatgaatattttattattaatggtctaagtttcaaaatattgact

SEQ ID NO: 80341 - DNA, 1704 bp, Zea Mays
gttcgcaccgcgcgcgtactggatccattagccgcgcgcgcgcgcatctctcgtgatatctctctctctctctctccctctctcgcccgagagatcctcctcgtcgggtcctactcctacctcatcagtcctccggtccatctgccctcctccggcacaaggacgacgatgcaggtcacgccggcggcgaccctgcggccggcggcggcgcacgcgttgcggctgtctacagatcactgcagggaagggccaaagattagggttcggttcggatcgaggaaactatcgtggacagaaacacttgatgatgccactagtctgacgagagccaccggaaggcaacgcaggcattcctcaatcctcaaagtgagctgctgggcagctgctcatcaccaacacaattctaatccccagcactttaaggcgactggcatacgaatcgcaaagacgctgcatgccttctatcagttctgccgaccacacacaatatttggaaccataataggcattacttcggtgtctctcctgccagtgaagagcctggacgattttacgttgatagctatatggggatttctcgaggctttggtcgccgcattatgtatgaacgtttatgtagtagggctgaaccagatatttgacattgagattgacaaggtcaataagccaaccctcccgttggcgtccggagagttttcggtgccaactgcagtagtattagtagtggcattcttggtcatgagcattagcatcggaataagatcgaagtctgctccattgatgtgtgctttgcttgttagcttccttcttggaagcgcatactccattgatgttccattactccggtggaagcgacatgcttttctagctgcattctgtataatctttgtgagggctgtagtggtccagttagctttctttgcacacatgcagcaacacgttctgaagaggcccttggcacctacaagatcggtggtctttgcaacatttttcatgtgttgcttcgctgcagtaatagcgctattcaaggatattcctgatgtcgatggagatagagatttcggcattcagtccatgactgtacgattaggccaacagagagtgcataggctctgcattaacattctcatgacagcatacgcagctgcaattttggtaggcgcatcatctacaaacctgtatcagaagattgtcattgtgtctggtcatgtcttgcttgcctccacactctggcaaagagcacaacaatttgacattgagaataaggattgtatcacacaattttatatgttcatttggaagttattctacgctgagtattttcttataccatttgtgtagtaaagaatcatgcgaagaacagcacccgtgctatagacatgtgaagggtaacaactggagcaaatgtaccgtatatattaagcattaatttaactttatcagttagttgtgggaatattactaactagcaagctagattatgaaccttgatctctcgatgataaaaaatatctaaaacatttggtttgtcttgagtcaaagttttgaaactttgaccaacaatatctataaaaaatatttttaaattaaagaaattatatattgcggtagatgttttaataataaatgtaatagtttaatttttatttagtcaatatttatgaatattttattattaatggtctaagtttcaaaatattgact

SEQ ID NO: 80342 - DNA, 949 bp, Zea Mays
tcgttcgtctccacgcccctctcattcgcaccgctcccacccacatcctcttcgcctctctgagtctctctctctctctctctctgcacgcctccgctccgcgtgtgcttccgttcggcggtggtttcatctcgcggaggcagcagaccacagcgccagcagccatgaccgcggccgacggggagtcctgcgcggtggtcgcgacggccgccgacatcatctgctctctccgtggtgcggacctcgccggctggaccccgccgtggcgcaagcacgaggccgcctgcgacggcgtccgtgaggaggagggcggtggcggcgacgaggcgcgtgatctggcctggccggcggtggcgcgcgggaagcgctcgcggtcccggcgcgagtccccgtcggcctcgggctccgccgcctccgccgacgcgaagaagaagaagaaggcgaggcgaggggtccgcggcagccccgcgtcacccctcgactacagcggcgtgtccgggtccggcgcgtccaccagcggcggcgaggacggtgccttctgcttccagccagagccagcgttcccgccggccgccgcgtgccagctcgcggagcccgccgtgcttccacccccgcccccgccccccagcgaggtgggtggcctcgccggacggcggacgatcctcccggtgccgccacctcggcccgccggacagcgggcgcggaagaagatgaggctcccggagatccagcagatggtgcggtcgctgtcggtggagaacgatgccctccgcaagacgatgaaggagctgcagagggcttgcacggcgctgtcccaagaaaacggcaagctagaggtcagatggagcttggatctgcatgaggcagattttccttttgctttccggaggaagttgtgaagctactcctactccctctgagccataaactagtcggaccaaactgcctg

SEQ ID NO: 80343 - DNA, 1702 bp, Zea Mays
gcggtcccctcccttccccagtccccactaccactacacgcctctcgccgtcgcgtcttcaaagcctccgccacttgactcccatcccctctcgcgtggtccttctcctgctcccgctcccgctgctcctcatcttctcgcgccgcggcccccagcctttgcccgccgctacctctctctaattgggcggcggcctgccggtccgatggcgttcaactaccacgaccacgcgctggcgatggaccccgcggcggccgccgcggttggggcggccgcgaaccctagctttgtctccggaggtggcatggccggggggcccggctgggagagggagaaggcggccatcgcggcgcacccgctgtacgagcgtcttctcgaggcgcacgtcgcctgcctccgcgtcgccacccccgtcgaccagctcccgcgcatcgacgcgcagatagcggcgaggcccccgcccatggaggccgcggctgcggctgctgcggcgggcggagcacactcgggaggcgaggagctcgacctcttcatgacacattatgtgttgctcctctgttcattcaaggaacaactccagcagcatgtgcgtgttcatgcaatggaagcagtcatggcttgttgggagctcgaacaaactttacaaagccttacaggtgcatctcctggtgagggcactggggcaactatgtctgacgatgaagacaatcaggtggacagtgagagcaacatgtttgatggaaatgaggggtcagatggaatgggatttggcccattaatgttgactgagggtgagagatccttagttgagcgcgtccggcaggagctaaagcatgagcttaagcaggggtacagagacaaacttgtggatattcgggaagagatattgcggaagcgaagagctgggaaactccctggcgacactgcttctaccttaaaagcatggtggcaggctcattctaagtggccgtacccaaccgaggaagacaaggctcgactggtgcaggaaacagggctacaactgaagcagatcaataactggtttatcaaccagcgtaagcggaactggcacaacaattcggcgtcatcctcgtcggacaaaagcaagagaaaaaggtgatgggaacgcagaaccagcctggtagggcatggtcggggaacgaagtttatgtaaataatgcttctactgtgaagagttccatcatatttgttgctccagaaaagaccctcagaccggtgtttcctgaacccatattcatacaaagacatcagacgatgaataatgttgcgagtagtcaaataaaataaataacttgtatagtgaataactagaaactagcattcatcgttttggtattgtatagcgctagagtgtaattgtttggtcggactgtcttgtataatggtgtaaggttcaaatgcattttgacctagcattcgatattgtattttgtgatgttaaaaaccattgtattccgttttgtgttttatccgtggaatagggacactgtttagtgttgccctcaattcggccatgtcgtgttgtcaacttcatattaaacttcaaagttgtttgtatttaataaacttcaaacttcatatataacacgaggttgtggtatagtttcacgatatgcaattatttgtatttaataaacaacatattgttgaagatattattagccaaaatgcagtattgatg

SEQ ID NO: 80344 - DNA, 1105 bp, Zea Mays
caaatgtttccttcctttggaaattgaccaaatagccattctcttgttggtcttatcaggtgcatctcctggtgagggcactggggcaactatgtctgacgatgaagacaatcaggtggacagtgagagcaacatgtttgatggaaatgaggggtcagatggaatgggatttggcccattaatgttgactgagggtgagagatccttagttgagcgcgtccggcaggagctaaagcatgagcttaagcaggggtacagagacaaacttgtggatattcgggaagagatattgcggaagcgaagagctgggaaactccctggcgacactgcttctaccttaaaagcatggtggcaggctcattctaagtggccgtacccaaccgaggaagacaaggctcgactggtgcaggaaacagggctacaactgaagcagatcaataactggtttatcaaccagcgtaagcggaactggcacaacaattcggcgtcatcctcgtcggacaaaagcaagagaaaaaggtgatgggaacgcagaaccagcctggtagggcatggtcggggaacgaagtttatgtaaataatgcttctactgtgaagagttccatcatatttgttgctccagaaaagaccctcagaccggtgtttcctgaacccatattcatacaaagacatcagacgatgaataatgttgcgagtagtcaaataaaataaataacttgtatagtgaataactagaaactagcattcatcgttttggtattgtatagcgctagagtgtaattgtttggtcggactgtcttgtataatggtgtaaggttcaaatgcattttgacctagcattcgatattgtattttgtgatgttaaaaaccattgtattccgttttgtgttttatccgtggaatagggacactgtttagtgttgccctcaattcggccatgtcgtgttgtcaacttcatattaaacttcaaagttgtttgtatttaataaacttcaaacttcatatataacacgaggttgtggtatagtttcacgatatgcaattatttgtatttaataaacaacatattgttgaagatattattagccaaaatgcagtattgatg

SEQ ID NO: 80345 - DNA, 6233 bp, Zea Mays
cgcccaccggcttccggcctccgcccgccgtgggcggcctctgccctcagcccacctggccatctccgcatccggcccccggcctccggtctccagtcgcccccggcttctggtctctgcccccgcagtggtcgtgccccactgggctgaggaggaacagcttccggttcctggtgctgatcttgaacggcgcggcgctcaggtcggaggaggcgttgccggcgagactgaggtcgcagaaggagccataccaaaaaaaatcgtcctccgctactgcctacgtgacaaaaaatcctgcggagacctggcagaagtcgcccggtctcccccgcctctggcttggcctcgccatttacgctacaccttgagatttttattcactccatccaatctggccctgcgtttctagattttgcgagggaagacgccaattaggagcctgagggtgcgacggcctagggtttgtagctactggtgtcgtcgcggcctgtggaggcggtaggggacagcgacatctgcagccatggacgacagcgagctccatgaagaggagaacccaaccaatagtgccgtagatgacgatgacgacgaggattatgaggagcctggtggaggaaatcacttattggggtttatgttcggcaatgtagatgattctggtgatttagatgctgactatcttgatgaggatgcaaaggaacacctttttgcactggcagataagcttggtccatctctcaaagacattgacctaatgaagtcttctccagcaccaactgatccttccgaacaagactatgatgagaaggcagaagatgctgttgattatgaagatattgatgaagaatatgatggacctgaagttgaggcaactacagaggaagacaatgtgttgtcaaaaaaggattacttctcttcatctacagtgtatgcatcagtcaacagtacagtttcagtgtttgacgatgaaaactacgatgaggaagaagaaccacccaatgataatgagcctcctggtgatagtgctgcccaaaatttatcttcagtttctatcgagcaggcagatacgacaacctcaagcgataaccttgccatggaaaagattggcttgttatcacatccagaggaaaacatggactttgaatatgaagatttggagaatgaaaagggcactggggaaggccagcttgagcctgaaagtgcaacttcccttcctgttttatgcatagaggatgggaacgctatcctgagattctctgaaatttttggtatccaagagcctgtaagaaaagtgaagacagatcaccacaaacgaccagtggataaagagcttcagatcgcaaatgttgctgacaatgttgaagaagatgaggaactaattctccggagcactatgcaaaatttctcaactttgaagcacattcatgtgaatgaagattttgttgagagtgacagtgatgagtctatttctgatgtcactttaaggctaaaggattcatgtctttcagaacaaccaatgaaagatgtgcatatggatattcgtattgtccagcgatctccaacttgtcctgatttttatccacttgagcattatgattgggaaagtgatatcatttggaacaattcaccagcaactgatcagcaggcttatgcaaaaatctgtgaatctgaagagagtgaggacactcatggtgaagaccagggtaaggattatggccaggcctccaggtgttgggatgtacagagtaaaaccaatggttctccagtaattaaagagactttttgttgtacagaaatgcctgctccagctaactactgcccccctgggaaaagttaccctccattgacaaacgaagataacttagatcacataatgccaaataacttagatgatgcagttaaaattgacaccatggtgcgtttaaataaccttagtgtactaaacagggaattattagaaggatcatggttggacaacataatttgggatcctaatgaggttaccccaaagcctaaactgatctttgacctcaaagatgatcatatgctttttgagatcctagatgaaaagaatgtggaccatctccagtctcatgctcgtgctatgattgttagccagtcaactaagacttcaacaccaacagttgacaattttggcgatcaaccaaagccattgagtggcaggttcaacatctccaatgacaagttttattcaaataggaagactccacaacaagctaaatctcatactaaaaaacgcgctttaatgggcataaaggtggtgcattctgctccagctcataagctgcaaaccatgaagccagtgttgagcaataaggaaattgcaaactttcatagaccaagagctaagtggtacccacatgaaaataaaattgcctctcagttacaaggacctgcttgtagccatgggaggatggctgttttacttatgtcattgggaggaaaaggagtcaagattctggtcaatgctgaggacactccggtctctgtcaaattaaaagcatcaaagaagttcgaattgaagccttctgagaagatcaaattgttctgttctgggaaagagcttcaggatgacatctcgttagcaatgcaaaatgtgcgaccaaactccattgtgcatgctgttcgcactgaagtgtacctatggccaaaagcacagaaattacctggtgaggacaagcctctacgccctcctggggctttcaggaaaaaaactgacttgtctatcaaggatggacatgtttttttaatggaatattgtgaagagagacctttgcttctctcgaatgcaggaatgggagcccgtctctgtacatattaccagaaaactacccctactgatcagacagctgcatcactgcgaaacaacagtgatggactgggcacagtgcttgcaattgatcctgctgataaatccccttttctaggagagatacattctgggtcccaccaatcttgtcttgaaacaaacatgtatagatcacctgtatttccccataaggttgcaccaactgattacttattagttcgttcagccaaaggggctctttccctccgtcgcattgacaagctatatgttgttggccaacaagaacctcatatggaagtcttttcaccagggactaagaacatgcaaaattatcttctgaaccgagttcttgcatatgtttatcgtgagtttcgtgctagagagaggcctgatgctattcctcagattcgagctgacgagttacccatacaaagtcctctgacagaagccatagtgaaaaaacgattgaagcattgtgcagatttgaagaaaggaccaaaggggcattttttctggacacagagacctgatttccgggttccatcagaagaagaactgaggagattattgacgccagaaagtgtttgctgttatgaaagtatgcaagctggtttgtatcgtctcaagcgcttaggaattctgaagcttactcagcctgttggattggcttctgccatgaatcagcttcctgatgaggctattgagcttgctgctgcatcacatatcgagagggaactgcaaatcactagctggaatcttacaagtaatttcgtcgcttgtactaatcaggacagagaaaatatagaaagattagaaatcactggtgttggagatccatctggtcgtgggttaggattcagctatgtgcgagtagcaccaaaagcacctgcctccaattcagtgctcaagaagaagtcagctgctgcaaagggtaccactgtaactggcactgatgctgatctccgcagattgagcatggatgcagcccgtgagttgctgctaaaatttggcgtacctgaagagcaaattgataaattaacaaggtggcatcggatcgctatggtgaggaagctttcaagtgagcaagctgcatcgggaattactatcgatgaaattcctgttagtaagtttgcacgtggacaaaggatgtcttttctgcaacttcagcagcaaactagggagaaatgtcaggaaatttgggacagacaagttcagtcactttcagctttagatggtgatgacaatgccagtgacacagaagctcacagtgatctagactcatttgctggggatcttgagaacttgctagacgcagaagaatttgatgatgaggatactagtacagcagacttgagaattgacaaagcagatggaatgagaggacttaaaatgagaaggtgctctacgcaagcccaaattaacaaggaaattgaagatgatgaaacagaggcttctctggcaaagaaactacttgaagacgatggcaatgatgtgaagaggaaaaaacagcctgtggaattgacaaattgtggcacctctttagttgccaataaaatgaagcagagtaagactgggcaaacgatcaaatcatctggttatgctggtgcattaaccccaaaggagaacacaccaagagaaggaaaagaggttgaaaattcttttgttgagggtggtttgtcctcaaaactaaaaccaaagatggcactcgatgtaaatgagactgttctagttaaaaagaaaagtgttccaggaaaggatggacctaaggaaaagaaacagggtgcaagaggggatagtcttgtttgtggagcctgtagtcaggttgggcatatgcggactaacaaactgtgccctaagtatcgggaggatccagaaatgtcagaaatggatgctaattcagttaagcccaactctatggatataaaccatttgcaagcaaagacacctaaaaggttgataacaaaagtttcctctgaagttactgaaactgaagggccagaaggtattgagaagacaaaatctgtcccagtaaagttcaaagtaggggcacctgataaatccttggagaggaacatgtcagtctccgtttcactcgtttctgataaacgtgtcatggatgttacagacagtagatctaccggaaaggtaaacaagatagtgatacctaataagatgaagtctgatgatttccctcctgacactccaaagccatctgttgtatttcggcctcctgctgaagaaaaggatgtacctcgcaaaaagatcaccatcaagcagcctaaaggcatagaccagcaaagacatgttgaatctaggagtgttcaggaacccaccagaaagacaagaaaaattgtagaattgtcgagttttgaggataaaagtagagaggatgatcattgggttggtggggaacccagccaggtgaattcctcacatgggaggaggctgggtctggaaggaaaaataagcaaagccacaatggaaaatgaaagatcctggagagattttgaggagcgaagagaaatgccacaagcaaggctctttgatgctacgatatatgcatcaagggaggaagatcatctaaaggcaaaaaagaaaaacaagaaaaagaaaaaacatgaattcaaagatgatgacttacttgatcacaggccatacagaaatgacaggagggtacctgaaagacatcgagcactaaaacgatctagtccagctcctgtggttggatatgcatcatctgccaagcgtcgcagaggaggagaggttgagctctccaacatattggaaaaagtagttgatcacttgcggggtttgagtggatcactgctgtttttaaaaccagtgacaaagaaagaagcttctgattaccttgatatcatacggtacccaatggatcttggtaccatcagggacaaggtgagaaagatggtgtacagaaacagggatgaattcaggcacgacgtagcacagatacaactcaatgcacacatatacaacgacactcgctatcctcacatccctccgcttgctgacgagctcatggaggaggggaaaaggttgtacattttttgggcctagcagcaatctacatgtgatcccgaatccagccagcttctgttggtattgtgttgagaggtagtggaagtacaaaatgtctaggttagccactcaatggcctcatgttgtaaaaatgtagaatgtaatcatgtccatatacatggcatatatcggtccaataatccgattgtgttgcagtatttgatatgatatggaatggcgtttcaattgcagcgtgaatcaagcacgggcctgtgtgcacactttcttccaacttgaaccttatttcttatctggaggtgtatatgcattgaaccctgaaccgcaaagctgatggacaattttt

SEQ ID NO: 80346 - DNA, 2317 bp, Zea Mays
gcggcctctgccctcagcccacctggccatctccgcatccggcccccggcctccggtctccagtcgcccccggcttctggtctctgcccccgcagtggtcgtgccccactgggctgaggaggaacagcttccggttcctggtgctgatcttgaacggcgcggcgctcaggtcggaggaggcgttgccggcgagactgaggtcgcagaaggagccataccaaaaaaaatcgtcctccgctactgcctacgtgacaaaaaatcctgcggagacctggcagaagtcgcccggtctcccccgcctctggcttggcctcgccatttacgctacaccttgagatttttattcactccatccaatctggccctgcgtttctagattttgcgagggaagacgccaattaggagcctgagggtgcgacggcctagggtttgtagctactggtgtcgtcgcggcctgtggaggcggtaggggacagcgacatctgcagccatggacgacagcgagctccatgaagaggagaacccaaccaatagtgccgtagatgacgatgacgacgaggattatgaggagcctggtggaggaaatcacttattggggtttatgttcggcaatgtagatgattctggtgatttagatgctgactatcttgatgaggatgcaaaggaacacctttttgcactggcagataagcttggtccatctctcaaagacattgacctaatgaagtcttctccagcaccaactgatccttccgaacaagactatgatgagaaggcagaagatgctgttgattatgaagatattgatgaagaatatgatggacctgaagttgaggcaactacagaggaagacaatgtgttgtcaaaaaaggattacttctcttcatctacagtgtatgcatcagtcaacagtacagtttcagtgtttgacgatgaaaactacgatgaggaagaagaaccacccaatgataatgagcctcctggtgatagtgctgcccaaaatttatcttcagtttctatcgagcaggcagatacgacaacctcaagcgataaccttgccatggaaaagattggcttgttatcacatccagaggaaaacatggactttgaatatgaagatttggagaatgaaaagggcactggggaaggccagcttgagcctgaaagtgcaacttcccttcctgttttatgcatagaggatgggaacgctatcctgagattctctgaaatttttggtatccaagagcctgtaagaaaagtgaagacagatcaccacaaacgaccagtggataaagagcttcagatcgcaaatgttgctgacaatgttgaagaagatgaggaactaattctccggagcactatgcaaaatttctcaactttgaagcacattcatgtgaatgaagattttgttgagagtgacagtgatgagtctatttctgatgtcactttaaggctaaaggattcatgtctttcagaacaaccaatgaaagatgtgcatatggatattcgtattgtccagcgatctccaacttgtcctgatttttatccacttgagcattatgattgggaaagtgatatcatttggaacaattcaccagcaactgatcagcaggcttatgcaaaaatctgtgaatctgaagagagtgaggacactcatggtgaagaccagggtaaggattatggccaggcctccaggtgttgggatgtacagagtaaaaccaatggttctccagtaattaaagagactttttgttgtacagaaatgcctgctccagctaactactgcccccctgggaaaagttaccctccattgacaaacgaagataacttagatcacataatgccaaataacttagatgatgcagttaaaattgacaccatggtgcgtttaaataaccttagtgtactaaacagggaattattagaaggatcatggttggacaacataatttgggatcctaatgaggttaccccaaagcctaaactgatctttgacctcaaagatgatcatatgctttttgagatcctagatgaaaagaatgtggaccatctccagtctcatgctcgtgctatgattgttagccagtcaactaagacttcaacaccaacagttgacaattttggcgatcaaccaaagccattgagtggcaggttcaacatctccaatgacaagttttattcaaataggaagactccacaacaagctaaatctcatactaaaaaacgcgctttaatgggcataaaggtggtgcattctgctccagctcataagctgcaaaccatgaagccagtgttgagcaatgaagagaacaactag

SEQ ID NO: 80347 - DNA, 6314 bp, Zea Mays
gcggcctctgccctcagcccacctggccatctccgcatccggcccccggcctccggtctccagtcgcccccggcttctggtctctgcccccgcagtggtcgtgccccactgggctgaggaggaacagcttccggttcctggtgctgatcttgaacggcgcggcgctcaggtcggaggaggcgttgccggcgagactgaggtcgcagaaggagccataccaaaaaaaatcgtcctccgctactgcctacgtgacaaaaaatcctgcggagacctggcagaagtcgcccggtctcccccgcctctggcttggcctcgccatttacgctacaccttgagatttttattcactccatccaatctggccctgcgtttctagattttgcgagggaagacgccaattaggagcctgagggtgcgacggcctagggtttgtagctactggtgtcgtcgcggcctgtggaggcggtaggggacagcgacatctgcagccatggacgacagcgagctccatgaagaggagaacccaaccaatagtgccgtagatgacgatgacgacgaggattatgaggagcctggtggaggaaatcacttattggggtttatgttcggcaatgtagatgattctggtgatttagatgctgactatcttgatgaggatgcaaaggaacacctttttgcactggcagataagcttggtccatctctcaaagacattgacctaatgaagtcttctccagcaccaactgatccttccgaacaagactatgatgagaaggcagaagatgctgttgattatgaagatattgatgaagaatatgatggacctgaagttgaggcaactacagaggaagacaatgtgttgtcaaaaaaggattacttctcttcatctacagtgtatgcatcagtcaacagtacagtttcagtgtttgacgatgaaaactacgatgaggaagaagaaccacccaatgataatgagcctcctgtttctatcgagcaggcagatacgacaacctcaagcgataaccttgccatggaaaagattggcttgttatcacatccagaggaaaacatggactttgaatatgaagatttggagaatgaaaagggcactggggaaggccagcttgagcctgaaagtgcaacttcccttcctgttttatgcatagaggatgggaacgctatcctgagattctctgaaatttttggtatccaagagcctgtaagaaaagtgaagacagatcaccacaaacgaccagtggataaagagcttcagatcgcaaatgttgctgacaatgttgaagaagatgaggaactaattctccggagcactatgcaaaatttctcaactttgaagcacattcatgtgaatgaagattttgttgagagtgacagtgatgagtctatttctgatgtcactttaaggctaaaggattcatgtctttcagaacaaccaatgaaagatgtgcatatggatattcgtattgtccagcgatctccaacttgtcctgatttttatccacttgagcattatgattgggaaagtgatatcatttggaacaattcaccagcaactgatcagcaggcttatgcaaaaatctgtgaatctgaagagagtgaggacactcatggtgaagaccagggtaaggattatggccaggcctccaggtgttgggatgtacagagtaaaaccaatggttctccagtaattaaagagactttttgttgtacagaaatgcctgctccagctaactactgcccccctgggaaaagttaccctccattgacaaacgaagataacttagatcacataatgccaaataacttagatgatgcagttaaaattgacaccatggtgcgtttaaataaccttagtgtactaaacagggaattattagaaggatcatggttggacaacataatttgggatcctaatgaggttaccccaaagcctaaactgatctttgacctcaaagatgatcatatgctttttgagatcctagatgaaaagaatgtggaccatctccagtctcatgctcgtgctatgattgttagccagtcaactaagacttcaacaccaacagttgacaattttggcgatcaaccaaagccattgagtggcaggttcaacatctccaatgacaagttttattcaaataggaagactccacaacaagctaaatctcatactaaaaaacgcgctttaatgggcataaaggtggtgcattctgctccagctcataagctgcaaaccatgaagccagtgttgagcaataaggaaattgcaaactttcatagaccaagagctaagtggtacccacatgaaaataaaattgcctctcagttacaaggacctgcttgtagccatgggaggatggctgttttacttatgtcattgggaggaaaaggagtcaagattctggtcaatgctgaggacactccggtctctgtcaaattaaaagcatcaaagaagttcgaattgaagccttctgagaagatcaaattgttctgttctgggaaagagcttcaggatgacatctcgttagcaatgcaaaatgtgcgaccaaactccattgtgcatgctgttcgcactgaagtgtacctatggccaaaagcacagaaattacctggtgaggacaagcctctacgccctcctggggctttcaggaaaaaaactgacttgtctatcaaggatggacatgtttttttaatggaatattgtgaagagagacctttgcttctctcgaatgcaggaatgggagcccgtctctgtacatattaccagaaaactacccctactgatcagacagctgcatcactgcgaaacaacagtgatggactgggcacagtgcttgcaattgatcctgctgataaatccccttttctaggagagatacattctgggtcccaccaatcttgtcttgaaacaaacatgtatagatcacctgtatttccccataaggttgcaccaactgattacttattagttcgttcagccaaaggggctctttccctccgtcgcattgacaagctatatgttgttggccaacaagaacctcatatggaagtcttttcaccagggactaagaacatgcaaaattatcttctgaaccgagttcttgcatatgtttatcgtgagtttcgtgctagagagaggcctgatgctattcctcagattcgagctgacgagttacccatacaaagtcctctgacagaagccatagtgaaaaaacgattgaagcattgtgcagatttgaagaaaggaccaaaggggcattttttctggacacagagacctgatttccgggttccatcagaagaagaactgaggagattattgacgccagaaagtgtttgctgttatgaaagtatgcaagctggtttgtatcgtctcaagcgcttaggaattctgaagcttactcagcctgttggattggcttctgccatgaatcagcttcctgatgaggctattgagcttgctgctgcatcacatatcgagagggaactgcaaatcactagctggaatcttacaagtaatttcgtcgcttgtactaatcaggacagagaaaatatagaaagattagaaatcactggtgttggagatccatctggtcgtgggttaggattcagctatgtgcgagtagcaccaaaagcacctgcctccaattcagtgctcaagaagaagtcagctgctgcaaagggtaccactgtaactggcactgatgctgatctccgcagattgagcatggatgcagcccgtgagttgctgctaaaatttggcgtacctgaagagcaaattgataaattaacaaggtggcatcggatcgctatggtgaggaagctttcaagtgagcaagctgcatcgggaattactatcgatgaaattcctgttagtaagtttgcacgtggacaaaggatgtcttttctgcaacttcagcagcaaactagggagaaatgtcaggaaatttgggacagacaagttcagtcactttcagctttagatggtgatgacaatgccagtgacacagaagctcacagtgatctagactcatttgctggggatcttgagaacttgctagacgcagaagaatttgatgatgaggatactagtacagcagacttgagaattgacaaagcagatggaatgagaggacttaaaatgagaaggtgctctacgcaagcccaaattaacaaggaaattgaagatgatgaaacagaggcttctctggcaaagaaactacttgaagacgatggcaatgatgtgaagaggaaaaaacagcctgtggaattgacaaattgtggcacctctttagttgccaataaaatgaagcagagtaagactgggcaaacgatcaaatcatctggttatgctggtgcattaaccccaaaggagaacacaccaagagaaggaaaagaggttgaaaattcttttgttgagggtggtttgtcctcaaaactaaaaccaaagatggcactcgatgtaaatgagactgttctagttaaaaagaaaagtgttccaggaaaggatggacctaaggaaaagaaacagggtgcaagaggggatagtcttgtttgtggagcctgtagtcaggttgggcatatgcggactaacaaactgtgccctaagtatcgggaggatccagaaatgtcagaaatggatgctaattcagttaagcccaactctatggatataaaccatttgcaagcaaagacacctaaaaggttgataacaaaagtttcctctgaagttactgaaactgaagggccagaaggtattgagaagacaaaatctgtcccagtaaagttcaaagtaggggcacctgataaatccttggagaggaacatgtcagtctccgtttcactcgtttctgataaacgtgtcatggatgttacagacagtagatctaccggaaaggtaaacaagatagtgatacctaataagatgaagtctgatgatttccctcctgacactccaaagccatctgttgtatttcggcctcctgctgaagaaaaggatgtacctcgcaaaaagatcaccatcaagcagcctaaaggcatagaccagcaaagacatgttgaatctaggagtgttcaggaacccaccagaaagacaagaaaaattgtagaattgtcgagttttgaggataaaagtagagaggatgatcattgggttggtggggaacccagccaggtgaattcctcacatgggaggaggctgggtctggaaggaaaaataagcaaagccacaatggaaaatgaaagatcctggagagattttgaggagcgaagagaaatgccacaagcaaggctctttgatgctacgatatatgcatcaagggaggaagatcatctaaaggcaaaaaagaaaaacaagaaaaagaaaaaacatgaattcaaagatgatgacttacttgatcacaggccatacagaaatgacaggagggtacctgaaagacatcgagcactaaaacgatctagtccagctcctgtggttggatatgcatcatctgccaagcgtcgcagaggaggagaggttgagctctccaacatattggaaaaagtagttgatcacttgcggggtttgagtggatcactgctgtttttaaaaccagtgacaaagaaagaagcttctgattaccttgatatcatacggtacccaatggatcttggtaccatcagggacaaggtgagaaagatggtgtacagaaacagggatgaattcaggcacgacgtagcacagatacaactcaatgcacacatatacaacgacactcgctatcctcacatccctccgcttgctgacgagctcatggaggtctgcgaccatctgctttacgaaaacgcagatctgctcaccgaggcggaagatgctatcgagtagcaatataaaaagctagatttagcatttggatcttgctatatcctaacatagatgatgtatctatcttctgatctgtaggaggggaaaaggttgtacattttttgggcctagcagcaatctacatgtgatcccgaatccagccagcttctgttggtattgtgttgagaggtagtggaagtacaaaatgtctaggttagccactcaatggcctcatgttgtaaaaatgtagaatgtaatcatgtccatatacatggcatatatcggtccaataatccgattgtgttgcagtatttgatatgatatggaatggcgtttcaattgcagcgtgaatcaagcacgggcctgtgtgcacactttcttccaacttgaaccttatttcttatctggaggtgtatatgcattgaaccctgaaccgcaaagctgatggacaattttt

SEQ ID NO: 80348 - DNA, 2276 bp, Zea Mays
cctcagcccacctggccatctccgcatccggcccccggcctccggtctccagtcgcccccggcttctggtctctgcccccgcagtggtcgtgccccactgggctgaggaggaacagcttccggttcctggtgctgatcttgaacggcgcggcgctcaggtcggaggaggcgttgccggcgagactgaggtcgcagaaggagccataccaaaaaaaatcgtcctccgctactgcctacgtgacaaaaaatcctgcggagacctggcagaagtcgcccggtctcccccgcctctggcttggcctcgccatttacgctacaccttgagatttttattcactccatccaatctggccctgcgtttctagattttgcgagggaagacgccaattaggagcctgagggtgcgacggcctagggtttgtagctactggtgtcgtcgcggcctgtggaggcggtaggggacagcgacatctgcagccatggacgacagcgagctccatgaagaggagaacccaaccaatagtgccgtagatgacgatgacgacgaggattatgaggagcctggtggaggaaatcacttattggggtttatgttcggcaatgtagatgattctggtgatttagatgctgactatcttgatgaggatgcaaaggaacacctttttgcactggcagataagcttggtccatctctcaaagacattgacctaatgaagtcttctccagcaccaactgatccttccgaacaagactatgatgagaaggcagaagatgctgttgattatgaagatattgatgaagaatatgatggacctgaagttgaggcaactacagaggaagacaatgtgttgtcaaaaaaggattacttctcttcatctacagtgtatgcatcagtcaacagtacagtttcagtgtttgacgatgaaaactacgatgaggaagaagaaccacccaatgataatgagcctcctgtttctatcgagcaggcagatacgacaacctcaagcgataaccttgccatggaaaagattggcttgttatcacatccagaggaaaacatggactttgaatatgaagatttggagaatgaaaagggcactggggaaggccagcttgagcctgaaagtgcaacttcccttcctgttttatgcatagaggatgggaacgctatcctgagattctctgaaatttttggtatccaagagcctgtaagaaaagtgaagacagatcaccacaaacgaccagtggataaagagcttcagatcgcaaatgttgctgacaatgttgaagaagatgaggaactaattctccggagcactatgcaaaatttctcaactttgaagcacattcatgtgaatgaagattttgttgagagtgacagtgatgagtctatttctgatgtcactttaaggctaaaggattcatgtctttcagaacaaccaatgaaagatgtgcatatggatattcgtattgtccagcgatctccaacttgtcctgatttttatccacttgagcattatgattgggaaagtgatatcatttggaacaattcaccagcaactgatcagcaggcttatgcaaaaatctgtgaatctgaagagagtgaggacactcatggtgaagaccagggtaaggattatggccaggcctccaggtgttgggatgtacagagtaaaaccaatggttctccagtaattaaagagactttttgttgtacagaaatgcctgctccagctaactactgcccccctgggaaaagttaccctccattgacaaacgaagataacttagatcacataatgccaaataacttagatgatgcagttaaaattgacaccatggtgcgtttaaataaccttagtgtactaaacagggaattattagaaggatcatggttggacaacataatttgggatcctaatgaggttaccccaaagcctaaactgatctttgacctcaaagatgatcatatgctttttgagatcctagatgaaaagaatgtggaccatctccagtctcatgctcgtgctatgattgttagccagtcaactaagacttcaacaccaacagttgacaattttggcgatcaaccaaagccattgagtggcaggttcaacatctccaatgacaagttttattcaaataggaagactccacaacaagctaaatctcatactaaaaaacgcgctttaatgggcataaaggtggtgcattctgctccagctcataagctgcaaaccatgaagccagtgttgagcaatgaagagaacaactag

SEQ ID NO: 80349 - DNA, 6312 bp, Zea Mays
atccggcccccggcctccggtctccagtcgcccccggcttctggtctctgcccccgcagtggtcgtgccccactgggctgaggaggaacagcttccggttcctggtgctgatcttgaacggcgcggcgctcaggtcggaggaggcgttgccggcgagactgaggtcgcagaaggagccataccaaaaaaaatcgtcctccgctactgcctacgtgacaaaaaatcctgcggagacctggcagaagtcgcccggtctcccccgcctctggcttggcctcgccatttacgctacaccttgagatttttattcactccatccaatctggccctgcgtttctagattttgcgagggaagacgccaattaggagcctgagggtgcgacggcctagggtttgtagctactggtgtcgtcgcggcctgtggaggcggtaggggacagcgacatctgcagccatggacgacagcgagctccatgaagaggagaacccaaccaatagtgccgtagatgacgatgacgacgaggattatgaggagcctggtggaggaaatcacttattggggtttatgttcggcaatgtagatgattctggtgatttagatgctgactatcttgatgaggatgcaaaggaacacctttttgcactggcagataagcttggtccatctctcaaagacattgacctaatgaagtcttctccagcaccaactgatccttccgaacaagactatgatgagaaggcagaagatgctgttgattatgaagatattgatgaagaatatgatggacctgaagttgaggcaactacagaggaagacaatgtgttgtcaaaaaaggattacttctcttcatctacagtgtatgcatcagtcaacagtacagtttcagtgtttgacgatgaaaactacgatgaggaagaagaaccacccaatgataatgagcctcctggtgatagtgctgcccaaaatttatcttcagtttctatcgagcaggcagatacgacaacctcaagcgataaccttgccatggaaaagattggcttgttatcacatccagaggaaaacatggactttgaatatgaagatttggagaatgaaaagggcactggggaaggccagcttgagcctgaaagtgcaacttcccttcctgttttatgcatagaggatgggaacgctatcctgagattctctgaaatttttggtatccaagagcctgtaagaaaagtgaagacagatcaccacaaacgaccagtggataaagagcttcagatcgcaaatgttgctgacaatgttgaagaagatgaggaactaattctccggagcactatgcaaaatttctcaactttgaagcacattcatgtgaatgaagattttgttgagagtgacagtgatgagtctatttctgatgtcactttaaggctaaaggattcatgtctttcagaacaaccaatgaaagatgtgcatatggatattcgtattgtccagcgatctccaacttgtcctgatttttatccacttgagcattatgattgggaaagtgatatcatttggaacaattcaccagcaactgatcagcaggcttatgcaaaaatctgtgaatctgaagagagtgaggacactcatggtgaagaccagggtaaggattatggccaggcctccaggtgttgggatgtacagagtaaaaccaatggttctccagtaattaaagagactttttgttgtacagaaatgcctgctccagctaactactgcccccctgggaaaagttaccctccattgacaaacgaagataacttagatcacataatgccaaataacttagatgatgcagttaaaattgacaccatggtgcgtttaaataaccttagtgtactaaacagggaattattagaaggatcatggttggacaacataatttgggatcctaatgaggttaccccaaagcctaaactgatctttgacctcaaagatgatcatatgctttttgagatcctagatgaaaagaatgtggaccatctccagtctcatgctcgtgctatgattgttagccagtcaactaagacttcaacaccaacagttgacaattttggcgatcaaccaaagccattgagtggcaggttcaacatctccaatgacaagttttattcaaataggaagactccacaacaagctaaatctcatactaaaaaacgcgctttaatgggcataaaggtggtgcattctgctccagctcataagctgcaaaccatgaagccagtgttgagcaataaggaaattgcaaactttcatagaccaagagctaagtggtacccacatgaaaataaaattgcctctcagttacaaggacctgcttgtagccatgggaggatggctgttttacttatgtcattgggaggaaaaggagtcaagattctggtcaatgctgaggacactccggtctctgtcaaattaaaagcatcaaagaagttcggttgaattgaagccttctgagaagatcaaattgttctgttctgggaaagagcttcaggatgacatctcgttagcaatgcaaaatgtgcgaccaaactccattgtgcatgctgttcgcactgaagtgtacctatggccaaaagcacagaaattacctggtgaggacaagcctctacgccctcctggggctttcaggaaaaaaactgacttgtctatcaaggatggacatgtttttttaatggaatattgtgaagagagacctttgcttctctcgaatgcaggaatgggagcccgtctctgtacatattaccagaaaactacccctactgatcagacagctgcatcactgcgaaacaacagtgatggactgggcacagtgcttgcaattgatcctgctgataaatccccttttctaggagagatacattctgggtcccaccaatcttgtcttgaaacaaacatgtatagatcacctgtatttccccataaggttgcaccaactgattacttattagttcgttcagccaaaggggctctttccctccgtcgcattgacaagctatatgttgttggccaacaagaacctcatatggaagtcttttcaccagggactaagaacatgcaaaattatcttctgaaccgagttcttgcatatgtttatcgtgagtttcgtgctagagagaggcctgatgctattcctcagattcgagctgacgagttacccatacaaagtcctctgacagaagccatagtgaaaaaacgattgaagcattgtgcagatttgaagaaaggaccaaaggggcattttttctggacacagagacctgatttccgggttccatcagaagaagaactgaggagattattgacgccagaaagtgtttgctgttatgaaagtatgcaagctggtttgtatcgtctcaagcgcttaggaattctgaagcttactcagcctgttggattggcttctgccatgaatcagcttcctgatgaggctattgagcttgctgctgcatcacatatcgagagggaactgcaaatcactagctggaatcttacaagtaatttcgtcgcttgtactaatcaggacagagaaaatatagaaagattagaaatcactggtgttggagatccatctggtcgtgggttaggattcagctatgtgcgagtagcaccaaaagcacctgcctccaattcagtgctcaagaagaagtcagctgctgcaaagggtaccactgtaactggcactgatgctgatctccgcagattgagcatggatgcagcccgtgagttgctgctaaaatttggcgtacctgaagagcaaattgataaattaacaaggtggcatcggatcgctatggtgaggaagctttcaagtgagcaagctgcatcgggaattactatcgatgaaattcctgttagtaagtttgcacgtggacaaaggatgtcttttctgcaacttcagcagcaaactagggagaaatgtcaggaaatttgggacagacaagttcagtcactttcagctttagatggtgatgacaatgccagtgacacagaagctcacagtgatctagactcatttgctggggatcttgagaacttgctagacgcagaagaatttgatgatgaggatactagtacagcagacttgagaattgacaaagcagatggaatgagaggacttaaaatgagaaggtgctctacgcaagcccaaattaacaaggaaattgaagatgatgaaacagaggcttctctggcaaagaaactacttgaagacgatggcaatgatgtgaagaggaaaaaacagcctgtggaattgacaaattgtggcacctctttagttgccaataaaatgaagcagagtaagactgggcaaacgatcaaatcatctggttatgctggtgcattaaccccaaaggagaacacaccaagagaaggaaaagaggttgaaaattcttttgttgagggtggtttgtcctcaaaactaaaaccaaagatggcactcgatgtaaatgagactgttctagttaaaaagaaaagtgttccaggaaaggatggacctaaggaaaagaaacagggtgcaagaggggatagtcttgtttgtggagcctgtagtcaggttgggcatatgcggactaacaaactgtgccctaagtatcgggaggatccagaaatgtcagaaatggatgctaattcagttaagcccaactctatggatataaaccatttgcaagcaaagacacctaaaaggttgataacaaaagtttcctctgaagttactgaaactgaagggccagaaggtattgagaagacaaaatctgtcccagtaaagttcaaagtaggggcacctgataaatccttggagaggaacatgtcagtctccgtttcactcgtttctgataaacgtgtcatggatgttacagacagtagatctaccggaaaggtaaacaagatagtgatacctaataagatgaagtctgatgatttccctcctgacactccaaagccatctgttgtatttcggcctcctgctgaagaaaaggatgtacctcgcaaaaagatcaccatcaagcagcctaaaggcatagaccagcaaagacatgttgaatctaggagtgttcaggaacccaccagaaagacaagaaaaattgtagaattgtcgagttttgaggataaaagtagagaggatgatcattgggttggtggggaacccagccaggtgaattcctcacatgggaggaggctgggtctggaaggaaaaataagcaaagccacaatggaaaatgaaagatcctggagagattttgaggagcgaagagaaatgccacaagcaaggctctttgatgctacgatatatgcatcaagggaggaagatcatctaaaggcaaaaaagaaaaacaagaaaaagaaaaaacatgaattcaaagatgatgacttacttgatcacaggccatacagaaatgacaggagggtacctgaaagacatcgagcactaaaacgatctagtccagctcctgtggttggatatgcatcatctgccaagcgtcgcagaggaggagaggttgagctctccaacatattggaaaaagtagttgatcacttgcggggtttgagtggatcactgctgtttttaaaaccagtgacaaagaaagaagcttctgattaccttgatatcatacggtacccaatggatcttggtaccatcagggacaaggtgagaaagatggtgtacagaaacagggatgaattcaggcacgacgtagcacagatacaactcaatgcacacatatacaacgacactcgctatcctcacatccctccgcttgctgacgagctcatggaggtctgcgaccatctgctttacgaaaacgcagatctgctcaccgaggcggaagatgctatcgagtagcaatataaaaagctagatttagcatttggatcttgctatatcctaacatagatgatgtatctatcttctgatctgtaggaggggaaaaggttgtacattttttgggcctagcagcaatctacatgtgatcccgaatccagccagcttctgttggtattgtgttgagaggtagtggaagtacaaaatgtctaggttagccactcaatggcctcatgttgtaaaaatgtagaatgtaatcatgtccatatacatggcatatatcggtccaataatccgattgtgttgcagtatttgatatgatatggaatggcgtttcaattgcagcgtgaatcaagcacgggcctgtgtgcacactttcttccaacttgaaccttatttcttatctggaggtgtatatgcattgaaccctgaaccgcaaagctgatggacaattttt

SEQ ID NO: 80350 - DNA, 6262 bp, Zea Mays
ggtctccagtcgcccccggcttctggtctctgcccccgcagtggtcgtgccccactgggctgaggaggaacagcttccggttcctggtgctgatcttgaacggcgcggcgctcaggtcggaggaggcgttgccggcgagactgaggtcgcagaaggagccataccaaaaaaaatcgtcctccgctactgcctacgtgacaaaaaatcctgcggagacctggcagaagtcgcccggtctcccccgcctctggcttggcctcgccatttacgctacaccttgagatttttattcactccatccaatctggccctgcgtttctagattttgcgagggaagacgccaattaggagcctgagggtgcgacggcctagggtttgtagctactggtgtcgtcgcggcctgtggaggcggtaggggacagcgacatctgcagccatggacgacagcgagctccatgaagaggagaacccaaccaatagtgccgtagatgacgatgacgacgaggattatgaggagcctggtggaggaaatcacttattggggtttatgttcggcaatgtagatgattctggtgatttagatgctgactatcttgatgaggatgcaaaggaacacctttttgcactggcagataagcttggtccatctctcaaagacattgacctaatgaagtcttctccagcaccaactgatccttccgaacaagactatgatgagaaggcagaagatgctgttgattatgaagatattgatgaagaatatgatggacctgaagttgaggcaactacagaggaagacaatgtgttgtcaaaaaaggattacttctcttcatctacagtgtatgcatcagtcaacagtacagtttcagtgtttgacgatgaaaactacgatgaggaagaagaaccacccaatgataatgagcctcctggtgatagtgctgcccaaaatttatcttcagtttctatcgagcaggcagatacgacaacctcaagcgataaccttgccatggaaaagattggcttgttatcacatccagaggaaaacatggactttgaatatgaagatttggagaatgaaaagggcactggggaaggccagcttgagcctgaaagtgcaacttcccttcctgttttatgcatagaggatgggaacgctatcctgagattctctgaaatttttggtatccaagagcctgtaagaaaagtgaagacagatcaccacaaacgaccagtggataaagagcttcagatcgcaaatgttgctgacaatgttgaagaagatgaggaactaattctccggagcactatgcaaaatttctcaactttgaagcacattcatgtgaatgaagattttgttgagagtgacagtgatgagtctatttctgatgtcactttaaggctaaaggattcatgtctttcagaacaaccaatgaaagatgtgcatatggatattcgtattgtccagcgatctccaacttgtcctgatttttatccacttgagcattatgattgggaaagtgatatcatttggaacaattcaccagcaactgatcagcaggcttatgcaaaaatctgtgaatctgaagagagtgaggacactcatggtgaagaccagggtaaggattatggccaggcctccaggtgttgggatgtacagagtaaaaccaatggttctccagtaattaaagagactttttgttgtacagaaatgcctgctccagctaactactgcccccctgggaaaagttaccctccattgacaaacgaagataacttagatcacataatgccaaataacttagatgatgcagttaaaattgacaccatggtgcgtttaaataaccttagtgtactaaacagggaattattagaaggatcatggttggacaacataatttgggatcctaatgaggttaccccaaagcctaaactgatctttgacctcaaagatgatcatatgctttttgagatcctagatgaaaagaatgtggaccatctccagtctcatgctcgtgctatgattgttagccagtcaactaagacttcaacaccaacagttgacaattttggcgatcaaccaaagccattgagtggcaggttcaacatctccaatgacaagttttattcaaataggaagactccacaacaagctaaatctcatactaaaaaacgcgctttaatgggcataaaggtggtgcattctgctccagctcataagctgcaaaccatgaagccagtgttgagcaataaggaaattgcaaactttcatagaccaagagctaagtggtacccacatgaaaataaaattgcctctcagttacaaggacctgcttgtagccatgggaggatggctgttttacttatgtcattgggaggaaaaggagtcaagattctggtcaatgctgaggacactccggtctctgtcaaattaaaagcatcaaagaagttcgaattgaagccttctgagaagatcaaattgttctgttctgggaaagagcttcaggatgacatctcgttagcaatgcaaaatgtgcgaccaaactccattgtgcatgctgttcgcactgaagtgtacctatggccaaaagcacagaaattacctggtgaggacaagcctctacgccctcctggggctttcaggaaaaaaactgacttgtctatcaaggatggacatgtttttttaatggaatattgtgaagagagacctttgcttctctcgaatgcaggaatgggagcccgtctctgtacatattaccagaaaactacccctactgatcagacagctgcatcactgcgaaacaacagtgatggactgggcacagtgcttgcaattgatcctgctgataaatccccttttctaggagagatacattctgggtcccaccaatcttgtcttgaaacaaacatgtatagatcacctgtatttccccataaggttgcaccaactgattacttattagttcgttcagccaaaggggctctttccctccgtcgcattgacaagctatatgttgttggccaacaaggactaagaacatgcaaaattatcttctgaaccgagttcttgcatatgtttatcgtgagtttcgtgctagagagaggcctgatgctattcctcagattcgagctgacgagttacccatacaaagtcctctgacagaagccatagtgaaaaaacgattgaagcattgtgcagatttgaagaaaggaccaaaggggcattttttctggacacagagacctgatttccgggttccatcagaagaagaactgaggagattattgacgccagaaagtgtttgctgttatgaaagtatgcaagctggtttgtatcgtctcaagcgcttaggaattctgaagcttactcagcctgttggattggcttctgccatgaatcagcttcctgatgaggctattgagcttgctgctgcatcacatatcgagagggaactgcaaatcactagctggaatcttacaagtaatttcgtcgcttgtactaatcaggacagagaaaatatagaaagattagaaatcactggtgttggagatccatctggtcgtgggttaggattcagctatgtgcgagtagcaccaaaagcacctgcctccaattcagtgctcaagaagaagtcagctgctgcaaagggtaccactgtaactggcactgatgctgatctccgcagattgagcatggatgcagcccgtgagttgctgctaaaatttggcgtacctgaagagcaaattgataaattaacaaggtggcatcggatcgctatggtgaggaagctttcaagtgagcaagctgcatcgggaattactatcgatgaaattcctgttagtaagtttgcacgtggacaaaggatgtcttttctgcaacttcagcagcaaactagggagaaatgtcaggaaatttgggacagacaagttcagtcactttcagctttagatggtgatgacaatgccagtgacacagaagctcacagtgatctagactcatttgctggggatcttgagaacttgctagacgcagaagaatttgatgatgaggatactagtacagcagacttgagaattgacaaagcagatggaatgagaggacttaaaatgagaaggtgctctacgcaagcccaaattaacaaggaaattgaagatgatgaaacagaggcttctctggcaaagaaactacttgaagacgatggcaatgatgtgaagaggaaaaaacagcctgtggaattgacaaattgtggcacctctttagttgccaataaaatgaagcagagtaagactgggcaaacgatcaaatcatctggttatgctggtgcattaaccccaaaggagaacacaccaagagaaggaaaagaggttgaaaattcttttgttgagggtggtttgtcctcaaaactaaaaccaaagatggcactcgatgtaaatgagactgttctagttaaaaagaaaagtgttccaggaaaggatggacctaaggaaaagaaacagggtgcaagaggggatagtcttgtttgtggagcctgtagtcaggttgggcatatgcggactaacaaactgtgccctaagtatcgggaggatccagaaatgtcagaaatggatgctaattcagttaagcccaactctatggatataaaccatttgcaagcaaagacacctaaaaggttgataacaaaagtttcctctgaagttactgaaactgaagggccagaaggtattgagaagacaaaatctgtcccagtaaagttcaaagtaggggcacctgataaatccttggagaggaacatgtcagtctccgtttcactcgtttctgataaacgtgtcatggatgttacagacagtagatctaccggaaaggtaaacaagatagtgatacctaataagatgaagtctgatgatttccctcctgacactccaaagccatctgttgtatttcggcctcctgctgaagaaaaggatgtacctcgcaaaaagatcaccatcaagcagcctaaaggcatagaccagcaaagacatgttgaatctaggagtgttcaggaacccaccagaaagacaagaaaaattgtagaattgtcgagttttgaggataaaagtagagaggatgatcattgggttggtggggaacccagccaggtgaattcctcacatgggaggaggctgggtctggaaggaaaaataagcaaagccacaatggaaaatgaaagatcctggagagattttgaggagcgaagagaaatgccacaagcaaggctctttgatgctacgatatatgcatcaagggaggaagatcatctaaaggcaaaaaagaaaaacaagaaaaagaaaaaacatgaattcaaagatgatgacttacttgatcacaggccatacagaaatgacaggagggtacctgaaagacatcgagcactaaaacgatctagtccagctcctgtggttggatatgcatcatctgccaagcgtcgcagaggaggagaggttgagctctccaacatattggaaaaagtagttgatcacttgcggggtttgagtggatcactgctgtttttaaaaccagtgacaaagaaagaagcttctgattaccttgatatcatacggtacccaatggatcttggtaccatcagggacaaggtgagaaagatggtgtacagaaacagggatgaattcaggcacgacgtagcacagatacaactcaatgcacacatatacaacgacactcgctatcctcacatccctccgcttgctgacgagctcatggaggtctgcgaccatctgctttacgaaaacgcagatctgctcaccgaggcggaagatgctatcgagtagcaatataaaaagctagatttagcatttggatcttgctatatcctaacatagatgatgtatctatcttctgatctgtaggaggggaaaaggttgtacattttttgggcctagcagcaatctacatgtgatcccgaatccagccagcttctgttggtattgtgttgagaggtagtggaagtacaaaatgtctaggttagccactcaatggcctcatgttgtaaaaatgtagaatgtaatcatgtccatatacatggcatatatcggtccaataatccgattgtgttgcagtatttgatatgatatggaatggcgtttcaattgcagcgtgaatcaagcacgggcctgtgtgcacactttcttccaacttgaaccttatttcttatctggaggtgtatatgcattgaaccctgaaccgcaaagctgatggacaattttt

SEQ ID NO: 80351 - DNA, 6281 bp, Zea Mays
cttctggtctctgcccccgcagtggtcgtgccccactgggctgaggaggaacagcttccggttcctggtgctgatcttgaacggcgcggcgctcaggtcggaggaggcgttgccggcgagactgaggtcgcagaaggagccataccaaaaaaaatcgtcctccgctactgcctacgtgacaaaaaatcctgcggagacctggcagaagtcgcccggtctcccccgcctctggcttggcctcgccatttacgctacaccttgagatttttattcactccatccaatctggccctgcgtttctagattttgcgagggaagacgccaattaggagcctgagggtgcgacggcctagggtttgtagctactggtgtcgtcgcggcctgtggaggcggtaggggacagcgacatctgcagccatggacgacagcgagctccatgaagaggagaacccaaccaatagtgccgtagatgacgatgacgacgaggattatgaggagcctggtggaggaaatcacttattggggtttatgttcggcaatgtagatgattctggtgatttagatgctgactatcttgatgaggatgcaaaggaacacctttttgcactggcagataagcttggtccatctctcaaagacattgacctaatgaagtcttctccagcaccaactgatccttccgaacaagactatgatgagaaggcagaagatgctgttgattatgaagatattgatgaagaatatgatggacctgaagttgaggcaactacagaggaagacaatgtgttgtcaaaaaaggattacttctcttcatctacagtgtatgcatcagtcaacagtacagtttcagtgtttgacgatgaaaactacgatgaggaagaagaaccacccaatgataatgagcctcctggtgatagtgctgcccaaaatttatcttcagtttctatcgagcaggcagatacgacaacctcaagcgataaccttgccatggaaaagattggcttgttatcacatccagaggaaaacatggactttgaatatgaagatttggagaatgaaaagggcactggggaaggccagcttgagcctgaaagtgcaacttcccttcctgttttatgcatagaggatgggaacgctatcctgagattctctgaaatttttggtatccaagagcctgtaagaaaagtgaagacagatcaccacaaacgaccagtggataaagagcttcagatcgcaaatgttgctgacaatgttgaagaagatgaggaactaattctccggagcactatgcaaaatttctcaactttgaagcacattcatgtgaatgaagattttgttgagagtgacagtgatgagtctatttctgatgtcactttaaggctaaaggattcatgtctttcagaacaaccaatgaaagatgtgcatatggatattcgtattgtccagcgatctccaacttgtcctgatttttatccacttgagcattatgattgggaaagtgatatcatttggaacaattcaccagcaactgatcagcaggcttatgcaaaaatctgtgaatctgaagagagtgaggacactcatggtgaagaccagggtaaggattatggccaggcctccaggtgttgggatgtacagagtaaaaccaatggttctccagtaattaaagagactttttgttgtacagaaatgcctgctccagctaactactgcccccctgggaaaagttaccctccattgacaaacgaagataacttagatcacataatgccaaataacttagatgatgcagttaaaattgacaccatggtgcgtttaaataaccttagtgtactaaacagggaattattagaaggatcatggttggacaacataatttgggatcctaatgaggttaccccaaagcctaaactgatctttgacctcaaagatgatcatatgctttttgagatcctagatgaaaagaatgtggaccatctccagtctcatgctcgtgctatgattgttagccagtcaactaagacttcaacaccaacagttgacaattttggcgatcaaccaaagccattgagtggcaggttcaacatctccaatgacaagttttattcaaataggaagactccacaacaagctaaatctcatactaaaaaacgcgctttaatgggcataaaggtggtgcattctgctccagctcataagctgcaaaccatgaagccagtgttgagcaataaggaaattgcaaactttcatagaccaagagctaagtggtacccacatgaaaataaaattgcctctcagttacaaggacctgcttgtagccatgggaggatggctgttttacttatgtcattgggaggaaaaggagtcaagattctggtcaatgctgaggacactccggtctctgtcaaattaaaagcatcaaagaagttcgctttttgcagaattgaagccttctgagaagatcaaattgttctgttctgggaaagagcttcaggatgacatctcgttagcaatgcaaaatgtgcgaccaaactccattgtgcatgctgttcgcactgaagtgtacctatggccaaaagcacagaaattacctggtgaggacaagcctctacgccctcctggggctttcaggaaaaaaactgacttgtctatcaaggatggacatgtttttttaatggaatattgtgaagagagacctttgcttctctcgaatgcaggaatgggagcccgtctctgtacatattaccagaaaactacccctactgatcagacagctgcatcactgcgaaacaacagtgatggactgggcacagtgcttgcaattgatcctgctgataaatccccttttctaggagagatacattctgggtcccaccaatcttgtcttgaaacaaacatgtatagatcacctgtatttccccataaggttgcaccaactgattacttattagttcgttcagccaaaggggctctttccctccgtcgcattgacaagctatatgttgttggccaacaagaacctcatatggaagtcttttcaccagggactaagaacatgcaaaattatcttctgaaccgagttcttgcatatgtttatcgtgagtttcgtgctagagagaggcctgatgctattcctcagattcgagctgacgagttacccatacaaagtcctctgacagaagccatagtgaaaaaacgattgaagcattgtgcagatttgaagaaaggaccaaaggggcattttttctggacacagagacctgatttccgggttccatcagaagaagaactgaggagattattgacgccagaaagtgtttgctgttatgaaagtatgcaagctggtttgtatcgtctcaagcgcttaggaattctgaagcttactcagcctgttggattggcttctgccatgaatcagcttcctgatgaggctattgagcttgctgctgcatcacatatcgagagggaactgcaaatcactagctggaatcttacaagtaatttcgtcgcttgtactaatcaggacagagaaaatatagaaagattagaaatcactggtgttggagatccatctggtcgtgggttaggattcagctatgtgcgagtagcaccaaaagcacctgcctccaattcagtgctcaagaagaagtcagctgctgcaaagggtaccactgtaactggcactgatgctgatctccgcagattgagcatggatgcagcccgtgagttgctgctaaaatttggcgtacctgaagagcaaattgataaattaacaaggtggcatcggatcgctatggtgaggaagctttcaagtgagcaagctgcatcgggaattactatcgatgaaattcctgttagtaagtttgcacgtggacaaaggatgtcttttctgcaacttcagcagcaaactagggagaaatgtcaggaaatttgggacagacaagttcagtcactttcagctttagatggtgatgacaatgccagtgacacagaagctcacagtgatctagactcatttgctggggatcttgagaacttgctagacgcagaagaatttgatgatgaggatactagtacagcagacttgagaattgacaaagcagatggaatgagaggacttaaaatgagaaggtgctctacgcaagcccaaattaacaaggaaattgaagatgatgaaacagaggcttctctggcaaagaaactacttgaagacgatggcaatgatgtgaagaggaaaaaacagcctgtggaattgacaaattgtggcacctctttagttgccaataaaatgaagcagagtaagactgggcaaacgatcaaatcatctggttatgctggtgcattaaccccaaaggagaacacaccaagagaaggaaaagaggttgaaaattcttttgttgagggtggtttgtcctcaaaactaaaaccaaagatggcactcgatgtaaatgagactgttctagttaaaaagaaaagtgttccaggaaaggatggacctaaggaaaagaaacagggtgcaagaggggatagtcttgtttgtggagcctgtagtcaggttgggcatatgcggactaacaaactgtgccctaagtatcgggaggatccagaaatgtcagaaatggatgctaattcagttaagcccaactctatggatataaaccatttgcaagcaaagacacctaaaaggttgataacaaaagtttcctctgaagttactgaaactgaagggccagaaggtattgagaagacaaaatctgtcccagtaaagttcaaagtaggggcacctgataaatccttggagaggaacatgtcagtctccgtttcactcgtttctgataaacgtgtcatggatgttacagacagtagatctaccggaaaggtaaacaagatagtgatacctaataagatgaagtctgatgatttccctcctgacactccaaagccatctgttgtatttcggcctcctgctgaagaaaaggatgtacctcgcaaaaagatcaccatcaagcagcctaaaggcatagaccagcaaagacatgttgaatctaggagtgttcaggaacccaccagaaagacaagaaaaattgtagaattgtcgagttttgaggataaaagtagagaggatgatcattgggttggtggggaacccagccaggtgaattcctcacatgggaggaggctgggtctggaaggaaaaataagcaaagccacaatggaaaatgaaagatcctggagagattttgaggagcgaagagaaatgccacaagcaaggctctttgatgctacgatatatgcatcaagggaggaagatcatctaaaggcaaaaaagaaaaacaagaaaaagaaaaaacatgaattcaaagatgatgacttacttgatcacaggccatacagaaatgacaggagggtacctgaaagacatcgagcactaaaacgatctagtccagctcctgtggttggatatgcatcatctgccaagcgtcgcagaggaggagaggttgagctctccaacatattggaaaaagtagttgatcacttgcggggtttgagtggatcactgctgtttttaaaaccagtgacaaagaaagaagcttctgattaccttgatatcatacggtacccaatggatcttggtaccatcagggacaaggtgagaaagatggtgtacagaaacagggatgaattcaggcacgacgtagcacagatacaactcaatgcacacatatacaacgacactcgctatcctcacatccctccgcttgctgacgagctcatggaggtctgcgaccatctgctttacgaaaacgcagatctgctcaccgaggcggaagatgctatcgagtagcaatataaaaagctagatttagcatttggatcttgctatatcctaacatagatgatgtatctatcttctgatctgtaggaggggaaaaggttgtacattttttgggcctagcagcaatctacatgtgatcccgaatccagccagcttctgttggtattgtgttgagaggtagtggaagtacaaaatgtctaggttagccactcaatggcctcatgttgtaaaaatgtagaatgtaatcatgtccatatacatggcatatatcggtccaataatccgattgtgttgcagtatttgatatgatatggaatggcgtttcaattgcagcgtgaatcaagcacgggcctgtgtgcacactttcttccaacttgaaccttatttcttatctggaggtgtatatgcattgaaccctgaaccgcaaagctgatggacaattttt

SEQ ID NO: 80352 - DNA, 1402 bp, Zea Mays
gccccactgggctgaggaggaacagcttccggttcctggtgctgatcttgaacggcgcggcgctcaggtcggaggaggcgttgccggcgagactgaggtcgcagaaggagccataccaaaaaaaatcgtcctccgctactgcctacgtgacaaaaaatcctgcggagacctggcagaagtcgcccggtctcccccgcctctggcttggcctcgccatttacgctacaccttgagatttttattcactccatccaatctggccctgcgtttctagattttgcgagggaagacgccaattaggagcctgagggtgcgacggcctagggtttgtagctactggtgtcgtcgcggcctgtggaggcggtaggggacagcgacatctgcagccatggacgacagcgagctccatgaagaggagaacccaaccaatagtgccgtagatgacgatgacgacgaggattatgaggagcctggtggaggaaatcacttattggggtttatgttcggcaatgtagatgattctggtgatttagatgctgactatcttgatgaggatgcaaaggaacacctttttgcactggcagataagcttggtccatctctcaaagacattgacctaatgaagtcttctccagcaccaactgatccttccgaacaagactatgatgagaaggcagaagatgctgttgattatgaagatattgatgaagaatatgatggacctgaagttgaggcaactacagaggaagacaatgtgttgtcaaaaaaggattacttctcttcatctacagtgtatgcatcagtcaacagtacagtttcagtgtttgacgatgaaaactacgatgaggaagaagaaccacccaatgataatgagcctcctggtgatagtgctgcccaaaatttatcttcagtttctatcgagcaggcagatacgacaacctcaagcgataaccttgccatggaaaagattggcttgttatcacatccagaggaaaacatggactttgaatatgaagatttggagaatgaaaagggcactggggaaggccagcttgagcctgaaagtgcaacttcccttcctgttttatgcatagaggatgggaacgctatcctgagattctctgaaatttttggtatccaagagcctgtaagaaaagtgaagacagatcaccacaaacgaccagtggataaaggtattgtgcatgttgcaacaaaaagatccaagaagcaccatcctcccccatgtatgcaagacattgatagatagatggtagctggagggtgttacctgaaagcaatggttactgagcataattatccttactgcttatgttttcactttgagatgaaaaaaattaactgccactgtctatgtcaatggtttatacttatcatttctaaa

SEQ ID NO: 80353 - DNA, 3330 bp, Zea Mays
taaaagacttccaaaggggctctttccctccgtcgcattgacaagctatatgttgttggccaacaagaacctcatatggaagtcttttcaccagggactaagaacatgcaaaattatcttctgaaccgagttcttgcatatgtttatcgtgagtttcgtgctagagagaggcctgatgctattcctcagattcgagctgacgagttacccatacaaagtcctctgacagaagccatagtgaaaaaacgattgaagcattgtgcagatttgaagaaaggaccaaaggggcattttttctggacacagagacctgatttccgggttccatcagaagaagaactgaggagattattgacgccagaaagtgtttgctgttatgaaagtatgcaagctggtttgtatcgtctcaagcgcttaggaattctgaagcttactcagcctgttggattggcttctgccatgaatcagcttcctgatgaggctattgagcttgctgctgcatcacatatcgagagggaactgcaaatcactagctggaatcttacaagtaatttcgtcgcttgtactaatcaggacagagaaaatatagaaagattagaaatcactggtgttggagatccatctggtcgtgggttaggattcagctatgtgcgagtagcaccaaaagcacctgcctccaattcagtgctcaagaagaagtcagctgctgcaaagggtaccactgtaactggcactgatgctgatctccgcagattgagcatggatgcagcccgtgagttgctgctaaaatttggcgtacctgaagagcaaattgataaattaacaaggtggcatcggatcgctatggtgaggaagctttcaagtgagcaagctgcatcgggaattactatcgatgaaattcctgttagtaagtttgcacgtggacaaaggatgtcttttctgcaacttcagcagcaaactagggagaaatgtcaggaaatttgggacagacaagttcagtcactttcagctttagatggtgatgacaatgccagtgacacagaagctcacagtgatctagactcatttgctggggatcttgagaacttgctagacgcagaagaatttgatgatgaggatactagtacagcagacttgagaattgacaaagcagatggaatgagaggacttaaaatgagaaggtgctctacgcaagcccaaattaacaaggaaattgaagatgatgaaacagaggcttctctggcaaagaaactacttgaagacgatggcaatgatgtgaagaggaaaaaacagcctgtggaattgacaaattgtggcacctctttagttgccaataaaatgaagcagagtaagactgggcaaacgatcaaatcatctggttatgctggtgcattaaccccaaaggagaacacaccaagagaaggaaaagaggttgaaaattcttttgttgagggtggtttgtcctcaaaactaaaaccaaagatggcactcgatgtaaatgagactgttctagttaaaaagaaaagtgttccaggaaaggatggacctaagaaaagaaacagggtgcaagaggggatagtcttgtttgtggagcctgtagtcaggttgggcatatgcggactaacaaactgtgccctaagtatcgggaggatccagaaatgtcagaaatggatgctaattcagttaagcccaactctatggatataaaccatttgcaagcaaagacacctaaaaggttgataacaaaagtttcctctgaagttactgaaactgaagggccagaaggtattgagaagacaaaatctgtcccagtaaagttcaaagtaggggcacctgataaatccttggagaggaacatgtcagtctccgtttcactcgtttctgataaacgtgtcatggatgttacagacagtagatctaccggaaaggtaaacaagatagtgatacctaataagatgaagtctgatgatttccctcctgacactccaaagccatctgttgtatttcggcctcctgctgaagaaaaggatgtacctcgcaaaaagatcaccatcaagcagcctaaaggcatagaccagcaaagacatgttgaatctaggagtgttcaggaacccaccagaaagacaagaaaaattgtagaattgtcgagttttgaggataaaagtagagaggatgatcattgggttggtggggaacccagccaggtgaattcctcacatgggaggaggctgggtctggaaggaaaaataagcaaagccacaatggaaaatgaaagatcctggagagattttgaggagcgaagagaaatgccacaagcaaggctctttgatgctacgatatatgcatcaagggaggaagatcatctaaaggcaaaaaagaaaaacaagaaaaagaaaaaacatgaattcaaagatgatgacttacttgatcacaggccatacagaaatgacaggagggtacctgaaagacatcgagcactaaaacgatctagtccagctcctgtggttggatatgcatcatctgccaagcgtcgcagaggaggagaggttgagctctccaacatattggaaaaagtagttgatcacttgcggggtttgagtggatcactgctgtttttaaaaccagtgacaaagaaagaagcttctgattaccttgatatcatacggtacccaatggatcttggtaccatcagggacaaggtgagaaagatggtgtacagaaacagggatgaattcaggcacgacgtagcacagatacaactcaatgcacacatatacaacgacactcgctatcctcacatccctccgcttgctgacgagctcatggaggtctgcgaccatctgctttacgaaaacgcagatctgctcaccgaggcggaagatgctatcgagtagcaatataaaaagctagatttagcatttggatcttgctatatcctaacatagatgatgtatctatcttctgatctgtaggaggggaaaaggttgtacattttttgggcctagcagcaatctacatgtgatcccgaatccagccagcttctgttggtattgtgttgagaggtagtggaagtacaaaatgtctaggttagccactcaatggcctcatgttgtaaaaatgtagaatgtaatcatgtccatatacatggcatatatcggtccaataatccgattgtgttgcagtatttgatatgatatggaatggcgtttcaattgcagcgtgaatcaagcacgggcctgtgtgcacactttcttccaacttgaaccttatttcttatctggaggtgtatatgcattgaaccctgaaccgcaaagctgatggacaattttt

SEQ ID NO: 80354 - DNA, 2613 bp, Zea Mays
accatatgagtgtctgcagtagcagtcttggtgtcttctagagcacgaagttgttcttgttgctgctaaaatttggcgtacctgaagagcaaattgataaattaacaaggtggcatcggatcgctatggtgaggaagctttcaagtgagcaagctgcatcgggaattactatcgatgaaattcctgttagtaagtttgcacgtggacaaaggatgtcttttctgcaacttcagcagcaaactagggagaaatgtcaggaaatttgggacagacaagttcagtcactttcagctttagatggtgatgacaatgccagtgacacagaagctcacagtgatctagactcatttgctggggatcttgagaacttgctagacgcagaagaatttgatgatgaggatactagtacagcagacttgagaattgacaaagcagatggaatgagaggacttaaaatgagaaggtgctctacgcaagcccaaattaacaaggaaattgaagatgatgaaacagaggcttctctggcaaagaaactacttgaagacgatggcaatgatgtgaagaggaaaaaacagcctgtggaattgacaaattgtggcacctctttagttgccaataaaatgaagcagagtaagactgggcaaacgatcaaatcatctggttatgctggtgcattaaccccaaaggagaacacaccaagagaaggaaaagaggttgaaaattcttttgttgagggtggtttgtcctcaaaactaaaaccaaagatggcactcgatgtaaatgagactgttctagttaaaaagaaaagtgttccaggaaaggatggacctaaggaaaagaaacagggtgcaagaggggatagtcttgtttgtggagcctgtagtcaggttgggcatatgcggactaacaaactgtgccctaagtatcgggaggatccagaaatgtcagaaatggatgctaattcagttaagcccaactctatggatataaaccatttgcaagcaaagacacctaaaaggttgataacaaaagtttcctctgaagttactgaaactgaagggccagaaggtattgagaagacaaaatctgtcccagtaaagttcaaagtaggggcacctgataaatccttggagaggaacatgtcagtctccgtttcactcgtttctgataaacgtgtcatggatgttacagacagtagatctaccggaaaggtaaacaagatagtgatacctaataagatgaagtctgatgatttccctcctgacactccaaagccatctgttgtatttcggcctcctgctgaagaaaaggatgtacctcgcaaaaagatcaccatcaagcagcctaaaggcatagaccagcaaagacatgttgaatctaggagtgttcaggaacccaccagaaagacaagaaaaattgtagaattgtcgagttttgaggataaaagtagagaggatgatcattgggttggtggggaacccagccaggtgaattcctcacatgggaggaggctgggtctggaaggaaaaataagcaaagccacaatggaaaatgaaagatcctggagagattttgaggagcgaagagaaatgccacaagcaaggctctttgatgctacgatatatgcatcaagggaggaagatcatctaaaggcaaaaaagaaaaacaagaaaaagaaaaaacatgaattcaaagatgatgacttacttgatcacaggccatacagaaatgacaggagggtacctgaaagacatcgagcactaaaacgatctagtccagctcctgtggttggatatgcatcatctgccaagcgtcgcagaggaggagaggttgagctctccaacatattggaaaaagtagttgatcacttgcggggtttgagtggatcactgctgtttttaaaaccagtgacaaagaaagaagcttctgattaccttgatatcatacggtacccaatggatcttggtaccatcagggacaaggtgagaaagatggtgtacagaaacagggatgaattcaggcacgacgtagcacagatacaactcaatgcacacatatacaacgacactcgctatcctcacatccctccgcttgctgacgagctcatggaggtctgcgaccatctgctttacgaaaacgcagatctgctcaccgaggcggaagatgctatcgagtagcaatataaaaagctagatttagcatttggatcttgctatatcctaacatagatgatgtatctatcttctgatctgtaggaggggaaaaggttgtacattttttgggcctagcagcaatctacatgtgatcccgaatccagccagcttctgttggtattgtgttgagaggtagtggaagtacaaaatgtctaggttagccactcaatggcctcatgttgtaaaaatgtagaatgtaatcatgtccatatacatggcatatatcggtccaataatccgattgtgttgcagtatttgatatgatatggaatggcgtttcaattgcagcgtgaatcaagcacgggcctgtgtgcacactttcttccaacttgaaccttatttcttatctggaggtgtatatgcattgaaccctgaaccgcaaagctgatggacaattttt

SEQ ID NO: 80355 - DNA, 1569 bp, Zea Mays
gcaggggacatgtgacaagtagctgtactgtacgttattggtgttggatcctgttcctgtacccgtacgttactgcatgcatgacatgcatgtgagctggctgggccgtgttctgcagctgcgggttttctacctgcttggtcagtgtcacgtgtcagtctgcctccctgtgctgtgcatgccatttcctacaaatcctagcgcgagtggttacggccagcaagtcaggttcagggggccatggacagctggtacgcgtggctgtcgcggacggggctggcgccgtcgctggcgcacgagtacgggcgcctcttcagccggaacaagctggagccccgggacgcgccgcacttcgaccacgacctgctcaagagcatgggcatcgccgtcgccaagcaccgcctcgagatcctcaagctggccaggaagcaggacgccggcgcctcgtcgtccgcggcctcgcggctcgggcgcagggccaccaggtgcctgtcccggtgcgcgcgccggctggcaggaggcggcgcgtggagggccgcgtcgtcgtcggtcaccgtcgtcccgaggatctgcggcggcgaagacgccgtccgcgtcggagcagtgcagcggaagggcactggtagcggcaccaccaagaagatggtgctcatgatcaccgacggcggcgtcgccggaggagggtacggctacggcctcagaggccgtggcggcgcgaggctgtcgtcggcgtcgtcgcagaaggcgagtctgatgtttcatgacgggtaccaagacgaggaggaggagatgggagacgacgaggacgaggacggcggcgccggtgacggcgacatcaagtgggactccatgtttcaggacctcaaacccacgtgaggatgaagttctccgatctccagactccggctgctggagtttgatgttgctgcgtgagtgagtcggtcgtcatggctttgcttgtgggcttctggtgtgagagaattttaacaactctcctcatgctgtctgtcgttctcccttccctgagaagagaacgtaatgtcgaaaatgtgtattttcctccactggttttgcggtgttaaagcttgagcaagaaccataggtgcctgatcactgcaattgcaagaccatatttaaatgttgtcggggttttttttacttagttagtacagctagatcaacgtgcaaaatagattatgaccgaaggaaaagaaaaaaggtgtaagcatcggacaacgacatcgtcatagttattgctactgactttcatataaaggtactgactttaatatggagtcttttaagaagtctttaaaagtctaattaaaaaaaataaagagacagactctttgctaagagcccatctctacacaattattcatacatattgtttcttaaatatatttatgatctagtttctcataattgtatcacgaggtctcttaattgtctctgatccttaaaaatcgaaccagtcttaggggttgtacaagccctaacgccgcaacagttctgtagttgtttctatgcagcgcagttgaatgtggcaatagttctgtagttgttttt

SEQ ID NO: 80356 - DNA, 2578 bp, Zea Mays
cgtacgtctcctgattccagcgctcagtctcctacacatggcgcgcgcgctcacccagctcttccccttccagcagctgagcacgccgtccctccctattttagctcgcctctgtcctccatggtccggtcagggacacccacgtcgagctccatcacacgcacgctcagctccagctcagtcgagctcgtccctgcgagcgcgttctcctgcgtccagccgggcgcgcgaagcttctctgctcacggcgctccctgtctgctcggccatggtgaaaccctccctgccatggacgccggagttcctctgctcgttctcatggccgccgtcgagcttccggcgcacgcccatctcctctgctctcccgcgcgcgtcctggaactctccatcgcgtcgatctatgcttgttcgtggtcgcgcgtagtcgtccagctcagcctctgctctgttcctgctactgcgcgcgtgctcgtcggtgttctcagctcgcccgaccggagtttttcctgcgcgcaccgttttcccagctcggatttcgcgagccaccgttgtcctatccgcgtcagcacgtgaccgtggtcgtgttcatcgagttcgccaacgctttgttaacgattcgattgtcgtcgctgctgcgtgcctcgttgtgtgctcacgtttgacgtcgagctgttgaaaccgctctcccttgctcgtgatctcgttatcgttagagccctctctggattcgtgtcctcacccgagcccgcgctaacctgctcaaccacacctcgcgagctcgctccagactcgatctcgtcgtcgttccgtacgtcatcaaaaatttcaagagtcgagtgaagataaagctagcagcgtgatattcaccaagtgctcgacaaaaagcttgaacaagtcgtcgatcgttatcctcgtctacgccaagatccgagaagattgagtgcagaagaaaataaatcagtacgcggtcggagaattctcgagtggataaagataaagcgcgattcgacgcaacacttaccctattttcagtgaaatgctgagctaaaaggcgtcgtcgatttcgtggtttcaagtcagatttaatgagggtaagttgattcgttattctagtcaactaggtatataaatagattaaataaaattgttggtcgtgataattgttattaatttagcatacgtatattgtgatgtttgatctagatgaatcggtaattcaaattaattaagataaacagtttaaagagttaattagattgtttccataactattttaagtcgttggtatttaataatagcgagtcctggttttactagacctctgaaatatattttactaaaattgatagtgtgtgtttataatttattcttgcttgataataaaattagatgtgattgaacaggagaaatgcacgtgatataattagtatatatagtttattattttgtgattattgcgcgtagtcatatgtcggtaactagtgctttcgtatgaaatggtatgacactttgttattaggtgtttaattcgctatcgtgtagcactatttagatttgtgctatttctgtttatatgcattcatgtgcattaggcaaatcatttaggtatatttgttgactacgggatgtggagaaccaaagccaagtcgaccccaaggtgtcgtaaaacacgatctacttcgaacagtgatgctgatgggccaaccggaagatggataatcggaacaaatgcgaagacaaaagatggtcgtcaagcggacgtcgtctaacaaacactaacgtggtgtttatcccaggcaagccccggtgcatgcaaccccttccttgtgtttttaaataatttttacacaatttaagtctagcgaaatgtgcattaggtttataggagttgcttagaaaccctttgatgcattgcctaccttgaaatccatccctttatagatacttctaatgaagtatcaaaacactactacaaaacatgttatatgagacggttaattttcagttcttaagacgcttatgaagtgtccaaatttgatggagtcgtaaaagatgtctcacatttaagatggttataaaccgtcttaaaagatattatataagacaatttttattttataaccgtctgtaaaaggtatttgtttaagtcattttgtccgataaactgtcttaaattatttatttgtttaagacacttcttttaaagaaccgcagagaatacaaacattataagtcataacgtatttatcaaactgtctcgaatatcctacaataatagacgattacaataggaaaactatcttatttaggtgactaatattagacgttttagaaaccgtcttatttagaagactgatattagacattttggtgaccgtcttattaagatttaaacgaaatgacttacacggcagtacattcttcaatttataatcattttttcagatatcacgttataataatttgaaagaaaaatatacatacacatatattgaacaacattataattaatataatataaataagtaccttttaatatctcataaataaacattgtcaaacaactcatacataagtg

SEQ ID NO: 80357 - DNA, 1361 bp, Zea Mays
cgtacgtctcctgattccagcgctcagtctcctacacatggcgcgcgcgctcacccagctcttccccttccagcagctgagcacgccgtccctccctattttagctcgcctctgtcctccatggtccggtcagggacacccacgtcgagctccatcacacgcacgctcagctccagctcagtcgagctcgtccctgcgagcgcgttctcctgcgtccagccgggcgcgcgaagcttctctgctcacggcgctccctgtctgctcggccatggtgaaaccctccctgccatggacgccggagttcctctgctcgttctcatggccgccgtcgagcttccggcgcacgcccatctcctctgctctcccgcgcgcgtcctggaactctccatcgcgtcgatctatgcttgttcgtggtcgcgcgtagtcgtccagctcagcctctgctctgttcctgctactgcgcgcgtgctcgtcggtgttctcagctcgcccgaccggagtttttcctgcgcgcaccgttttcccagctcggatttcgcgagccaccgttgtcctatccgcgtcagcacgtgaccgtggtcgtgttcatcgagttcgccaacgctttgttaacgattcgattgtcgtcgctgctgcgtgcctcgttgtgtgctcacgtttgacgtcgagctgttgaaaccgctctcccttgctcgtgatctcgttatcgttagagccctctctggattcgtgtcctcacccgagcccgcgctaacctgctcaaccacacctcgcgagctcgctccagactcgatctcgtcgtcgttccgtacgtcatcaaaaatttcaagagtcgagtgaagataaagctagcagcgtgatattcaccaagtgctcgacaaaaagcttgaacaagtcgtcgatcgttatcctcgtctacgccaagatccgagaagattgagtgcagaagaaaataaatcagtacgcggtcggagaattctcgagtggataaagataaagcgcgattcgacgcaacacttaccctattttcagtgaaatgctgagctaaaaggcgtcgtcgatttcgtggtttcaagtcagatttaatgagggtatatttgttgactacgggatgtggagaaccaaagccaagtcgaccccaaggtgtcgtaaaacacgatctacttcgaacagtgatgctgatgggccaaccggaagatggataatcggaacaaatgcgaagacaaaagatggtcgtcaagcggacgtcgtctaacaaacactaacgtggtgtttatcccagctgaacattattacatacaacagaaccttggatgtggcaaccatcttcaacaacaagattcatcacaaccgagttgaca

SEQ ID NO: 80358 - DNA, 1971 bp, Zea Mays
gccaaactgactgattgtctgattgtgattgcggcagcaccgccgaccacgagcccgccgaaaggctcctccgcctgccgttccagggtgcactgccgccattgctcatctccccgtggtgcggaggtccacccgggcgccaattggtctcctctttcgttggcagactgagtggcatccaatcctgaatcaatgaggggctggggtttgctcgtgttatcgctacatgttctttcatgcctggttagtggcgttgcttctggtcgaacaagctcttatgtgcgcacagagtttccatctacagatatacctctagaaagtgaatggtttgctattccaaagggatacaatgctccacagcaggttcatatcactcaaggtgattatgatggaaaggcagttatagtatcttgggttactccagaagaacctgggccaagtgaagtattttatggcaaggagaagctatatgaccagaaagcagaaggaacaacaacaaactatacgttttacgattacaaatctggatacatacaccattgccttgtcgatggccttgagtataacactaaatattattacaagattggaagcggaaattcagctcgagaattctggtttgaaacgcctccagcaattgatccagatgcatcatacacatttggcatcataggtgatctggggcaaacatttaattctctctcaactcttcaacattatgagaaaactggaggtcaaactgttctatttgttggggatttgtcgtatgctgatagatatgaacataatgatggcattcgttgggattcctggggtcgattcgttgagcacagtactgcataccagccatggatttggaatactggaaaccatgaaatagagtacaggcctgatctgggagaaacttctgtattcaagccatatttgcataggtacatgactccatatttagcatcaaagagcagttctcctatgtggtatgctgtcaggcgtgcatctgctcacatcatcgtgttgtctagctactctccatttgtaaaatacactcctcaatggctgtggctgaagaacgaattcaagcgcgtggacagggaaaagacaccctggcttatcgttctcatgcattctcccatgtacaacagcaacgaggcacattacatggagggtgagagtatgagggctgctttcgagaaatggtttgtgaagtacaaggttgacttggtgtttgcagggcacgttcatgcttatgagagatcataccgcatttctaatgtcaactacaacataacgtcgggaaatcggtatccagtgccggacaaatctgctcccgtttacataacggtcggtgatggaggcaaccaggaaggacttgcttcaaggttttataacccccagccggattactcagcgttcagggaggccagctatggtcactcagttttacagctgaaaaacaggacccatgctatctaccagtggaatagaaacgatgatgggaatcctgttccagcagacaccgtaatgttccataaccaatattgcacgcgccgcaggaggctgaagaagaaccatctccatctcgaggaccttgaggatttgatctccctattatagaaaaccgggttcgcaggacgcatgaactgtgtgtgggggaataatcgcaggttagcactgttgctagtgtgcccgcctctcttggaatggaagcagcagagccagctatcagactggcagtgaccaccacctcctcagctacctggttgcatgccacagatctgaaattctgaaatgctgtgactgtgactgtgaggtatgaaaaaacagtgtaaataacgcggttgcctccgtacatgtgtgacattttatacacgtgcaagaaagcatcggtgtccaccgttgtccgtgaaccattttcgcttgtatgcgcttgtgcccagtggaaatcctttccatctcgttggtttgctggtg

SEQ ID NO: 80359 - DNA, 629 bp, Zea Mays
cgacatttgcggcgtcctccccgcgcccgcagcccccgccccgtcctcgtcaatccgctccgccagcaaatagaggaagttgcgtcccaatcccacagtgcttccacctcgaccgcctattgggctcccacgcccattcccaccacctcaccttgcttctattgctgtgctccgccacagagccctaagtggagctacgaatcccgtgatccccgacgacgctgcacagtagctcagtggtgacgacgagcacgtccccctcatgctctaggtggagctacaaaccccgtgagtccatgcccgcaccctcacctctgtcctcccgcgatgtccccgccaccctccgccctcacctaacgcgatgtcaatgcccccggccaaggagcctccttcctcccccatcccactcgcgtgaatcaacatgtgaggtcgtcctcgccccccggtccattgtggcagaccatgctcagcattgccgccaagaacacgactctcctcgatgtactgctctatctcggggacctcgcctagcactgccccccggctcgcgtcgacgaggtgtagtcctccctcacccgcacctttcagatgatccaggtgctactcgaggctgtcaatcgcgagatcaa

SEQ ID NO: 80360 - DNA, 597 bp, Zea Mays
cgacatttgcggcgtcctccccgcgcccgcagcccccgccccgtcctcgtcaatccgctccgccagcaaatagaggaagttgcgtcccaatcccacagtgcttccacctcgaccgcctattgggctcccacgcccattcccaccacctcaccttgcttctattgctgtgctccgccacagagccctaagtggagctacgaatcccgtgatccccgacgacgctgcacagtagctcagtggtgacgacgagcacgtccccctcatgctctaggtggagctacaaaccccattgatctccatgaagctcgtcaaagcattgaacaacatatatccccagagaatatcttctgcgctgtccttgaaactgttgctcatgcccaagttagtctatgcatttgttagtctgctcaggcccatgtttaaactgctgctcaggcccatatctgcccttgttagtctgtgcatttgttaactgtcattatttactggacatgcttttttatcccctgagacatctggcaacatatgttaaaactgattcatttttgtgtactaatacaatctgttgtcaatcaaaggtgaaatggtatattctag

SEQ ID NO: 80361 - DNA, 4082 bp, Zea Mays
aaaaagcgctgccgcgctcagcgctcccactgagatatacgatcagaacttcgccgtcagatccagatcgaacggttgataccacacgaatccaagcacccgctgacacaggcgcaggcagcagagggcaataaccacagcccatttccagttccatgccgcatttcctttccatttctgttgctctcctctctttacccgtcgccgccctcgccctcgccaccacccgcacccgccgcgcggcccccattcgcctcgatttcgccggcggcgatgtacggcaacgacaactggatcaacagctatctcgacgccatcctcgatgccggcaagggcgtcgcggccgcggccgcgggcgccgtcaggggccggggcggaggctggggcggggaccggccctcgctgctcctccgcgagcgcggccacttctcccccgcgcgctactttgtcgaggaggtcatcaccggctacgacgagaccgacctctacaagacctggctccgggcgaacgcgatgcggagcccgcaggagaagaacacgcggctggagaacatgacctggaggatctggaacctcgccaggaagaagaaggagtttgagaaagaggaagccattcgcttgtccaaacaccgtttagagactaagaagccacggaatgatgctactgcagaaatgtctgaagatctttttgaaggagtgaagggagaagacgctggtgatccatctgttgcctacggtgacagcacaactgggaacacacctaggaccagtttatttgacaagctatacatagtgttgatcagtctgcatggcctgatacgtggagagaacatggagcttggccgtgattcagatactggtggccaggtcaaatatgtcgtggagcttgctaaagcattaagttcatgtcctggagtttaccgggttgatctattgacaagacaaatcttagccccaaattttgatcgtggctatggtgaactagatgagctgctggcttcgacaagtttcaagaactttagatgcgaacgaggagagaacagtggtgcacatatcatcagaataccatttggccccaaagacaagcatctagctaaagaaaatatctggcctttcattcaggaatttgttgatggtgcactaggtcatattgtgcgcatgtcaaaaactataggcgaagaaactggcagtgtgtgtccagtgtggcctactgtgattcatggccattatgccagtgcaggagttgctgctgctctattatctggagcacttaatgttcccatgttgtttaccgggcattttcttggtaaagataagctggaagagcttctcaagcaaggtaggcagacaagagaacaaataaatgtgacatacaaaataatgcgccgaattgaggcagaggagttgtctcttgatgcatctgaaataattatcgcaagcacacggcaagaaatagaagaacaatggaacttgtatgatggttttgaagtcatgcttgcgaggaagctccgtgcgttagtcaagcgtggtgctaactgttatggtcgttatatgcctcgtatggttataattcctccaggagttgaattcggccaattgattcatgattttgatatgtatggagatgaagataaccaatctccagccttggatccatctatttggtttgagataatgcggttcttcacaaatcctaggaaacctatgattttggctattgctcgtccatattctgaaaagaatattgcaacacttgtgaaggcatttggtgaatgccatccgttgagggaacttgctaaccttacactgataatgggcaaccgtgaggctatttccaaaatgaacaaaatcagtgcagctgttttgacatcggtgcttacattgattgatgaatatgatttatatggtcaagtggcatacccaaagcttcacaagcactctgaagttcctgatatttatcgtttagcagcaagaacaaagggcgcttttgtaaatgttgcttattttgaacaatttggtgtcaccttgatagaggctgccatgcacgggttgcctgttattgcaacaaaaaatggggctcctgttgaaatttatcaggttctggaaaatggtctccttgttgatccccatgatcagcatgcaattgcagatgccctctataagatgctttctgaaaagcagttttggtcaagatgtcgagaaaatggattgaaaaatatacaccaattttcttggcctgaacattgcaagaattacttgtcaaggatatcaagtcttggtccaagacatcctgcttttgcatgcaaagaagaccacaaggtgcctgtgaagtgcaggaagcatatatctatcattgctgtagactctgttaacaaggaagatttaattcaaattatcagaaactctgttgaggctacacgcactggaactatgtcaggttctacaggttttgtgctgtcaacttcactgacaatagcagagctacagtctgtaatagtacgcacaggcatgctcccgactgactttgatgcctttatatgcaatagtgggagcgatatatattatccattacagtctagtgatgtgccaagcaattcccgtgttacatttgcgttggaccataactaccgatcacatatcgagtatcgttggggaggagaaggtttaaggaagtacttagttaagtgggcttcttcagtagtagaaagaagggggagaactgaaaagcaagtcatctttgaagattcggaacactcttcaacatattgtcttgcatttagagtggttaatccaaatcatttgcctcctttgaaggagctgcaaaagttgatgagaatccagtcactgcgttgtcatgctctgtataaccatggcgccaccaggctatctgtaattccaatgcatgcatcgcgatctcaggctctaaggtatttgtctattcgctggggcatagagttgccaaatgctgtggtcattgttggtgaaactggtgattctgattacgaggaactgtttggaggtctccacaagacagtcatccttaagggtggattcaacactcctgcgaataggatccatacggtcagaaggtaccctttacaggatgttgttgctcttgatagctcaaatatcattggaattgagggattcagcactggtgacatcaggtctgctatgcaacaacagcttggtatacccacacaatgacaccaactgcaatctattttgttattaatagaaagaaagaaacagataacagaaatatacgatacaaatacttagtttccattctattggaaatgtccgattttgcctgccagtcatttaatgtatgtgtgtggtggtccctgcacgggttatgaatgacgttcccttggatcccgcactggagattttttggattgaagagcttgttaatggatacatccagctgtacagacggaacaaatttgttcaaatgttgatagtgaaaacattttgtggaagtattttcagcaaacaagcttccaatatacaaagttcacactttccatcgcttcaatgtggagcatctgattacagtgcaatcgtctaagggcttgtttgtatttacctcaattcatatgtgttgagatagattatatgtgttgagatagattgagatgtaacttaaactaatttacacaccaattcatcccaatatatgtggattaaggtgaatacgagagtgtccatataaggcctattcggttaggggttgattgagggagtttggagagaattaaatacctttcgatacaaatttatataggagaggatgtaatcctctccaatccccttttagcgcttgtttagatgttttagtattgatcccaatacacatgtgtttaaggggatagagaactaatttatactctaatccttctcaaatcatgtgtattacggtgaatactagagtttcaaacatagctttaaccgaacaagtcctaaactctttttttttctttctaggaggagtgtcttatattgtgtaaataccgtgtcacacaatttagcaccatacatcatgtgcaggaattatttgaagctaccaaagcagcaaa

SEQ ID NO: 80362 - DNA, 2925 bp, Zea Mays
ttccagttccatgccgcatttcctttccatttctgttgctctcctctctttacccgtcgccgccctcgccctcgccaccacccgcacccgccgcgcggcccccattcgcctcgatttcgccggcggcgatgtacggcaacgacaactggatcaacagctatctcgacgccatcctcgatgccggcaagggcgtcgcggccgcggccgcgggcgccgtcaggggccggggcggaggctggggcggggaccggccctcgctgctcctccgcgagcgcggccacttctcccccgcgcgctactttgtcgaggaggtcatcaccggctacgacgagaccgacctctacaagacctggctccgggcgaacgcgatgcggagcccgcaggagaagaacacgcggctggagaacatgacctggaggatctggaacctcgccaggaagaagaaggaggtgcgcctttttgctcttgtttgagaaagaggaagccattcgcttgtccaaacaccgtttagagactaagaagccacggaatgatgctactgcagaaatgtctgaagatctttttgaaggagtgaagggagaagacgctggtgatccatctgttgcctacggtgacagcacaactgggaacacacctaggaccagtttatttgacaagctatacatagtgttgatcagtctgcatggcctgatacgtggagagaacatggagcttggccgtgattcagatactggtggccaggtcaaatatgtcgtggagcttgctaaagcattaagttcatgtcctggagtttaccgggttgatctattgacaagacaaatcttagccccaaattttgatcgtggctatggtgaactagatgagctgctggcttcgacaagtttcaagaactttagatgcgaacgaggagagaacagtggtgcacatatcatcagaataccatttggccccaaagacaagcatctagctaaagaaaatatctggcctttcattcaggaatttgttgatggtgcactaggtcatattgtgcgcatgtcaaaaactataggcgaagaaactggcagtgtgtgtccagtgtggcctactgtgattcatggccattatgccagtgcaggagttgctgctgctctattatctggagcacttaatgttcccatgttgtttaccgggcattttcttggtaaagataagctggaagagcttctcaagcaaggtaggcagacaagagaacaaataaatgtgacatacaaaataatgcgccgaattgaggcagaggagttgtctcttgatgcatctgaaataattatcgcaagcacacggcaagaaatagaagaacaatggaacttgtatgatggttttgaagtcatgcttgcgaggaagctccgtgcgttagtcaagcgtggtgctaactgttatggtcgttatatgcctcgtatggttataattcctccaggagttgaattcggccaattgattcatgattttgatatgtatggagatgaagataaccaatctccagccttggatccatctatttggtttgagataatgcggttcttcacaaatcctaggaaacctatgattttggctattgctcgtccatattctgaaaagaatattgcaacacttgtgaaggcatttggtgaatgccatccgttgagggaacttgctaaccttacactgataatgggcaaccgtgaggctatttccaaaatgaacaaaatcagtgcagctgttttgacatcggtgcttacattgattgatgaatatgatttatatggtcaagtggcatacccaaagcttcacaagcactctgaagttcctgatatttatcgtttagcagcaagaacaaagggcgcttttgtaaatgttgcttattttgaacaatttggtgtcaccttgatagaggtcagaactattgagatcaggaattcatttatgtatctcaccattttcatgcccttactacctatctgttctttttgtgagcaggctgccatgcacgggttgcctgttattgcaacaaaaaatggggctcctgttgaaatttatcaggttctggaaaatggtctccttgttgatccccatgatcagcatgcaattgcagatgccctctataagatgctttctgaaaagcagttttggtcaagatgtcgagaaaatggattgaaaaatatacaccaattttcttggcctgaacattgcaagaattacttgtcaaggatatcaagtcttggtccaagacatcctgcttttgcatgcaaagaagaccacaaggtgcctgtgaagtgcaggaagcatatatctatcattgctgtagactctgttaacaaggaagatttaattcaaattatcagaaactctgttgaggctacacgcactggaactatgtcaggttctacaggttttgtgctgtcaacttcactgacaatagcagagctacagtctgtaatagtacgcacaggcatgctcccgactgactttgatgcctttatatgcaatagtgggagcgatatatattatccattacagtctagtgatgtgccaagcaattcccgtgttacatttgcgttggaccataactaccgatcacatatcgagtatcgttggggaggagaaggtttaaggaagtacttagttaagtgggcttcttcagtagtagaaagaagggggagaactgaaaagcaagtcatctttgaagattcggaacactcttcaacatattgtcttgcatttagagtggttaatccaaatcatttgcctcctttgaaggagctgcaaaagttgatgagaatccagtcactgcgttgtcatgctctgtataaccatggcgccaccaggctatctgtaattccaatgcatgcatcgcgatctcaggctctaagtatcagggcgtggagcatttaaaaaaaaactgttttcaag

SEQ ID NO: 80363 - DNA, 3956 bp, Zea Mays
ttccagttccatgccgcatttcctttccatttctgttgctctcctctctttacccgtcgccgccctcgccctcgccaccacccgcacccgccgcgcggcccccattcgcctcgatttcgccggcggcgatgtacggcaacgacaactggatcaacagctatctcgacgccatcctcgatgccggcaagggcgtcgcggccgcggccgcgggcgccgtcaggggccggggcggaggctggggcggggaccggccctcgctgctcctccgcgagcgcggccacttctcccccgcgcgctactttgtcgaggaggtcatcaccggctacgacgagaccgacctctacaagacctggctccgggcgaacgcgatgcggagcccgcaggagaagaacacgcggctggagaacatgacctggaggatctggaacctcgccaggaagaagaaggaggtgcgcctttttgctcttgtttgagaaagaggaagccattcgcttgtccaaacaccgtttagagactaagaagccacggaatgatgctactgcagaaatgtctgaagatctttttgaaggagtgaagggagaagacgctggtgatccatctgttgcctacggtgacagcacaactgggaacacacctaggaccagtttatttgacaagctatacatagtgttgatcagtctgcatggcctgatacgtggagagaacatggagcttggccgtgattcagatactggtggccaggtcaaatatgtcgtggagcttgctaaagcattaagttcatgtcctggagtttaccgggttgatctattgacaagacaaatcttagccccaaattttgatcgtggctatggtgaactagatgagctgctggcttcgacaagtttcaagaactttagatgcgaacgaggagagaacagtggtgcacatatcatcagaataccatttggccccaaagacaagcatctagctaaagaaaatatctggcctttcattcaggaatttgttgatggtgcactaggtcatattgtgcgcatgtcaaaaactataggcgaagaaactggcagtgtgtgtccagtgtggcctactgtgattcatggccattatgccagtgcaggagttgctgctgctctattatctggagcacttaatgttcccatgttgtttaccgggcattttcttggtaaagataagctggaagagcttctcaagcaaggtaggcagacaagagaacaaataaatgtgacatacaaaataatgcgccgaattgaggcagaggagttgtctcttgatgcatctgaaataattatcgcaagcacacggcaagaaatagaagaacaatggaacttgtatgatggttttgaagtcatgcttgcgaggaagctccgtgcgttagtcaagcgtggtgctaactgttatggtcgttatatgcctcgtatggttataattcctccaggagttgaattcggccaattgattcatgattttgatatgtatggagatgaagataaccaatctccagccttggatccatctatttggtttgagataatgcggttcttcacaaatcctaggaaacctatgattttggctattgctcgtccatattctgaaaagaatattgcaacacttgtgaaggcatttggtgaatgccatccgttgagggaacttgctaaccttacactgataatgggcaaccgtgaggctatttccaaaatgaacaaaatcagtgcagctgttttgacatcggtgcttacattgattgatgaatatgatttatatggtcaagtggcatacccaaagcttcacaagcactctgaagttcctgatatttatcgtttagcagcaagaacaaagggcgcttttgtaaatgttgcttattttgaacaatttggtgtcaccttgatagaggctgccatgcacgggttgcctgttattgcaacaaaaaatggggctcctgttgaaatttatcaggttctggaaaatggtctccttgttgatccccatgatcagcatgcaattgcagatgccctctataagatgctttctgaaaagcagttttggtcaagatgtcgagaaaatggattgaaaaatatacaccaattttcttggcctgaacattgcaagaattacttgtcaaggatatcaagtcttggtccaagacatcctgcttttgcatgcaaagaagaccacaaggtgcctgtgaagtgcaggaagcatatatctatcattgctgtagactctgttaacaaggaagatttaattcaaattatcagaaactctgttgaggctacacgcactggaactatgtcaggttctacaggttttgtgctgtcaacttcactgacaatagcagagctacagtctgtaatagtacgcacaggcatgctcccgactgactttgatgcctttatatgcaatagtgggagcgatatatattatccattacagtctagtgatgtgccaagcaattcccgtgttacatttgcgttggaccataactaccgatcacatatcgagtatcgttggggaggagaaggtttaaggaagtacttagttaagtgggcttcttcagtagtagaaagaagggggagaactgaaaagcaagtcatctttgaagattcggaacactcttcaacatattgtcttgcatttagagtggttaatccaaatcatttgcctcctttgaaggagctgcaaaagttgatgagaatccagtcactgcgttgtcatgctctgtataaccatggcgccaccaggctatctgtaattccaatgcatgcatcgcgatctcaggctctaaggtatttgtctattcgctggggcatagagttgccaaatgctgtggtcattgttggtgaaactggtgattctgattacgaggaactgtttggaggtctccacaagacagtcatccttaagggtggattcaacactcctgcgaataggatccatacggtcagaaggtaccctttacaggatgttgttgctcttgatagctcaaatatcattggaattgagggattcagcactggtgacatcaggtctgctatgcaacaacagcttggtatacccacacaatgacaccaactgcaatctattttgttattaatagaaagaaagaaacagataacagaaatatacgatacaaatacttagtttccattctattggaaatgtccgattttgcctgccagtcatttaatgtatgtgtgtggtggtccctgcacgggttatgaatgacgttcccttggatcccgcactggagattttttggattgaagagcttgttaatggatacatccagctgtacagacggaacaaatttgttcaaatgttgatagtgaaaacattttgtggaagtattttcagcaaacaagcttccaatatacaaagttcacactttccatcgcttcaatgtggagcatctgattacagtgcaatcgtctaagggcttgtttgtatttacctcaattcatatgtgttgagatagattatatgtgttgagatagattgagatgtaacttaaactaatttacacaccaattcatcccaatatatgtggattaaggtgaatacgagagtgtccatataaggcctattcggttaggggttgattgagggagtttggagagaattaaatacctttcgatacaaatttatataggagaggatgtaatcctctccaatccccttttagcgcttgtttagatgttttagtattgatcccaatacacatgtgtttaaggggatagagaactaatttatactctaatccttctcaaatcatgtgtattacggtgaatactagagtttcaaacatagctttaaccgaacaagtcctaaactctttttttttctttctaggaggagtgtcttatattgtgtaaataccgtgtcacacaatttagcaccatacatcatgtgcaggaattatttgaagctaccaaagcagcaaa

SEQ ID NO: 80364 - DNA, 4139 bp, Zea Mays
ttccagttccatgccgcatttcctttccatttctgttgctctcctctctttacccgtcgccgccctcgccctcgccaccacccgcacccgccgcgcggcccccattcgcctcgatttcgccggcggcgatgtacggcaacgacaactggatcaacagctatctcgacgccatcctcgatgccggcaagggcgtcgcggccgcggccgcgggcgccgtcaggggccggggcggaggctggggcggggaccggccctcgctgctcctccgcgagcgcggccacttctcccccgcgcgctactttgtcgaggaggtcatcaccggctacgacgagaccgacctctacaagacctggctccgggcgaacgcgatgcggagcccgcaggagaagaacacgcggctggagaacatgacctggaggatctggaacctcgccaggaagaagaaggagaatataaatttgaactgcatctatgtcctcctgtcctcctggatcccaagggaagagctgaactgtatagtttttctgtgctatgttaatttcgatattcagtttgagaaagaggaagccattcgcttgtccaaacaccgtttagagactaagaagccacggaatgatgctactgcagaaatgtctgaagatctttttgaaggagtgaagggagaagacgctggtgatccatctgttgcctacggtgacagcacaactgggaacacacctaggaccagtttatttgacaagctatacatagtgttgatcagtctgcatggcctgatacgtggagagaacatggagcttggccgtgattcagatactggtggccaggtcaaatatgtcgtggagcttgctaaagcattaagttcatgtcctggagtttaccgggttgatctattgacaagacaaatcttagccccaaattttgatcgtggctatggtgaactagatgagctgctggcttcgacaagtttcaagaactttagatgcgaacgaggagagaacagtggtgcacatatcatcagaataccatttggccccaaagacaagcatctagctaaagaaaatatctggcctttcattcaggaatttgttgatggtgcactaggtcatattgtgcgcatgtcaaaaactataggcgaagaaactggcagtgtgtgtccagtgtggcctactgtgattcatggccattatgccagtgcaggagttgctgctgctctattatctggagcacttaatgttcccatgttgtttaccgggcattttcttggtaaagataagctggaagagcttctcaagcaaggtaggcagacaagagaacaaataaatgtgacatacaaaataatgcgccgaattgaggcagaggagttgtctcttgatgcatctgaaataattatcgcaagcacacggcaagaaatagaagaacaatggaacttgtatgatggttttgaagtcatgcttgcgaggaagctccgtgcgttagtcaagcgtggtgctaactgttatggtcgttatatgcctcgtatggttataattcctccaggagttgaattcggccaattgattcatgattttgatatgtatggagatgaagataaccaatctccagccttggatccatctatttggtttgagataatgcggttcttcacaaatcctaggaaacctatgattttggctattgctcgtccatattctgaaaagaatattgcaacacttgtgaaggcatttggtgaatgccatccgttgagggaacttgctaaccttacactgataatgggcaaccgtgaggctatttccaaaatgaacaaaatcagtgcagctgttttgacatcggtgcttacattgattgatgaatatgatttatatggtcaagtggcatacccaaagcttcacaagcactctgaagttcctgatatttatcgtttagcagcaagaacaaagggcgcttttgtaaatgttgcttattttgaacaatttggtgtcaccttgatagaggctgccatgcacgggttgcctgttattgcaacaaaaaatggggctcctgttgaaatttatcaggttctggaaaatggtctccttgttgatccccatgatcagcatgcaattgcagatgccctctataagatgctttctgaaaagcagttttggtcaagatgtcgagaaaatggattgaaaaatatacaccaattttcttggcctgaacattgcaagaattacttgtcaaggatatcaagtcttggtccaagacatcctgcttttgcatgcaaagaagaccacaaggtgcctgtgaagtgcaggaagcatatatctatcattgctgtagactctgttaacaaggaagatttaattcaaattatcagaaactctgttgaggctacacgcactggaactatgtcaggttctacaggttttgtgctgtcaacttcactgacaatagcagagctacagtctgtaatagtacgcacaggcatgctcccgactgactttgatgcctttatatgcaatagtgggagcgatatatattatccattacagtctagtgatgtgccaagcaattcccgtgttacatttgcgttggaccataactaccgatcacatatcgagtatcgttggggaggagaaggtttaaggaagtacttagttaagtgggcttcttcagtagtagaaagaagggggagaactgaaaagcaagtcatctttgaagattcggaacactcttcaacatattgtcttgcatttagagtggttaatccaaatcatttgcctcctttgaaggagctgcaaaagttgatgagaatccagtcactgcgttgtcatgctctgtataaccatggcgccaccaggctatctgtaattccaatgcatgcatcgcgatctcaggctctaagtatcagggcgtggagcatttaaaaaaaaactgttttcaagatgtgcattttccttttccttaaatttatgagaaaaatagctcaataccattataaaaaggtatttgtctattcgctggggcatagagttgccaaatgctgtggtcattgttggtgaaactggtgattctgattacgaggaactgtttggaggtctccacaagacagtcatccttaagggtggattcaacactcctgcgaataggatccatacggtcagaaggtaccctttacaggatgttgttgctcttgatagctcaaatatcattggaattgagggattcagcactggtgacatcaggtctgctatgcaacaacagcttggtatacccacacaatgacaccaactgcaatctattttgttattaatagaaagaaagaaacagataacagaaatatacgatacaaatacttagtttccattctattggaaatgtccgattttgcctgccagtcatttaatgtatgtgtgtggtggtccctgcacgggttatgaatgacgttcccttggatcccgcactggagattttttggattgaagagcttgttaatggatacatccagctgtacagacggaacaaatttgttcaaatgttgatagtgaaaacattttgtggaagtattttcagcaaacaagcttccaatatacaaagttcacactttccatcgcttcaatgtggagcatctgattacagtgcaatcgtctaagggcttgtttgtatttacctcaattcatatgtgttgagatagattatatgtgttgagatagattgagatgtaacttaaactaatttacacaccaattcatcccaatatatgtggattaaggtgaatacgagagtgtccatataaggcctattcggttaggggttgattgagggagtttggagagaattaaatacctttcgatacaaatttatataggagaggatgtaatcctctccaatccccttttagcgcttgtttagatgttttagtattgatcccaatacacatgtgtttaaggggatagagaactaatttatactctaatccttctcaaatcatgtgtattacggtgaatactagagtttcaaacatagctttaaccgaacaagtcctaaactctttttttttctttctaggaggagtgtcttatattgtgtaaataccgtgtcacacaatttagcaccatacatcatgtgcaggaattatttgaagctaccaaagcagcaaa

SEQ ID NO: 80365 - DNA, 3968 bp, Zea Mays
ttccagttccatgccgcatttcctttccatttctgttgctctcctctctttacccgtcgccgccctcgccctcgccaccacccgcacccgccgcgcggcccccattcgcctcgatttcgccggcggcgatgtacggcaacgacaactggatcaacagctatctcgacgccatcctcgatgccggcaagggcgtcgcggccgcggccgcgggcgccgtcaggggccggggcggaggctggggcggggaccggccctcgctgctcctccgcgagcgcggccacttctcccccgcgcgctactttgtcgaggaggtcatcaccggctacgacgagaccgacctctacaagacctggctccgggcgaacgcgatgcggagcccgcaggagaagaacacgcggctggagaacatgacctggaggatctggaacctcgccaggaagaagaaggagtttgagaaagaggaagccattcgcttgtccaaacaccgtttagagactaagaagccacggaatgatgctactgcagaaatgtctgaagatctttttgaaggagtgaagggagaagacgctggtgatccatctgttgcctacggtgacagcacaactgggaacacacctaggaccagtttatttgacaagctatacatagtgttgatcagtctgcatggcctgatacgtggagagaacatggagcttggccgtgattcagatactggtggccaggtcaaatatgtcgtggagcttgctaaagcattaagttcatgtcctggagtttaccgggttgatctattgacaagacaaatcttagccccaaattttgatcgtggctatggtgaactagatgagctgctggcttcgacaagtttcaagaactttagatgcgaacgaggagagaacagtggtgcacatatcatcagaataccatttggccccaaagacaagcatctagctaaagaaaatatctggcctttcattcaggaatttgttgatggtgcactaggtcatattgtgcgcatgtcaaaaactataggcgaagaaactggcagtgtgtgtccagtgtggcctactgtgattcatggccattatgccagtgcaggagttgctgctgctctattatctggagcacttaatgttcccatgttgtttaccgggcattttcttggtaaagataagctggaagagcttctcaagcaaggtaggcagacaagagaacaaataaatgtgacatacaaaataatgcgccgaattgaggcagaggagttgtctcttgatgcatctgaaataattatcgcaagcacacggcaagaaatagaagaacaatggaacttgtatgatggttttgaagtcatgcttgcgaggaagctccgtgcgttagtcaagcgtggtgctaactgttatggtcgttatatgcctcgtatggttataattcctccaggagttgaattcggccaattgattcatgattttgatatgtatggagatgaagataaccaatctccagccttggatccatctatttggtttgagataatgcggttcttcacaaatcctaggaaacctatgattttggctattgctcgtccatattctgaaaagaatattgcaacacttgtgaaggcatttggtgaatgccatccgttgagggaacttgctaaccttacactgataatgggcaaccgtgaggctatttccaaaatgaacaaaatcagtgcagctgttttgacatcggtgcttacattgattgatgaatatgatttatatggtcaagtggcatacccaaagcttcacaagcactctgaagttcctgatatttatcgtttagcagcaagaacaaagggcgcttttgtaaatgttgcttattttgaacaatttggtgtcaccttgatagaggctgccatgcacgggttgcctgttattgcaacaaaaaatggggctcctgttgaaatttatcagattggatcctttctggtggatgttgatgcaggttctggaaaatggtctccttgttgatccccatgatcagcatgcaattgcagatgccctctataagatgctttctgaaaagcagttttggtcaagatgtcgagaaaatggattgaaaaatatacaccaattttcttggcctgaacattgcaagaattacttgtcaaggatatcaagtcttggtccaagacatcctgcttttgcatgcaaagaagaccacaaggtgcctgtgaagtgcaggaagcatatatctatcattgctgtagactctgttaacaaggaagatttaattcaaattatcagaaactctgttgaggctacacgcactggaactatgtcaggttctacaggttttgtgctgtcaacttcactgacaatagcagagctacagtctgtaatagtacgcacaggcatgctcccgactgactttgatgcctttatatgcaatagtgggagcgatatatattatccattacagtctagtgatgtgccaagcaattcccgtgttacatttgcgttggaccataactaccgatcacatatcgagtatcgttggggaggagaaggtttaaggaagtacttagttaagtgggcttcttcagtagtagaaagaagggggagaactgaaaagcaagtcatctttgaagattcggaacactcttcaacatattgtcttgcatttagagtggttaatccaaatcatttgcctcctttgaaggagctgcaaaagttgatgagaatccagtcactgcgttgtcatgctctgtataaccatggcgccaccaggctatctgtaattccaatgcatgcatcgcgatctcaggctctaaggtatttgtctattcgctggggcatagagttgccaaatgctgtggtcattgttggtgaaactggtgattctgattacgaggaactgtttggaggtctccacaagacagtcatccttaagggtggattcaacactcctgcgaataggatccatacggtcagaaggtaccctttacaggatgttgttgctcttgatagctcaaatatcattggaattgagggattcagcactggtgacatcaggtctgctatgcaacaacagcttggtatacccacacaatgacaccaactgcaatctattttgttattaatagaaagaaagaaacagataacagaaatatacgatacaaatacttagtttccattctattggaaatgtccgattttgcctgccagtcatttaatgtatgtgtgtggtggtccctgcacgggttatgaatgacgttcccttggatcccgcactggagattttttggattgaagagcttgttaatggatacatccagctgtacagacggaacaaatttgttcaaatgttgatagtgaaaacattttgtggaagtattttcagcaaacaagcttccaatatacaaagttcacactttccatcgcttcaatgtggagcatctgattacagtgcaatcgtctaagggcttgtttgtatttacctcaattcatatgtgttgagatagattatatgtgttgagatagattgagatgtaacttaaactaatttacacaccaattcatcccaatatatgtggattaaggtgaatacgagagtgtccatataaggcctattcggttaggggttgattgagggagtttggagagaattaaatacctttcgatacaaatttatataggagaggatgtaatcctctccaatccccttttagcgcttgtttagatgttttagtattgatcccaatacacatgtgtttaaggggatagagaactaatttatactctaatccttctcaaatcatgtgtattacggtgaatactagagtttcaaacatagctttaaccgaacaagtcctaaactctttttttttctttctaggaggagtgtcttatattgtgtaaataccgtgtcacacaatttagcaccatacatcatgtgcaggaattatttgaagctaccaaagcagcaaa

SEQ ID NO: 80366 - DNA, 1099 bp, Zea Mays
ccccagaattctcacgcggctcccgagccggcatcggtggaccttctagtgcacaaagaagcccaacccggcctccatgataagcccaccaggccaccgccgtcgccagtcgctacttccccagttcccctccgatcctcgtcgccgacgcatccacccgaaccctcctccgcgacctcgccgtcgccgcagccttggccatatcttcgagtataatgggtccgccgtggtggcgatggtggggaagaactgtttcgcgatcgccagcgaccggcggctgggcgtgcagcttcagaccatcgcgacggacttccagcgggtgttcaaggtccacgacaagctttacatcggcctctctgggctcgccactgacgcccagacgctgtaccagcggttggtgttcaggcacaagctgtatcagctgcgggaggagagggacatgaagcccgagacctttgccagccttgtctctgcgctcctctacgagaagagattcgggccatatttttgccagccagtcattgctggacttggagatgacaacgtaccatttatttgtactatggactgcttaggtgcaaaggagctggccaaggattttgttgtatctgggacagcatcagaatctttgtatggtgcttgtgagtccatgtacaagccgaacatggaacctgatgaactcttcgaaactgtatcccaagctctgaattcatcaatagaccgtgactgccttagtgggtggggtggctatgttctgattgtgacaccgactgaagtgagggagcatgtgattaagagcaggatggactaaatcatggccactatcactataattcttagctggtttccaatgcttagaccaatgttgtgtttggattctgaagtaacattgtatcatcacagctggtatgagaatgaacggttgttttatttacccctatcttgcaagacttatgcctggattccagctgaattgtggaatactgaattgataatagcctagatctgttgttctcttacagaaacgtgaatgaggttaacatgtgctgtatcgcattctatggttgcctatcgaagagagcatagatccctgtatgct

SEQ ID NO: 80367 - DNA, 1102 bp, Zea Mays
ccccagaattctcacgcggctcccgagccggcatcggtggaccttctagtgcacaaagaagcccaacccggcctccatgataagcccaccaggccaccgccgtcgccagtcgctacttccccagttcccctccgatcctcgtcgccgacgcatccacccgaaccctcctccgcgacctcgccgtcgccgcagccttggccatgtcgatcttcgagtataatgggtccgccgtggtggcgatggtggggaagaactgtttcgcgatcgccagcgaccggcggctgggcgtgcagcttcagaccatcgcgacggacttccagcgggtgttcaaggtccacgacaagctttacatcggcctctctgggctcgccactgacgcccagacgcttaccagcggttggtgttcaggcacaagctgtatcagctgcgggaggagagggacatgaagcccgagacctttgccagccttgtctctgcgctcctctacgagaagagattcgggccatatttttgccagccagtcattgctggacttggagatgacaacgtaccatttatttgtactatggactgcttaggtgcaaaggagctggccaaggattttgttgtatctgggacagcatcagaatctttgtatggtgcttgtgagtccatgtacaagccgaacatggaacctgatgaactcttcgaaactgtatcccaagctctgaattcatcaatagaccgtgactgccttagtgggtggggtggctatgttctgattgtgacaccgactgaagtgagggagcatgtgattaagagcaggatggactaaatcatggccactatcactataattcttagctggtttccaatgcttagaccaatgttgtgtttggattctgaagtaacattgtatcatcacagctggtatgagaatgaacggttgttttatttacccctatcttgcaagacttatgcctggattccagctgaattgtggaatactgaattgataatagcctagatctgttgttctcttacagaaacgtgaatgaggttaacatgtgctgtatcgcattctatggttgcctatcgaagagagcatagatccctgtatgct

SEQ ID NO: 80368 - DNA, 2755 bp, Zea Mays
ttacaaacctgtttgttgctgatgacaaatatcagaatctctcaaaatgcgaagcgccttgtagaagaaaatccaaatttctgcaccaccgcggcggaaccaaccgtggcaggggacggccaagggcggtcgctgccttgcctggcgttgacagtttgatgcgaccgcgggagcgtccgcccgaccgccaccgcgtccgcctcagctcccctcgcttccctctaatttccagcccagtagtagggagactagaatcgtcggcgcgacgccttggcagattcgtccgccccgatcccaccaccaccgtgccccgcgggtgacgtcggaccggcggcgatggcaacgtcggcggcggcgggatcgcgcaggaaggcgccgagccctccgaagcaccgccacgacggtacctcgccgctgcctctcggcatggactggagccctcccccgaagagatgggagggaaggaacaccatatggccacacaaccctcaaacaggttggagttactgtgtgatgatgccttcttggatcacccaaacacctgaaactggtgtcacagccgatagctttttgaaatctgtcgttgacagttttacaggatacatgttggtatacaatcttcagaaggctttagctctatccatggaatcctcagaaggtttagtgactttctgaagctatcttctgatcttaagagcgcgtttcccagaaaagatgtcccatcggctcctccgaagcatgctttcttaagaataaattcaagcaggttgcttctagaagagagaaggcatgcattggaggagtggatgcagaagttactttctgacattgacttgtcaagaagtgctcctgttgctgcttttcttgagcttgaagctgctgcgcgttcatatttccaagaacggaatgggcgtccttctgaagtaggtccttctgcaaaaagcagtactaaatcttcctcacattctgatggacctgcttccggttctcttgctgagtccaatgaaataaatcaaggtcttactcgcggtagcagtctgacaggagcaactggtaatggtgtgcttggagaagctatcttagatcagtctgatgagcatgttagcagtgccttgaatcacaggaaagggaaccttgtattggaacatgatggtagaaatggttcggtagcgtcttataggggagttctttcagaagaggaccgtgattcttatcccggccatgctcggaaggactctgctgaaagtattgggagtgatttgagttctttaagaggaagtgaattatctgttccaggggctagtaattccctttgggatggtgctgtggtggatggacatgttagtcaaacagaacatcttactggtttagatatgcatcttttgtatgatatggatgcgcaagtcatccttccaaatgataaaaaacagaagttgactagacttttgatcacaatgcaacgaagaatagggacagcaaaaactgatatggaggatctcatagcacgattaaatcaggaaggagctgttaaagaatatcttactacaaaggttaaagatttagaggttgaattggaagccacaaagcaaaaaggtagagagacactgcaacaagctatcctggctgaaagagagaggattacccagatgcagtgggatatggatgagctccgtaggaagtactctgagatggagtcaaacctgaagaccgaacataatgagaaaactcgtgcggagtcagaaagaacaactgctagtggtgaaaatgaaacattacttgaagaattagaaatcaaacaaaaagaagttgagagtttgaaacagcaacttgtagaagctgaggcaaagtccaaagctgataagaaagttcttgtcaaagaggtcaagtctcttagaaactcccaaactgagatgaagaaagtgttgaatcagtatcttgaggagaagactgatttagagagagttattaatagagataaacagagatcagcacgtacaaagttatcccgagtaaaaattcttcatgagtgtcgactgctgcgggagcggctacaagactgcagtgctaaatttctagcagaagaacaagacaactttactattgatccatcatccttgcctgatgcattagatcttctagcaacatcagacaatagaatacgcctactcgttgctgaggctcaacttctagcacgagatgatgaacaaggctcttctgatggtggcgacgattctgatagtagatcctcattaactatgagcagtgaagatgcaaaagttaccgatgaagatactactaaaatgctttctgatctgctcattgacaatgcgcagctgagactacgcctcaatgctgtcatccgcaatgctgtaaatacttccgtgaagccagagaaagaaggtagtggcgaggttctccccaaaaagacagtccttaactggttgttggacagatgagagaaccaccaatatatatttatgtggattagttcttcaaacttacgcggcttgaccaaaattatatgatgagcgtacctatagtgccagggtagcatcaggaattcaggataaaaccttccctccatggagggaaggggagcctggaagcctttgtttctgttgcacgattttttatccacgcatggaagtcacggaggatggtatatatagggccacggctttggctcctaaaaaatgactgtctggcttctcttccagaaactctataaaagctagtgttttttaacaaatcgttt

SEQ ID NO: 80369 - DNA, 2662 bp, Zea Mays
ccgcggcggaaccaaccgtggcaggggacggccaagggcggtcgctgccttgcctggcgttgacagtttgatgcgaccgcgggagcgtccgcccgaccgccaccgcgtccgcctcagctcccctcgcttccctctaatttccagcccagtagtagggagactagaatcgtcggcgcgacgccttggcagattcgtccgccccgatcccaccaccaccgtgccccgcgggtgacgtcggaccggcggcgatggcaacgtcggcggcggcgggatcgcgcaggaaggcgccgagccctccgaagcaccgccacgacggtacctcgccgctgcctctcggcatggactggagccctcccccgaagagatgggagggaaggaacaccatatggccacacaaccctcaaacaggttggagttactgtgtgatgatgccttcttggatcacccaaacacctgaaactggtgtcacagccgatagctttttgaaatctgtcgttgacagttttacaggatacatgttggtatacaatcttcagaaggctttagctctatccatggaatcctcagaaggtttagtgactttctgaagctatcttctgatcttaagagcgcgtttcccagaaaagatgtcccatcggctcctccgaagcatgctttcttaagaataaattcaagcaggttgcttctagaagaggcatgcattggaggagtggatgcagaagttactttctgacattgacttgtcaagaagtgctcctgttgctgcttttcttgagcttgaagctgctgcgcgttcatatttccaagaacggaatgggcgtccttctgaagtaggtccttctgcaaaaagcagtactaaatcttcctcacattctgatggacctgcttccggttctcttgctgagtccaatgaaataaatcaaggtcttactcgcggtagcagtctgacaggagcaactggtaatggtgtgcttggagaagctatcttagatcagtctgatgagcatgttagcagtgccttgaatcacaggaaagggaaccttgtattggaacatgatggtagaaatggttcggtagcgtcttataggggagttctttcagaagaggaccgtgattcttatcccggccatgctcggaaggactctgctgaaagtattgggagtgatttgagttctttaagaggaagtgaattatctgttccaggggctagtaattccctttgggatggtgctgtggtggatggacatgttagtcaaacagaacatcttactggtttagatatgcatcttttgtatgatatggatgcgcaagtcatccttccaaatgataaaaaacagaagttgactagacttttgatcacaatgcaacgaagaatagggacagcaaaaactgatatggaggatctcatagcacgattaaatcaggaaggagctgttaaagaatatcttactacaaaggttaaagatttagaggttgaattggaagccacaaagcaaaaaggtagagagacactgcaacaagctatcctggctgaaagagagaggattacccagatgcagtgggatatggatgagctccgtaggaagtactctgagatggagtcaaacctgaagaccgaacataatgagaaaactcgtgcggagtcagaaagaacaactgctagtggtgaaaatgaaacattacttgaagaattagaaatcaaacaaaaagaagttgagagtttgaaacagcaacttgtagaagctgaggcaaagtccaaagctgataagaaagttcttgtcaaagaggtcaagtctcttagaaactcccaaactgagatgaagaaagtgttgaatcagtatcttgaggagaagactgatttagagagagttattaatagagataaacagagatcagcacgtacaaagttatcccgagtaaaaattcttcatgagtgtcgactgctgcgggagcggctacaagactgcagtgctaaatttctagcagaagaacaagacaactttactattgatccatcatccttgcctgatgcattagatcttctagcaacatcagacaatagaatacgcctactcgttgctgaggctcaacttctagcacgagatgatgaacaaggctcttctgatggtggcgacgattctgatagtagatcctcattaactatgagcagtgaagatgcaaaagttaccgatgaagatactactaaaatgctttctgatctgctcattgacaatgcgcagctgagactacgcctcaatgctgtcatccgcaatgctgtaaatacttccgtgaagccagagaaagaaggtagtggcgaggttctccccaaaaagacagtccttaactggttgttggacagatgagagaaccaccaatatatatttatgtggattagttcttcaaacttacgcggcttgaccaaaattatatgatgagcgtacctatagtgccagggtagcatcaggaattcaggataaaaccttccctccatggagggaaggggagcctggaagcctttgtttctgttgcacgattttttatccacgcatggaagtcacggaggatggtatatatagggccacggctttggctcctaaaaaatgactgtctggcttctcttccagaaactctataaaagctagtgttttttaacaaatcgttt

SEQ ID NO: 80370 - DNA, 2600 bp, Zea Mays
ccgcggcggaaccaaccgtggcaggggacggccaagggcggtcgctgccttgcctggcgttgacagtttgatgcgaccgcgggagcgtccgcccgaccgccaccgcgtccgcctcagctcccctcgcttccctctaatttccagcccagtagtagggagactagaatcgtcggcgcgacgccttggcagattcgtccgccccgatcccaccaccaccgtgccccgcgggtgacgtcggaccggcggcgatggcaacgtcggcggcggcgggatcgcgcaggaaggcgccgagccctccgaagcaccgccacgacggtacctcgccgctgcctctcggcatggactggagccctcccccgaagagatgggagggaaggaacaccatatggccacacaaccctcaaacaggttggagttactgtgtgatgatgccttcttggatcacccaaacacctgaaactggtgtcacagccgatagctttttgaaatctgtcgttgatacatgttggtatacaatcttcagaaggctttagctctatccatggaatcctcagaaggtttagtgactttctgaagctatcttctgatcttaagagcgcgtttcccagaaaagatgtcccatcggctcctccgaagcatgctttcttaagaataaattcaagcaggttgcttctagaagaggtaaaatgtatcttaaaactcaatgtacttttgttagtttccccccttttccctgtgtcaattggatgctttacgtcaagcagtatactatttcgtgttctgcttctcggatttgtctcaaattgttatggttgcagagaaggcatgcattggaggagtggatgcagaagttactttctgacattgacttgtcaagaagtgctcctgttgctgcttttcttgagcttgaagctgctgcgcgttcatatttccaagaacggaatgggcgtccttctgaagtaggtccttctgcaaaaagcagtactaaatcttcctcacattctgatggacctgcttccggttctcttgctgagtccaatgaaataaatcaaggtcttactcgcggtagcagtctgacaggagcaactggtaatggtgtgcttggagaagctatcttagatcagtctgatgagcatgttagcagtgccttgaatcacaggaaagggaaccttgtattggaacatgatggtagaaatggttcggtagcgtcttataggggagttctttcagaagaggaccgtgattcttatcccggccatgctcggaaggactctgctgaaagtattgggagtgatttgagttctttaagaggaagtgaattatctgttccaggggctagtaattccctttgggatggtgctgtggtggatggacatgttagtcaaacagaacatcttactggtttagatatgcatcttttgtatgatatggatgcgcaagtcatccttccaaatgataaaaaacagaagttgactagacttttgatcacaatgcaacgaagaatagggacagcaaaaactgatatggaggatctcatagcacgattaaatcaggaaggagctgttaaagaatatcttactacaaaggttaaagatttagaggttgaattggaagccacaaagcaaaaaggtagagagacactgcaacaagctatcctggctgaaagagagaggattacccagatgcagtgggatatggatgagctccgtaggaagtactctgagatggagtcaaacctgaagaccgaacatgtctgtttccccactgttcttgtggcttagttattttactagccatatgaagagagttattaatagagataaacagagatcagcacgtacaaagttatcccgagtaaaaattcttcatgagtgtcgactgctgcgggagcggctacaagactgcagtgctaaatttctagcagaagaacaagacaactttactattgatccatcatccttgcctgatgcattagatcttctagcaacatcagacaatagaatacgcctactcgttgctgaggctcaacttctagcacgagatgatgaacaaggctcttctgatggtggcgacgattctgatagtagatcctcattaactatgagcagtgaagatgcaaaagttaccgatgaagatactactaaaatgctttctgatctgctcattgacaatgcgcagctgagactacgcctcaatgctgtcatccgcaatgctgtaaatacttccgtgaagccagagaaagaaggtagtggcgaggttctccccaaaaagacagtccttaactggttgttggacagatgagagaaccaccaatatatatttatgtggattagttcttcaaacttacgcggcttgaccaaaattatatgatgagcgtacctatagtgccagggtagcatcaggaattcaggataaaaccttccctccatggagggaaggggagcctggaagcctttgtttctgttgcacgattttttatccacgcatggaagtcacggaggatggtatatatagggccacggctttggctcctaaaaaatgactgtctggcttctcttccagaaactctataaaagctagtgttttttaacaaatcgttt

SEQ ID NO: 80371 - DNA, 2657 bp, Zea Mays
ccgcggcggaaccaaccgtggcaggggacggccaagggcggtcgctgccttgcctggcgttgacagtttgatgcgaccgcgggagcgtccgcccgaccgccaccgcgtccgcctcagctcccctcgcttccctctaatttccagcccagtagtagggagactagaatcgtcggcgcgacgccttggcagattcgtccgccccgatcccaccaccaccgtgccccgcgggtgacgtcggaccggcggcgatggcaacgtcggcggcggcgggatcgcgcaggaaggcgccgagccctccgaagcaccgccacgacggtacctcgccgctgcctctcggcatggactggagccctcccccgaagagatgggagggaaggaacaccatatggccacacaaccctcaaacaggttggagttactgtgtgatgatgccttcttggatcacccaaacacctgaaactggtgtcacagccgatagctttttgaaatctgtcgttttttacaggatacatgttggtatacaatcttcagaaggctttagctctatccatggaatcctcagaaggtttagtgactttctgaagctatcttctgatcttaagagcgcgtttcccagaaaagatgtcccatcggctcctccgaagcatgctttcttaagaataaattcaagcaggttgcttctagaagaggcatgcattggaggagtggatgcagaagttactttctgacattgacttgtcaagaagtgctcctgttgctgcttttcttgagcttgaagctgctgcgcgttcatatttccaagaacggaatgggcgtccttctgaagtaggtccttctgcaaaaagcagtactaaatcttcctcacattctgatggacctgcttccggttctcttgctgagtccaatgaaataaatcaaggtcttactcgcggtagcagtctgacaggagcaactggtaatggtgtgcttggagaagctatcttagatcagtctgatgagcatgttagcagtgccttgaatcacaggaaagggaaccttgtattggaacatgatggtagaaatggttcggtagcgtcttataggggagttctttcagaagaggaccgtgattcttatcccggccatgctcggaaggactctgctgaaagtattgggagtgatttgagttctttaagaggaagtgaattatctgttccaggggctagtaattccctttgggatggtgctgtggtggatggacatgttagtcaaacagaacatcttactggtttagatatgcatcttttgtatgatatggatgcgcaagtcatccttccaaatgataaaaaacagaagttgactagacttttgatcacaatgcaacgaagaatagggacagcaaaaactgatatggaggatctcatagcacgattaaatcaggaaggagctgttaaagaatatcttactacaaaggttaaagatttagaggttgaattggaagccacaaagcaaaaaggtagagagacactgcaacaagctatcctggctgaaagagagaggattacccagatgcagtgggatatggatgagctccgtaggaagtactctgagatggagtcaaacctgaagaccgaacataatgagaaaactcgtgcggagtcagaaagaacaactgctagtggtgaaaatgaaacattacttgaagaattagaaatcaaacaaaaagaagttgagagtttgaaacagcaacttgtagaagctgaggcaaagtccaaagctgataagaaagttcttgtcaaagaggtcaagtctcttagaaactcccaaactgagatgaagaaagtgttgaatcagtatcttgaggagaagactgatttagagagagttattaatagagataaacagagatcagcacgtacaaagttatcccgagtaaaaattcttcatgagtgtcgactgctgcgggagcggctacaagactgcagtgctaaatttctagcagaagaacaagacaactttactattgatccatcatccttgcctgatgcattagatcttctagcaacatcagacaatagaatacgcctactcgttgctgaggctcaacttctagcacgagatgatgaacaaggctcttctgatggtggcgacgattctgatagtagatcctcattaactatgagcagtgaagatgcaaaagttaccgatgaagatactactaaaatgctttctgatctgctcattgacaatgcgcagctgagactacgcctcaatgctgtcatccgcaatgctgtaaatacttccgtgaagccagagaaagaaggtagtggcgaggttctccccaaaaagacagtccttaactggttgttggacagatgagagaaccaccaatatatatttatgtggattagttcttcaaacttacgcggcttgaccaaaattatatgatgagcgtacctatagtgccagggtagcatcaggaattcaggataaaaccttccctccatggagggaaggggagcctggaagcctttgtttctgttgcacgattttttatccacgcatggaagtcacggaggatggtatatatagggccacggctttggctcctaaaaaatgactgtctggcttctcttccagaaactctataaaagctagtgttttttaacaaatcgttt

SEQ ID NO: 80372 - DNA, 2568 bp, Zea Mays
ccgcggcggaaccaaccgtggcaggggacggccaagggcggtcgctgccttgcctggcgttgacagtttgatgcgaccgcgggagcgtccgcccgaccgccaccgcgtccgcctcagctcccctcgcttccctctaatttccagcccagtagtagggagactagaatcgtcggcgcgacgccttggcagattcgtccgccccgatcccaccaccaccgtgccccgcgggtgacgtcggaccggcggcgatggcaacgtcggcggcggcgggatcgcgcaggaaggcgccgagccctccgaagcaccgccacgacggtacctcgccgctgcctctcggcatggactggagccctcccccgaagagatgggagggaaggaacaccatatggccacacaaccctcaaacaggttggagttactgtgtgatgatgccttcttggatcacccaaacacctgaaactggtgtcacagccgatagctttttgaaatctgtcgttttttacaggatacatgttggtatacaatcttcagaaggctttagctctatccatggaatcctcagaaggtttagtgactttctgaagctatcttctgatcttaagagcgcgtttcccagaaaagatgtcccatcggctcctccgaagcatgctttcttaagaataaattcaagcaggttgcttctagaagagagaaggcatgcattggaggagtggatgcagaagttactttctgacattgacttgtcaagaagtgctcctgttgctgcttttcttgagcttgaagctgctgcgcgttcatatttccaagaacggaatgggcgtccttctgaagtcttactcgcggtagcagtctgacaggagcaactggtaatggtgtgcttggagaagctatcttagatcagtctgatgagcatgttagcagtgccttgaatcacaggaaagggaaccttgtattggaacatgatggtagaaatggttcggtagcgtcttataggggagttctttcagaagaggaccgtgattcttatcccggccatgctcggaaggactctgctgaaagtattgggagtgatttgagttctttaagaggaagtgaattatctgttccaggggctagtaattccctttgggatggtgctgtggtggatggacatgttagtcaaacagaacatcttactggtttagatatgcatcttttgtatgatatggatgcgcaagtcatccttccaaatgataaaaaacagaagttgactagacttttgatcacaatgcaacgaagaatagggacagcaaaaactgatatggaggatctcatagcacgattaaatcaggaaggagctgttaaagaatatcttactacaaaggttaaagatttagaggttgaattggaagccacaaagcaaaaaggtagagagacactgcaacaagctatcctggctgaaagagagaggattacccagatgcagtgggatatggatgagctccgtaggaagtactctgagatggagtcaaacctgaagaccgaacataatgagaaaactcgtgcggagtcagaaagaacaactgctagtggtgaaaatgaaacattacttgaagaattagaaatcaaacaaaaagaagttgagagtttgaaacagcaacttgtagaagctgaggcaaagtccaaagctgataagaaagttcttgtcaaagaggtcaagtctcttagaaactcccaaactgagatgaagaaagtgttgaatcagtatcttgaggagaagactgatttagagagagttattaatagagataaacagagatcagcacgtacaaagttatcccgagtaaaaattcttcatgagtgtcgactgctgcgggagcggctacaagactgcagtgctaaatttctagcagaagaacaagacaactttactattgatccatcatccttgcctgatgcattagatcttctagcaacatcagacaatagaatacgcctactcgttgctgaggctcaacttctagcacgagatgatgaacaaggctcttctgatggtggcgacgattctgatagtagatcctcattaactatgagcagtgaagatgcaaaagttaccgatgaagatactactaaaatgctttctgatctgctcattgacaatgcgcagctgagactacgcctcaatgctgtcatccgcaatgctgtaaatacttccgtgaagccagagaaagaaggtagtggcgaggttctccccaaaaagacagtccttaactggttgttggacagatgagagaaccaccaatatatatttatgtggattagttcttcaaacttacgcggcttgaccaaaattatatgatgagcgtacctatagtgccagggtagcatcaggaattcaggataaaaccttccctccatggagggaaggggagcctggaagcctttgtttctgttgcacgattttttatccacgcatggaagtcacggaggatggtatatatagggccacggctttggctcctaaaaaatgactgtctggcttctcttccagaaactctataaaagctagtgttttttaacaaatcgttt

SEQ ID NO: 80373 - DNA, 2654 bp, Zea Mays
ccgcggcggaaccaaccgtggcaggggacggccaagggcggtcgctgccttgcctggcgttgacagtttgatgcgaccgcgggagcgtccgcccgaccgccaccgcgtccgcctcagctcccctcgcttccctctaatttccagcccagtagtagggagactagaatcgtcggcgcgacgccttggcagattcgtccgccccgatcccaccaccaccgtgccccgcgggtgacgtcggaccggcggcgatggcaacgtcggcggcggcgggatcgcgcaggaaggcgccgagccctccgaagcaccgccacgacggtacctcgccgctgcctctcggcatggactggagccctcccccgaagagatgggagggaaggaacaccatatggccacacaaccctcaaacaggttggagttactgtgtgatgatgccttcttggatcacccaaacacctgaaactggtgtcacagccgatagctttttgaaatctgtcgttgatacatgttggtatacaatcttcagaaggctttagctctatccatggaatcctcagaaggtttagtgactttctgaagctatcttctgatcttaagagcgcgtttcccagaaaagatgtcccatcggctcctccgaagcatgctttcttaagaataaattcaagcaggttgcttctagaagagagaaggcatgcattggaggagtggatgcagaagttactttctgacattgacttgtcaagaagtgctcctgttgctgcttttcttgagcttgaagctgctgcgcgttcatatttccaagaacggaatgggcgtccttctgaagtaggtccttctgcaaaaagcagtactaaatcttcctcacattctgatggacctgcttccggttctcttgctgagtccaatgaaataaatcaaggtcttactcgcggtagcagtctgacaggagcaactggtaatggtgtgcttggagaagctatcttagatcagtctgatgagcatgttagcagtgccttgaatcacaggaaagggaaccttgtattggaacatgatggtagaaatggttcggtagcgtcttataggggagttctttcagaagaggaccgtgattcttatcccggccatgctcggaaggactctgctgaaagtattgggagtgatttgagttctttaagaggaagtgaattatctgttccaggggctagtaattccctttgggatggtgctgtggtggatggacatgttagtcaaacagaacatcttactggtttagatatgcatcttttgtatgatatggatgcgcaagtcatccttccaaatgataaaaaacagaagttgactagacttttgatcacaatgcaacgaagaatagggacagcaaaaactgatatggaggatctcatagcacgattaaatcaggaaggagctgttaaagaatatcttactacaaaggttaaagatttagaggttgaattggaagccacaaagcaaaaaggtagagagacactgcaacaagctatcctggctgaaagagagaggattacccagatgcagtgggatatggatgagctccgtaggaagtactctgagatggagtcaaacctgaagaccgaacataatgagaaaactcgtgcggagtcagaaagaacaactgctagtggtgaaaatgaaacattacttgaagaattagaaatcaaacaaaaagaagttgagagtttgaaacagcaacttgtagaagctgaggcaaagtccaaagctgataagaaagttcttgtcaaagaggtcaagtctcttagaaactcccaaactgagatgaagaaagtgttgaatcagtatcttgaggagaagactgatttagagagagttattaatagagataaacagagatcagcacgtacaaagttatcccgagtaaaaattcttcatgagtgtcgactgctgcgggagcggctacaagactgcagtgctaaatttctagcagaagaacaagacaactttactattgatccatcatccttgcctgatgcattagatcttctagcaacatcagacaatagaatacgcctactcgttgctgaggctcaacttctagcacgagatgatgaacaaggctcttctgatggtggcgacgattctgatagtagatcctcattaactatgagcagtgaagatgcaaaagttaccgatgaagatactactaaaatgctttctgatctgctcattgacaatgcgcagctgagactacgcctcaatgctgtcatccgcaatgctgtaaatacttccgtgaagccagagaaagaaggtagtggcgaggttctccccaaaaagacagtccttaactggttgttggacagatgagagaaccaccaatatatatttatgtggattagttcttcaaacttacgcggcttgaccaaaattatatgatgagcgtacctatagtgccagggtagcatcaggaattcaggataaaaccttccctccatggagggaaggggagcctggaagcctttgtttctgttgcacgattttttatccacgcatggaagtcacggaggatggtatatatagggccacggctttggctcctaaaaaatgactgtctggcttctcttccagaaactctataaaagctagtgttttttaacaaatcgttt

SEQ ID NO: 80374 - DNA, 2460 bp, Zea Mays
ccgcggcggaaccaaccgtggcaggggacggccaagggcggtcgctgccttgcctggcgttgacagtttgatgcgaccgcgggagcgtccgcccgaccgccaccgcgtccgcctcagctcccctcgcttccctctaatttccagcccagtagtagggagactagaatcgtcggcgcgacgccttggcagattcgtccgccccgatcccaccaccaccgtgccccgcgggtgacgtcggaccggcggcgatggcaacgtcggcggcggcgggatcgcgcaggaaggcgccgagccctccgaagcaccgccacgacggtacctcgccgctgcctctcggcatggactggagccctcccccgaagagatgggagggaaggaacaccatatggccacacaaccctcaaacagttttacaggatacatgttggtatacaatcttcagaaggctttagctctatccatggaatcctcagaaggtttagtgactttctgaagctatcttctgatcttaagagcgcgtttcccagaaaagatgtcccatcggctcctccgaagcatgctttcttaagaataaattcaagcaggttgcttctagaagagagaaggcatgcattggaggagtggatgcagaagttactttctgacattgacttgtcaagaagtgctcctgttgctgcttttcttgagcttgaagctgctgcgcgttcatatttccaagaacggaatgggcgtccttctgaatctgacaggagcaactggtaatggtgtgcttggagaagctatcttagatcagtctgatgagcatgttagcagtgccttgaatcacaggaaagggaaccttgtattggaacatgatggtagaaatggttcggtagcgtcttataggggagttctttcagaagaggaccgtgattcttatcccggccatgctcggaaggactctgctgaaagtattgggagtgatttgagttctttaagaggaagtgaattatctgttccaggggctagtaattccctttgggatggtgctgtggtggatggacatgttagtcaaacagaacatcttactggtttagatatgcatcttttgtatgatatggatgcgcaagtcatccttccaaatgataaaaaacagaagttgactagacttttgatcacaatgcaacgaagaatagggacagcaaaaactgatatggaggatctcatagcacgattaaatcaggaaggagctgttaaagaatatcttactacaaaggttaaagatttagaggttgaattggaagccacaaagcaaaaaggtagagagacactgcaacaagctatcctggctgaaagagagaggattacccagatgcagtgggatatggatgagctccgtaggaagtactctgagatggagtcaaacctgaagaccgaacataatgagaaaactcgtgcggagtcagaaagaacaactgctagtggtgaaaatgaaacattacttgaagaattagaaatcaaacaaaaagaagttgagagtttgaaacagcaacttgtagaagctgaggcaaagtccaaagctgataagaaagttcttgtcaaagaggtcaagtctcttagaaactcccaaactgagatgaagaaagtgttgaatcagtatcttgaggagaagactgatttagagagagttattaatagagataaacagagatcagcacgtacaaagttatcccgagtaaaaattcttcatgagtgtcgactgctgcgggagcggctacaagactgcagtgctaaatttctagcagaagaacaagacaactttactattgatccatcatccttgcctgatgcattagatcttctagcaacatcagacaatagaatacgcctactcgttgctgaggctcaacttctagcacgagatgatgaacaaggctcttctgatggtggcgacgattctgatagtagatcctcattaactatgagcagtgaagatgcaaaagttaccgatgaagatactactaaaatgctttctgatctgctcattgacaatgcgcagctgagactacgcctcaatgctgtcatccgcaatgctgtaaatacttccgtgaagccagagaaagaaggtagtggcgaggttctccccaaaaagacagtccttaactggttgttggacagatgagagaaccaccaatatatatttatgtggattagttcttcaaacttacgcggcttgaccaaaattatatgatgagcgtacctatagtgccagggtagcatcaggaattcaggataaaaccttccctccatggagggaaggggagcctggaagcctttgtttctgttgcacgattttttatccacgcatggaagtcacggaggatggtatatatagggccacggctttggctcctaaaaaatgactgtctggcttctcttccagaaactctataaaagctagtgttttttaacaaatcgttt

SEQ ID NO: 80375 - DNA, 2688 bp, Zea Mays
ccgcggcggaaccaaccgtggcaggggacggccaagggcggtcgctgccttgcctggcgttgacagtttgatgcgaccgcgggagcgtccgcccgaccgccaccgcgtccgcctcagctcccctcgcttccctctaatttccagcccagtagtagggagactagaatcgtcggcgcgacgccttggcagattcgtccgccccgatcccaccaccaccgtgccccgcgggtgacgtcggaccggcggcgatggcaacgtcggcggcggcgggatcgcgcaggaaggcgccgagccctccgaagcaccgccacgacggtacctcgccgctgcctctcggcatggactggagccctcccccgaagagatgggctcattgcttattgactgcatacaggagggaaggaacaccatatggccacacaaccctcaaacaggttggagttactgtgtgatgatgccttcttggatcacccaaacacctgaaactggtgtcacagccgatagctttttgaaatctgtcgttttttacaggatacatgttggtatacaatcttcagaaggctttagctctatccatggaatcctcagaaggtttagtgactttctgaagctatcttctgatcttaagagcgcgtttcccagaaaagatgtcccatcggctcctccgaagcatgctttcttaagaataaattcaagcaggttgcttctagaagagagaaggcatgcattggaggagtggatgcagaagttactttctgacattgacttgtcaagaagtgctcctgttgctgcttttcttgagcttgaagctgctgcgcgttcatatttccaagaacggaatgggcgtccttctgaagtaggtccttctgcaaaaagcagtactaaatcttcctcacattctgatggacctgcttccggttctcttgctgagtccaatgaaataaatcaaggtcttactcgcggtagcagtctgacaggagcaactggtaatggtgtgcttggagaagctatcttagatcagtctgatgagcatgttagcagtgccttgaatcacaggaaagggaaccttgtattggaacatgatggtagaaatggttcggtagcgtcttataggggagttctttcagaagaggaccgtgattcttatcccggccatgctcggaaggactctgctgaaagtattgggagtgatttgagttctttaagaggaagtgaattatctgttccaggggctagtaattccctttgggatggtgctgtggtggatggacatgttagtcaaacagaacatcttactggtttagatatgcatcttttgtatgatatggatgcgcaagtcatccttccaaatgataaaaaacagaagttgactagacttttgatcacaatgcaacgaagaatagggacagcaaaaactgatatggaggatctcatagcacgattaaatcaggaaggagctgttaaagaatatcttactacaaaggttaaagatttagaggttgaattggaagccacaaagcaaaaaggtagagagacactgcaacaagctatcctggctgaaagagagaggattacccagatgcagtgggatatggatgagctccgtaggaagtactctgagatggagtcaaacctgaagaccgaacataatgagaaaactcgtgcggagtcagaaagaacaactgctagtggtgaaaatgaaacattacttgaagaattagaaatcaaacaaaaagaagttgagagtttgaaacagcaacttgtagaagctgaggcaaagtccaaagctgataagaaagttcttgtcaaagaggtcaagtctcttagaaactcccaaactgagatgaagaaagtgttgaatcagtatcttgaggagaagactgatttagagagagttattaatagagataaacagagatcagcacgtacaaagttatcccgagtaaaaattcttcatgagtgtcgactgctgcgggagcggctacaagactgcagtgctaaatttctagcagaagaacaagacaactttactattgatccatcatccttgcctgatgcattagatcttctagcaacatcagacaatagaatacgcctactcgttgctgaggctcaacttctagcacgagatgatgaacaaggctcttctgatggtggcgacgattctgatagtagatcctcattaactatgagcagtgaagatgcaaaagttaccgatgaagatactactaaaatgctttctgatctgctcattgacaatgcgcagctgagactacgcctcaatgctgtcatccgcaatgctgtaaatacttccgtgaagccagagaaagaaggtagtggcgaggttctccccaaaaagacagtccttaactggttgttggacagatgagagaaccaccaatatatatttatgtggattagttcttcaaacttacgcggcttgaccaaaattatatgatgagcgtacctatagtgccagggtagcatcaggaattcaggataaaaccttccctccatggagggaaggggagcctggaagcctttgtttctgttgcacgattttttatccacgcatggaagtcacggaggatggtatatatagggccacggctttggctcctaaaaaatgactgtctggcttctcttccagaaactctataaaagctagtgttttttaacaaatcgttt

SEQ ID NO: 80376 - DNA, 751 bp, Zea Mays
ccttagcggcaaaaccttttctctacgccgccatcgcctgctcccgtcccgccaccacatccgcccaagagctcaccgtcggggaggctgctcgaggagccgcgctgtctctcccgcgccgcgaccttcgccctcgccaccgccatgatctgcgcgatctccggcgaggtgccagacgagccggtggtgtcgaagaagtcggggcttctcttcgagcggcggctcatcgagcgctacattgaggaccatggcaagtgccccatcaccaaggaggagcttactatggatgatattgtgtcggtcaaagaccaacaaggatttcctaggcaaccttcatatactactggatttgggactgctttaaatatagagacacttattgctgccgcggaacaaagagatacaccaactgagacacctccacctgaagttcaggacaagattctttttatgatcaacaatatatccatctcaaatatggaagctaaggcaaaggaatttaacaaggtcatacaggaacagtattatccttggtttgcacaatacatggtcatgaaaagggcaagcattgaaccaaatttccatgatctgtatctgaagttctttgataaagtaaactcaaaatccttgaacaaggaaatactgaaagccacatatgagaactgcaaggtcttgtgaagatcagaccttatcaattctagttccgaggagcgctccttgctaaaaaaacctaggcagttggttgggaaag

SEQ ID NO: 80377 - DNA, 1796 bp, Zea Mays
atttggcccaaaactaacttgcaaaattggccgtatcaggccctacgcgtctaccgcaagtagggccaaggacgacaaagaagaaacgaatccgaaacctctccaagaatccatcgcagccgccatcatgtccgccgccggtggccgaacccttggccggagcagcttctcccgcgccacatctaaactggtggcgtcctcatccggctctgctggcgttaagattggcccgaacggtgcttctttcgtctcctcgggcattcccgacctcgacaggattttgggtggtggattccttcttggctcagttgtaatgatcatggaggacactgatgcgccacaccacctcttgcttcttcggtgcttcatgtctcagggtgttgtgcacaaacaacccctgctcttttcaggagctatgaaagagcctgtgttgttccttggtacactacctgctccagtttcatcttcaaaggaggatggacgacacagagcaatgggtcctgcagcaagtagtgatggacgagcaaatgatgagggtttgaggatagcttggcagtacaagaaatactttggggatgacaagacttcgcgagctgaacataaagacaataaacaggaattcagcaatgattttgatttgaggaagcccttggaaaggcatttacttaatggacagaatattgaatgtgtaagcactcaagatgctgacacactcagcagcctccaggattgttgttctgctttcgtatccaagcttccaaggtgagaaaagatggtgggagttcaactgctgggagaattgctatacaatcactctgtgcaccgcagtgcagatactttgaaaaggactgggacatggtctcatttatcagatcactgaaggccatggtgcgctcatctaactctgttgctgttgtaacatttccgagtacagttctgtcaaattcgttctgtaagagatggcagcacctggcggatacactgctgtccatcaaagcaattccagatgaggacaaagacttggcaaaactcctcacaggatatcaagatatggttggttttttgcatgtccacaaggtggcacaacctaacagtcaggtccctgtgatcttagaggcatccacgctctctctaaagctgcgaaagaggaggtccctggtcttagaacggttgaatcaggctccagtcgatgggtcaagtgggccttcgtctgctgcatcaagcagttgctcatcgcaaggttcacagcttgatttctaattggtatggctggatttccttgagaggagctcagaagtgctgtgtactagttactcgtggcagaatgcagcttttggaggtttaggttttagataggagtcagtttgatggttcactgttaaccatcctccctcatgtaaccccactttcaacagtattagaaccgtcgaaacttgtatatttttcgggtagttgtccaagtttgttgaactgccttgaacaggttacaaaagtgtggggttttcttgttttgtctgttccaaatgatcatgttttttgcgtagaacggaaatggttgagttgctgatgcaactgaagaattgttggtcttcacgaagatggagctctgtcagacaatgcagcaatcttgctatgttaatgtcaaagatgcagaaggcaattgtaacaacgggaagtagatttttgtaatactggcatcggcattcttgagcttcatggaaatggcagcgccaagcacacaattgcatttgtggcattataatgccgagcgctctgaagaaatggcaacgtcctcc

SEQ ID NO: 80378 - DNA, 2025 bp, Zea Mays
ttggcccaaaactaacttgcaaaattggccgtatcaggccctacgcgtctaccgcaagtagggccaaggacgacaaagaagaaacgaatccgaaacctctccaagaatccatcgcagccgccatcatgtccgccgccggtggccgaacccttggccggagcagcttctcccgcgccacatctaaactggtggcgtcctcatccggctctgctggcgttaagattggcccgaacggtgcttctttcgtctcctcgggcattcccgacctcgacagccctacgcgtctaccgcaagtagggccaaggacgacaaagaagaaacgaaaccgaaacctctccaggaatccatcgcagccgccgtcatggccgccgccggtggccgaacccttggccggagcagcttctcccgcgccacatctaacctggtggcgtcctcatccggcgcttctggcgttaagattggcccgaacggtgcttctttcgtctcctcgggcattcccgacctcgacaggattttgggtggtggattccttcttggctcagttgtaatgatcatggaggacactgatgcgccacaccacctcttgcttcttcggtgcttcatgtctcagggtgttgtgcacaaacaacccctgctcttttcaggagctatgaaagagcctgtgttgttccttggtacactacctgctccagtttcatcttcaaaggaggatggacgacacagagcaatgggtcctgcagcaagtagtgatggacgagcaaatgatgagggtttgaggatagcttggcagtacaagaaatactttggggatgacaagacttcgcgagctgaacataaagacaataaacaggaattcagcaatgattttgatttgaggaagcccttggaaaggcatttacttaatggacagaatattgaatgtgtaagcactcaagatgctgacacactcagcagcctccaggattgttgttctgctttcgtatccaagcttccaagaaaagatggtgggagttcaactgctgggagaattgctatacaatcactctgtgcaccgcagtgcagatactttgaaaaggactgggacatggtctcatttatcagatcactgaaggccatggtgcgctcatctaactctgttgctgttgtaacatttccgagtacagttctgtcaaattcgttctgtaagagatggcagcacctggcggatacactgctgtccatcaaagcaattccagatgaggacaaagacttggcaaaactcctcacaggatatcaagatatggttggttttttgcatgtccacaaggtggcacaacctaacagtcaggtccctgtgatcttagaggcatccacgctctctctaaagctgcgaaagaggaggtccctggtcttagaacggttgaatcaggctccagtcgatgggtcaagtgggccttcgtctgctgcatcaagcagttgctcatcgcaaggttcacagcttgatttctaattggtatggctggatttccttgagaggagctcagaagtgctgtgtactagttactcgtggcagaatgcagcttttggaggtttaggttttagataggagtcagtttgatggttcactgttaaccatcctccctcatgtaaccccactttcaacagtattagaaccgtcgaaacttgtatatttttcgggtagttgtccaagtttgttgaactgccttgaacaggttacaaaagtgtggggttttcttgttttgtctgttccaaatgatcatgttttttgcgtagaacggaaatggttgagttgctgatgcaactgaagaattgttggtcttcacgaagatggagctctgtcagacaatgcagcaatcttgctatgttaatgtcaaagatgcagaaggcaattgtaacaacgggaagtagatttttgtaatactggcatcggcattcttgagcttcatggaaatggcagcgccaagcacacaattgcatttgtggcattataatgccgagcgctctgaagaaatggcaacgtcctcc

SEQ ID NO: 80379 - DNA, 1755 bp, Zea Mays
cgtctaccgcaagtagggccaaggacgacaaagaagaaacgaaaccgaaacctctccaggaatccatcgcagccgccgtcatggccgccgccggtggccgaacccttggccggagcagcttctcccgcgccacatctaacctggtggcgtcctcatccggcgcttctggcgttaagattggcccgaacggtgcttctttcgtctcctcgggcattcccgacctcgacaggattttgggtggtggattccttcttggctcagttgtaatgatcatggaggacactgatgcgccacaccacctcttgcttcttcggtgcttcatgtctcagggtgttgtgcacaaacaacccctgctcttttcaggagctatgaaagagcctgtgttgttccttggtacactacctgctccagtttcatcttcaaaggaggatggacgacacagagcaatgggtcctgcagcaagtagtgatggacgagcaaatgatgagggtttgaggatagcttggcagtacaagaaatactttggggatgacaagacttcgcgagctgaacataaagcattattgcagacaataaacaggaattcagcaatgattttgatttgaggaagcccttggaaaggcatttacttaatggacagaatattgaatgtgtaagcactcaagatgctgacacactcagcagcctccaggattgttgttctgctttcgtatccaagcttccaagaaaagatggtgggagttcaactgctgggagaattgctatacaatcactctgtgcaccgcagtgcagatactttgaaaaggactgggacatggtctcatttatcagatcactgaaggccatggtgcgctcatctaactctgttgctgttgtaacatttccgagtacagttctgtcaaattcgttctgtaagagatggcagcacctggcggatacactgctgtccatcaaagcaattccagatgaggacaaagacttggcaaaactcctcacaggatatcaagatatggttggttttttgcatgtccacaaggtggcacaacctaacagtcaggtccctgtgatcttagaggcatccacgctctctctaaagctgcgaaagaggaggtccctggtcttagaacggttgaatcaggctccagtcgatgggtcaagtgggccttcgtctgctgcatcaagcagttgctcatcgcaaggttcacagcttgatttctaattggtatggctggatttccttgagaggagctcagaagtgctgtgtactagttactcgtggcagaatgcagcttttggaggtttaggttttagataggagtcagtttgatggttcactgttaaccatcctccctcatgtaaccccactttcaacagtattagaaccgtcgaaacttgtatatttttcgggtagttgtccaagtttgttgaactgccttgaacaggttacaaaagtgtggggttttcttgttttgtctgttccaaatgatcatgttttttgcgtagaacggaaatggttgagttgctgatgcaactgaagaattgttggtcttcacgaagatggagctctgtcagacaatgcagcaatcttgctatgttaatgtcaaagatgcagaaggcaattgtaacaacgggaagtagatttttgtaatactggcatcggcattcttgagcttcatggaaatggcagcgccaagcacacaattgcatttgtggcattataatgccgagcgctctgaagaaatggcaacgtcctcc

SEQ ID NO: 80380 - DNA, 1656 bp, Zea Mays
cgtctaccgcaagtagggccaaggacgacaaagaagaaacgaaaccgaaacctctccaggaatccatcgcagccgccgtcatggccgccgccggtggccgaacccttggccggagcagcttctcccgcgccacatctaacctggtggcgtcctcatccggcgcttctggcgttaagattggcccgaacggtgcttctttcgtctcctcgggcattcccgacctcgacaggattttgggtggtggattccttcttggctcagttgtaatgatcatggaggacactgatgcgccacaccacctcttgcttcttcggtgcttcatgtctcagggtgttgtgcacaaacaacccctgctcttttcaggagctatgaaagagcctgtgttgttccttggtacactacctgctccagtttcatcttcaaaggaggatggacgacacagagcaatgggtcctgcagcaagtagtgatggacgagcaaatgatgagggtttgaggatagcttggcagtacaagaaatactttggggatgacaagacttcgcgagctgaacataaagacaataaacaggaattcagcaatgattttgatttgaggaagcccttggaaaggcatttacttaatggacagaatattgaatgtgtaagcactcaagatgctgacacactcagcagcctccaggattgttgttctgctttcgtatccaagcttccaagaaaagatggtgggagttcaactgctgggagaattgctatacaatcactctgtgcaccgcagtgcagatactttgaaaagttctgtcaaattcgttctgtaagagatggcagcacctggcggatacactgctgtccatcaaagcaattccagatgaggacaaagacttggcaaaactcctcacaggatatcaagatatggttggttttttgcatgtccacaaggtggcacaacctaacagtcaggtccctgtgatcttagaggcatccacgctctctctaaagctgcgaaagaggaggtccctggtcttagaacggttgaatcaggctccagtcgatgggtcaagtgggccttcgtctgctgcatcaagcagttgctcatcgcaaggttcacagcttgatttctaattggtatggctggatttccttgagaggagctcagaagtgctgtgtactagttactcgtggcagaatgcagcttttggaggtttaggttttagataggagtcagtttgatggttcactgttaaccatcctccctcatgtaaccccactttcaacagtattagaaccgtcgaaacttgtatatttttcgggtagttgtccaagtttgttgaactgccttgaacaggttacaaaagtgtggggttttcttgttttgtctgttccaaatgatcatgttttttgcgtagaacggaaatggttgagttgctgatgcaactgaagaattgttggtcttcacgaagatggagctctgtcagacaatgcagcaatcttgctatgttaatgtcaaagatgcagaaggcaattgtaacaacgggaagtagatttttgtaatactggcatcggcattcttgagcttcatggaaatggcagcgccaagcacacaattgcatttgtggcattataatgccgagcgctctgaagaaatggcaacgtcctcc

SEQ ID NO: 80381 - DNA, 1199 bp, Zea Mays
gcatattatgcggacaataaacaggaattcagcaatgattttgatttgaggaagcccttggaaaggcatttacttaatggacagaatattgaatgtgtaagcactcaagatgctgacacactcagcagcctccaggattgttgttctgctttcgtatccaagcttccaagaaaagatggtgggagttcaactgctgggagaattgctatacaatcactctgtgcaccgcagtgcagatactttgaaaaggactgggacatggtctcatttatcagatcactgaaggccatggtgcgctcatctaactctgttgctgttgtaacatttccgagtacagttctgtcaaattcgttctgtaagagatggcagcacctggcggatacactgctgtccatcaaagcaattccagatgaggacaaagacttggcaaaactcctcacaggatatcaagatatggttggttttttgcatgtccacaaggtggcacaacctaacagtcaggtccctgtgatcttagaggcatccacgctctctctaaagctgcgaaagaggaggtccctggtcttagaacggttgaatcaggctccagtcgatgggtcaagtgggccttcgtctgctgcatcaagcagttgctcatcgcaaggttcacagcttgatttctaattggtatggctggatttccttgagaggagctcagaagtgctgtgtactagttactcgtggcagaatgcagcttttggaggtttaggttttagataggagtcagtttgatggttcactgttaaccatcctccctcatgtaaccccactttcaacagtattagaaccgtcgaaacttgtatatttttcgggtagttgtccaagtttgttgaactgccttgaacaggttacaaaagtgtggggttttcttgttttgtctgttccaaatgatcatgttttttgcgtagaacggaaatggttgagttgctgatgcaactgaagaattgttggtcttcacgaagatggagctctgtcagacaatgcagcaatcttgctatgttaatgtcaaagatgcagaaggcaattgtaacaacgggaagtagatttttgtaatactggcatcggcattcttgagcttcatggaaatggcagcgccaagcacacaattgcatttgtggcattataatgccgagcgctctgaagaaatggcaacgtcctcc

SEQ ID NO: 80382 - DNA, 1206 bp, Zea Mays
cgggaagcctacgacactggacaataaacaggaattcagcaatgattttgatttgaggaagcccttggaaaggcatttacttaatggacagaatattgaatgtgtaagcactcaagatgctgacacactcagcagcctccaggattgttgttctgctttcgtatccaagcttccaagaaaagatggtgggagttcaactgctgggagaattgctatacaatcactctgtgcaccgcagtgcagatactttgaaaaggactgggacatggtctcatttatcagatcactgaaggccatggtgcgctcatctaactctgttgctgttgtaacatttccgagtacagttctgtcaaattcgttctgtaagagatggcagcacctggcggatacactgctgtccatcaaagcaattccagatgaggacaaagacttggcaaaactcctcacaggatatcaagatatggttggttttttgcatgtccacaaggtggcacaacctaacagtcaggtccctgtgatcttagaggcatccacgctctctctaaagctgcgaaagaggaggtccctggtcttagaacggttgaatcaggctccagtcgatgggtcaagtgggccttcgtctgctgcatcaagcagttgctcatcgcaaggttcacagcttgatttctaattggtatggctggatttccttgagaggagctcagaagtgctgtgtactagttactcgtggcagaatgcagcttttggaggtttaggttttagataggagtcagtttgatggttcactgttaaccatcctccctcatgtaaccccactttcaacagtattagaaccgtcgaaacttgtatatttttcgggtagttgtccaagtttgttgaactgccttgaacaggttacaaaagtgtggggttttcttgttttgtctgttccaaatgatcatgttttttgcgtagaacggaaatggttgagttgctgatgcaactgaagaattgttggtcttcacgaagatggagctctgtcagacaatgcagcaatcttgctatgttaatgtcaaagatgcagaaggcaattgtaacaacgggaagtagatttttgtaatactggcatcggcattcttgagcttcatggaaatggcagcgccaagcacacaattgcatttgtggcattataatgccgagcgctctgaagaaatggcaacgtcctcc

SEQ ID NO: 80383 - DNA, 1204 bp, Zea Mays
cctacgacactggacaataaacaggaattcagcaatgattttgatttgaggaagcccttggaaaggcatttacttaatggacagaatattgaatgtgtaagcactcaagatgctgacacactcagcagcctccaggattgttgttctgctttcgtatccaagcttccaaggtgagaaaagatggtgggagttcaactgctgggagaattgctatacaatcactctgtgcaccgcagtgcagatactttgaaaaggactgggacatggtctcatttatcagatcactgaaggccatggtgcgctcatctaactctgttgctgttgtaacatttccgagtacagttctgtcaaattcgttctgtaagagatggcagcacctggcggatacactgctgtccatcaaagcaattccagatgaggacaaagacttggcaaaactcctcacaggatatcaagatatggttggttttttgcatgtccacaaggtggcacaacctaacagtcaggtccctgtgatcttagaggcatccacgctctctctaaagctgcgaaagaggaggtccctggtcttagaacggttgaatcaggctccagtcgatgggtcaagtgggccttcgtctgctgcatcaagcagttgctcatcgcaaggttcacagcttgatttctaattggtatggctggatttccttgagaggagctcagaagtgctgtgtactagttactcgtggcagaatgcagcttttggaggtttaggttttagataggagtcagtttgatggttcactgttaaccatcctccctcatgtaaccccactttcaacagtattagaaccgtcgaaacttgtatatttttcgggtagttgtccaagtttgttgaactgccttgaacaggttacaaaagtgtggggttttcttgttttgtctgttccaaatgatcatgttttttgcgtagaacggaaatggttgagttgctgatgcaactgaagaattgttggtcttcacgaagatggagctctgtcagacaatgcagcaatcttgctatgttaatgtcaaagatgcagaaggcaattgtaacaacgggaagtagatttttgtaatactggcatcggcattcttgagcttcatggaaatggcagcgccaagcacacaattgcatttgtggcattataatgccgagcgctctgaagaaatggcaacgtcctcc

SEQ ID NO: 80384 - DNA, 1353 bp, Zea Mays
gctcgcagtaccgtggcgtcaccttctaccgccgcaccggccgctgggagtcccacatctgggactgtgggaaacaggtgtacttgggtggattcgacacggcgcaggccgctgcgagggcctacgaccaagccgcgatcaagttccgcggcctgaacgcggacatcaacttcaccctggacgactacaaggacgagatgaagaagatgaaggacttgagcaaggaggagttcgtgctggtgctccggcggcagggcgccggcttcgtcaggggcagctccaggttccggggagtcacccagcacaagtgcggcaagtgggaggccaggatcggccagctcatgggcaagaagtatgtgtacctgggcctgtatgacacagagacggaggctgcccaggcatatgacaaggctgccatcaagtgctacggcaaggaggcggtgaccaacttcgatgcccagagctacgacaaggagctccagtcgcagccctgggacggcgagctggatctcgagctcggtctgggctgcgccagcagcgatccgtccacggtcgccgtcgaggcgttcagccccgcgacgagcagcagtagccgcaagcagaggacgatgacgctgacgctcggtctgccggaggaggaggaggagacgggcgccggctaccctcacagcagcagcagcaggcgtcccccggcgcctgctgccggcatgttcgggcgcccggctgacgaccacgtccacgtagcaccgccgtcacaccggcaatggcagcagcagggacggcacgcagctccagatgcagcgccgccgctgcagcatcatcaggattcccactgtggcagctgggtgcggcgtcgtccaggtccagctggcccagccgctgagcctttcctgtcgtcccgcgccagcaacagtgacgctgctgggccacgtactgacggcgactggtgacctgctgaaaccgccgccggcctgtttcccttttctaggtaaaagcagtggcagaggggcgagctagcgacagcgtgcctcgtcatccatcgtccctgcgccgtggctggcggggtgggaaaaaggtctgagcagttttgagcgtccggaggagctcgacgatttcctgccctcgaatagtcacttggggtggccactagttattatttctttccttccccctcgttgattctgctacccattatagcttctgtatctagctacatgcatgatgctgctctagcgctgttggacgttgatggcacggtgtacggatatgggacagggttcgtgtgaccccatgtccactgctaggcctgtttccaaatggaatatttctgcagtaccatggcttatagaaatg

SEQ ID NO: 80385 - DNA, 1663 bp, Zea Mays
agattacgggcccgagccatcgtcatcgagacatcgaccgactccgactccgactccatccacggtctccttccgagatccctcttctcctcccgcccccgcctgaccgcctccctcctcactccggccccttccgcatgtcaatccatgggctgatactcgaagtcagagtcaccgggtgccggaagctgcgggacacggagttcttcacccgccaggacccctacgtcgtcgtcgagtacgccaccaccaagctccgcactcgcacctgcaccgatggaggaagaaacccaactttcgatgagaagttccatatacccctcattgaagggctccgcgagttgaatgttattgtgtggaatagtaatacgttaactcatgatgacttcattggaagcggaagagtatatctgcacaaggtgctgacaaatggctatgatgactcctcatggccgcttcaaacacgccacatgagatctgctggggaagtgaagctcattatgcatgttgatgtctcagcaatgaacaagatgggtagaagtgtcgccgcatcaagtgcacatcctgttcctgcactttcaatgccagccccatctccaaccccagccccagccccatctccagcttcggccgcaacccctgctccagcaccagcactagcatcagcgattccatacacgggagtctcaccttcatatccaccggtttcagcatatcctggtgcaaccgcataccctgcttacccaacttctagccatgcaccatataccactgctgaatatccaccacctccgcagcaaccataccaacccccacctgctggataccctccatcctatccaccacaaccatatgagcaatcttacccaccgcaaccatatgagggatcttacccaccacaaccatatgagcgatcttacccaccgcaaccatatgggcaacaaccatacccacccccgccagcagcagagtcgccgtacccaccagcgccttaccctggtacttatccaccaagaccctattgatatagcagcgtcagtaatgatctcaggtagaggcatcaaaagcaacaaacaacagccttgatgctatgtgatacgcgcctcagcgtggattctttatttctaattatttggttatgttcctaacaaaaaatagtaccaaccgtcactgagttgttgcacatctatcacaaatcagtttaaggtcagattccaatcgattggtgacaaattggagctgatggggtttcgttaagtgcaacggatggaaatgtattccttgatcagatcgtgtcaacagctcagtgaccagtcatatgtacaataggtagcttgcagattgtgtcagtgaaatccatcctatattgctttgcagtggtggtttagagaccagaactagcttccttcttctcctatcttggaatcacatctgactgatctgtgaccacacaattgtacatgtagtagggtaacctgtgaagtctgctgcttttccaaaacaacaataaatctgaatgtatttgtaacagtcaataaatttgcttcggtggtgaaagctgttggtgtgtgtgagaagtatttgtaacaataaatttgtttttccatgccttttcttctctggcacatggatttatcgctgctaaacttctgtggtagtggtg

SEQ ID NO: 80386 - DNA, 1517 bp, Zea Mays
agattacgggcccgagccatcgtcatcgagacatcgaccgactccgactccgactccatccacggtctccttccgagatccctcttctcctcccgcccccgcctgaccgcctccctcctcactccggccccttccgcatgtcaatccatgggctgatactcgaagtcagagtcaccgggtgccggaagctgcgggacacggagttcttcacccgccaggacccctacgtcgtcgtcgagtacgccaccaccaagctccgcactcgcacctgcaccgatggaggaagaaacccaactttcgatgagaagttccatatacccctcattgaagggctccgcgagttgaatgttattgtgtggaatagtaatacgttaactcatgatgacttcattggaagcggaagagtatatctgcacaaggtgctgacaaatggctatgatgactcctcatggccgcttcaaacacgccacatgagatctgctggggaagtgaagctcattatgcatgttgatgtctcagcaatgaagaacaagatgggtagaagtgtcgccgcatcaagtgcacatcctgttcctgcactttcaatgccagccccatctccaaccccagccccagccccatctccagcttcggccgcaacccctgctccagcaccagcactagcatcagcgattccatacacgggagtctcaccttcatatccaccggtttcagcatatcctggtgcaaccgcataccctgcttacccaacttctagccatgcaccatataccactgctgaatatccaccacctccgcagcaaccataccaacccccacctgctggataccctccatcctatccaccacaaccatatgagcaatcttacccaccgcaaccatatgagggatcttacccaccacaaccatatgagcgatcttacccaccgcaaccatatgggcaacaaccatacccacccccgccagcagcagagtcgccgtacccaccagcgccttaccctggtacttatccaccaagaccctattgatatagcagcgtcagtaatgatctcagtttaaggtcagattccaatcgattggtgacaaattggagctgatggggtttcgttaagtgcaacggatggaaatgtattccttgatcagatcgtgtcaacagctcagtgaccagtcatatgtacaataggtagcttgcagattgtgtcagtgaaatccatcctatattgctttgcagtggtggtttagagaccagaactagcttccttcttctcctatcttggaatcacatctgactgatctgtgaccacacaattgtacatgtagtagggtaacctgtgaagtctgctgcttttccaaaacaacaataaatctgaatgtatttgtaacagtcaataaatttgcttcggtggtgaaagctgttggtgtgtgtgagaagtatttgtaacaataaatttgtttttccatgccttttcttctctggcacatggatttatcgctgctaaacttctgtggtagtggtg

SEQ ID NO: 80387 - DNA, 2122 bp, Zea Mays
tgccagtctcttctccatcggtagtcggtaaggaagatggagcgaggtcagaggcgacaacgacgtgtgtactgcatgccggctgccgttcgggtcccacaatctcgaaaatttatagcggccggggcgtggaatctgagccccgcggccggccagggcacctcaaaactggggaggattcacggccgttccgggcacctgtctactctgtgtgactgtgtctgtcctgtcgtcgcgggccgcagcctcggcttcccagttcccacaccccacgcggccacccaccccacccgcacccggcgcctcgcttctttattccgctccgctcagcccgcccgccagagcatcacatgccattgccaacctctcactgctcgtaccgcctctccactccacctgctgcccctgcgccctgaccgcgaggggagggcgctgagctaccaaggaagccaaccggcgcggaccgggtcggtcaacgcttgctgtgcacccgaccgaggaagctaggaggatcgagcacggacatgttggcctcggcgtcggtgccggccgtctaggaaaagctcgcccgcagaggtaatggatgggcggaggaggggcggcggagctatggcgtggctgctgctgcttctcgcctcgctgtgcaccggcgcgtgcgggctcaatgcggacggggtgctgctcatgtccttcaagaacacggtcaccgcggacttcggtgggaccgcactccgcctcctcaacgtttcgtccaacaagctcgccggcgctgtgccgaccgagctggccgccgtcgtccccgcgaacgcgacggtggacctgtcgcggaacaacttcaccggcgcgatcccacaggccggcccgtttgccgcgcagccggcggcggcgtacgagggcgccgaaaagctcaaggacttcgaggcgcaggtgcgcgccgtcgcccggttccgccatcccaacatcctccggctgcgcggcttttactggggcgccgacgagaagctcctcatccacgactacgcccccaacggcagccttgccaacatcgcattcagcaggcgcttcgggtcgtcgtcgccgctgcacctgagcctggaggcgcggctgcggatcgcgcgcggcgtggcgcgagggctggcgtacatccacgagaagaagggcgtgcacgggaacctgaagccgagcaacatccttctgggcggcgacatggagccatggatcggggacctgggcctggaccggctggcgtcgggcgaggcggcgccgcactaccgcgcgggcgcgtcggcgcggctgttcgggagcaagcggtcgatgcactcgacgagcagcctgccggacctgtcacagatgcccgggccgggcgcgagcccgtgcgggtcggcgtccgcggcggccgcggccgccagcgccgccccggcgccgtaccaggcgcccgagtgcctgaagaacctgcggcccacggccaagtgggacgtgtacgccttcggcatggtgctcctggagctgctctccgggcgggtctactcggaggtggagctgtgccagtggcacgcggggctggtggccgccgaggagcacggccgcgtgctccggatggccgaccccacgctccgcggcgaggccgacggccgggaggacgcgctgctggcgtgcttcaggctcgccttcgcgtgctgcgccatggcgcccggcaagcggccctccatgagggacgccgccatggtgctcgagcgaacggcggcggcggcggcgcccggcgccgccgcgagcagcagcggcgccgctgtgccctgagggggaaaaaacaactgaccttgtagcgcttggagccgttactgatcgcaataatcttactgcaagtgcacggacggtggtggcggcgtcggcgttgatcgccggtggcgagcttgtgtggtagggcgtgtacgtagatctgttactgattttggaggtgctgcgagaattaattaacctactaatcatctgtgtttgtgattgtggatttgaaagcgatgcatattccttttttttcgatcttgcgtctcggtggatctcaagatgtgtacttactgtgacagtgtcagtgtctgatggccacacgatcaatgggttcttctga

SEQ ID NO: 80388 - DNA, 3347 bp, Zea Mays
cagggcacctcaaaactggggaggattcacggccgttccgggcacctgtctactctgtgtgactgtgtctgtcctgtcgtcgcgggccgcagcctcggcttcccagttcccacaccccacgcggccacccaccccacccgcacccggcgcctcgcttctttattccgctccgctcagcccgcccgccagagcatcacatgccattgccaacctctcactgctcgtaccgcctctccactccacctgctgcccctgcgccctgaccgcgaggggagggcgctgagctaccaaggaagccaaccggcgcggaccgggtcggtcaacgcttgctgtgcacccgaccgaggaagctaggaggatcgagcacggacatgttggcctcggcgtcggtgccggccgtctaggaaaagctcgcccgcagaggtaatggatgggcggaggaggggcggcggagctatggcgtggctgctgctgcttctcgcctcgctgtgcaccggcgcgtgcgggctcaatgcggacggggtgctgctcatgtccttcaagaacacggtcaccgcggacccgctgggcgcgctggccggctggagctacagcgacgccgcgccgtgcgcctggaacggcgtcatctgcaacggcttcccgcaggacgacaccgcgccggcggcggcgaacgtgacctcggcctccgccgacggcaacggcaccgcgacggtcgcgcgcaacgccaccggagcaaccgcggcggccggcctcggcgcgtcgctggcggcggccacggtgtcgcgggtcatcagcctcgtcctacccaacgcgcagctctcggggacgctgccgcccgacctcggccgcgtcgagcacctgcgccacctcgacctctccgggaacggcctcagcggcagcctgccgcctacgctgctcaacgccaccgagctccgcgtcctctcgctcgccgggaacgcgctgtcaggcgagctcccggacgcggcggcggcctatgcgcgcggcctgcagcagctcaacctctcgggcaacgcgctcgcgggccgcctccccgccgcgctgtgcaggctgccgagcctccttgcgctggggctcgccagcaaccacctcgccggtgagctccccgtcggaggcctcgggacgttggagcttgttgacctgagcgacaacgacttcaacggctcgctcccgtcggacttcggtgggaccgcactccgcctcctcaacgtttcgtccaacaagctcgccggcgctgtgccgaccgagctggccgccgtcgtccccgcgaacgcgacggtggacctgtcgcggaacaacttcaccggcgcgatcccacaggccggcccgtttgccgcgcagccggcggcggcgtacgagggcgccgaaaagctcaaggacttcgaggcgcaggtgcgcgccgtcgcccggttccgccatcccaacatcctccggctgcgcggcttttactggggcgccgacgagaagctcctcatccacgactacgcccccaacggcagccttgccaacatcgcattcagcagtaagttcctccttcgtctctctccagcaccaacgttcattcagatactagaaattgcatcggaaagttgcttgatttgacaccgactaatgatgcacctgtagtacggttcataggctcaaactttataatcatttgcaacggcttggtgagtcttatgaaaagatggcactttactgattgtacgtgctgcaacttaaatgcgcattagtagtactgattcaactattgtctgaaggaagagcttaatcgcattggtcacagtcacaggtactggtagtgcaaataaatttgtcattgctcacacgaatcattgcaattttgctgcaagtcttaaggactcgtccctttggtactgaaagaactgtcctttggttgctttgcttcatcagtcgcaaaatcagtacaactccacaacgcctaacgccttggcgttccatttttacgatcacgaggctcacttcacctgatttggtcatatggccctgtttgtttcggcttctggcagcttctggccaccaaaagctgccgtggactgctaaacgctcagcttttcagccagcttctataaaatccgttgggacaaaaaccatccaaaatcaacataaacacgtaatcggttgagtcgttgtaatagtagtaatagtaggaattcgtcactttctagatcctgagcccgtaactttatgttcctcacacgtaatcgtaatgaccggatgattttgccgcacctcctctgcagggcgcttcgggtcgtcgtcgccgctgcacctgagcctggaggcgcggctgcggatcgcgcgcggcgtggcgcgagggctggcgtacatccacgagaagaagggcgtgcacgggaacctgaagccgagcaacatccttctgggcggcgacatggagccatggatcggggacctgggcctggaccggctggcgtcgggcgaggcggcgccgcactaccgcgcgggcgcgtcggcgcggctgttcgggagcaagcggtcgatgcactcgacgagcagcctgccggacctgtcacagatgcccgggccgggcgcgagcccgtgcgggtcggcgtccgcggcggccgcggccgccagcgccgccccggcgccgtaccaggcgcccgagtgcctgaagaacctgcggcccacggccaagtgggacgtgtacgccttcggcatggtgctcctggagctgctctccgggcgggtctactcggaggtggagctgtgccagtggcacgcggggctggtggccgccgaggagcacggccgcgtgctccggatggccgaccccacgctccgcggcgaggccgacggccgggaggacgcgctgctggcgtgcttcaggctcgccttcgcgtgctgcgccatggcgcccggcaagcggccctccatgagggacgccgccatggtgctcgagcgaacggcggcggcggcggcgcccggcgccgccgcgagcagcagcggcgccgctgtgccctgagggggaaaaaacaactgaccttgtagcgcttggagccgttactgatcgcaataatcttactgcaagtgcacggacggtggtggcggcgtcggcgttgatcgccggtggcgagcttgtgtggtagggcgtgtacgtagatctgttactgattttggaggtgctgcgagaattaattaacctactaatcatctgtgtttgtgattgtggatttgaaagcgatgcatattccttttttttcgatcttgcgtctcggtggatctcaagatgtgtacttactgtgacagtgtcagtgtctgatggccacacgatcaatgggttcttctga

SEQ ID NO: 80389 - DNA, 768 bp, Zea Mays
ctctatggaacaaaatggttctgttgtgtagcctatggtatagcaccatcttccacctgtttacagccgtttcgtgtgaaaacttctacacaattctgttatcttacttctgtgtggtgctcttgctaaaatgctctggacacgcttccgagacaaaaaaaaaaaagaactaaaatcgttttctcctctttcaggctcctccacgtgccgatgtggtcaataatctgagaaacagtatcgtgcttaacgttgttggaatggctgctgcagttctgggcctgcaggcaactgtaggtgctttggtaggcaaggcactgactacctcattagtgccctactaccaggggataccacctggacagagtcccgttcttgctttagatatcttccttgttcaggcttcagccaacacgatcctttcgcatttccttgggctatccagctcactggagctactacggtctgtaacattgtctcaaacagaagctgccccagtgccaaaaacggcatgagcgagcccgcaaatcctcctgacctgaagagtatatcaccagttttgttgttgttctcatattgtagtccaatgcggatctattgtatccatggatctccgctcgttttgaactacatgagcttaaaacaatctaagcgtctgtttggttggactgggaaaaaagttattgtggtcgcgtgttctgaaaaaaactgttgtatgttgtaagctattaaaagactaaaaattatttggtagaaaccactaaaagctcg

SEQ ID NO: 80390 - DNA, 1812 bp, Zea Mays
gaaattatatctgtaattttaaagatgttttaaagtgaaatagtgtatggctctcacgagtactgttaggtgctaccatgttagtgttaatagtattgacacagcacgattaggcactattggcctgtttggttcccttcttatatgagccaagctgtacttgggcagccaagttccaagtagccaggttgagcgcatgcatatgagcgatgtttggttattgtatgcacgaaacctggttgctcggagatttcgtctggttagcttcatgcaggcatcttctcacactcacagagccactgacatatctgatccacgtgcttgttgcgctcgcgcgagcctggccacatagaaacgaagatttttgccgcatgagtagagcctggctcataagaaaatcctgcactgcgtgagacaggccctaaccttcatccaagcaaccaaacgctcagccactgtacgaaacgggcctggttgtgggttgggtcaggcaaccaaacggctcctatatgtcatgtctgagacgatggatgaacatgtttaattatagacatggcacaccacaattatccgtatctgatattgtcgtgcctaaaacattactgtgttttatagtgttggtgctagtggcgtgctgtggcacgttagccacagcccacgagaactgagcgtgaattaaatgggtaataaaaacgcacgagtcctgttccctgagcgagcgtcgtgggggtgcattcaacctctgaatctagccatctacgatctaccacagaggacgatcgtcatgtacactgtgcagtgtgcacagatcaggacccctgccagaggcacacctgctatgcatccgtgcaatgaattttatcagtgatcccgctgtggaaggaggtggagtacttcaaggagtacaagcggcggctccggcgacacgtggggctcgccggtgcccgtcgcatcgtctccgacgcgctgtacgtggtgagcgtcggcaccaacgacttcctggagaactacttcctgctggtgacggggcggttcgcggagttcacggtgggcgagttcgaggacttcctggtggcgcaggcggagtggttcctgggcgagatccaccggctgggcgcgcggcgggtcgccttcgcggggctcagccccatcggctgcctgcccctggagcgcacgctcaacacgctccgcggcggctgcgtcgaggagtacaaccaggtggcccgggactacaacgccaaggtgctcgacatgctccgccggctcacggcggcgcggccggggctgagggtcgcctacatcgacgtgtaccagaacatgctggacctcatcaccgacccttccacgctggggctggagaacgtggaggaggggtgctgcgccacggggaaggtggagatgtcgtacctgtgcaacgagaagagccccgacacatgcgacgacgcggacaggtacttcttctgggactccttccaccccacccagaaggtgaaccagttcttcgccaagaagacgctggacctgtgctacgaccagctcctgctgtgatgctgatgatgcgccctagagctcagtgtggctacgtttagtccacactccacagtcaaaattgttgctgctaattcgtctccgtgtgtatagcatagctagcattcgatgtgatgtatgtagtagtatatggttgctgtgcctgtctcgatgcgtcgatcgatggattcacgattcttttgggcttaaatgctcataagggagataaaatttacacatttgacgcgagttacaattggttccggccggagccggacgtctttt

SEQ ID NO: 80391 - DNA, 2192 bp, Zea Mays
ttcgtactgaaagcgttggccatgatcgatggcatccggtcctgccgaccccggatgaattcgcgatcaagcaaacgcaccgcgcgcgccgagtaagcatagccgccggccccgctcgggagctagcactggtgctgcgcgccgtgtccgcgcccgcgtgcgctgcagtgctccctactctgttcttgataagacgatcacgacaacacgtcgcgccctaaagcagcagccgccctagccggctagtctcacatcgacgccgcgacgggagtggattggactcttcttctcctccttcttcttcctcttgccgtttcttccactccttggctcgggtccgcgggatcgccgtgcccctgcggcttctttcggccccggacgggatgcaccagatcgggagcggcatgtacgtgtccggccccgcgccggacaggaagcgggagcggcggctgtcgtcggggtcggccgccacgccgccgtacacgggcggggacgtggcgcgctcgggcgagctcggccggatgttcgacatcgccgcgtcgcagtcgcaggcgccgtcgccggcctcctcgcgccgcagctccggcccgctgccccggccctcgccgtcgccggcgtcgggaccgctgtcgcagctctcgcacccggggctcctggtcgggccgtccccgtcccccgcgccctctccgtcgccggcggtcgggtcgtcgaggaaggggagcggcaggaggcgcggcgccgggaacgaggcgggcgcggccgtggcggcgcgcgggacggcgaggctcggcgtcccgttcgcgtgctacgtgctggtggccgtggcggccgcggccgccgtcggcgccggggccttctgcctcgtgtcgtggcgccggtgggaggtcctcgccgcggcgggcggcgcggtggccgccgtcgcggcggtgttcgcgtcgaacgcgtgccggacggcggccgaggcggagaggttcttccgccggttccccgatacggtgttcgacgaccacggcggggacatgcccatcggcgagctcgtcaagatcaccgggcaagttacctgcggtcgccgccccctgggtgccaatttccacgacgccgccaggtgcgtgctcacgtccgttcagctgttcgagcgccgtcgatggggctggtgctgcagccgtcggcggtggcggctgagacactctgaggcacgggtgacgaacttctacatctctgacaggaactcgggcaagagattctacgttcgtgctggtgagagcgccttgatcactcctatgatcaaacagaaaacaatcagctttgacggcgacaagaaggacgcttcacaaaacttgaagagattgttggcaaccaacgagttgtcgtgcaatggagatttgactgttaaagaagggttaatcagagaaggggacacagcaagtgtgataggcatcctgaagaaacaccatgcctgtgacatcgtggatgcaccggccggtgtggtcaccaccggttgccagctgatccggtgcatgttccccgtcttcgttgaagggctcatactgatcggagatgaagaccctgacgaggctgtatatatggtctgaactatagatacatatacatgcatattcatacactaatgtactagaattcacgccctgctgtctatcacggaagaggagttttagtatcttccatgggtttctgataaaagggatttactacttacgtagctgatggagacggaatgatgtaaattaaagtggtatttgtaggttgtcagtagcttagctgtattatttttgggtctctttacaagaggactgctcatttgtttgttggctaagacttgatgtttatgtgcccggtttcttttgaagtttggaatgatcagtttttgtttgttgcaactattgttttttcctgatttgaaacagggtggagccttttcattcttgcaaagtgtttgtcgctctgaacaatgcattcttagagaaagtttctcaaaatagagaaaagtaaacaaaagatatattttgaagaaattcaagatgggctaataggacaatattcaacaagtgatgctaatgtaacagaacaagttaaaatatctgaggcaagagaagcaccaccacaatcacgaaggtcagcaaggcttcgcgagacacgagaggaagtgttgttgttagacaacgatgaacttg

SEQ ID NO: 80392 - DNA, 994 bp, Zea Mays
gggtgccaatttccacgacgccgccaggaactcgggcaagagattctacgttcgtgctggtgagagcgccttgatcactcctatgatcaaacagaaaacaatcagctttgacggcgacaagaaggacgcttcacaaaacttgaagagattgttggcaaccaacgagttgtcgtgcaatggagatttgactgttaaagaagggttaatcagagaaggggacacagcaagtgtgataggcatcctgaagaaacaccatgcctgtgacatcgtggatgcaccggccggtgtggtcaccaccggttgccagctgatccggtgcatgttccccgtcttcgttgaagggctcatactgatcggagatgaagaccctgacgaggctgtatatatggtctgaactatagatacatatacatgcatattcatacactaatgtactagaattcacgccctgctgtctatcacggaagaggagttttagtatcttccatgggtttctgataaaagggatttactacttacgtagctgatggagacggaatgatgtaaattaaagtggtatttgtaggttgtcagtagcttagctgtattatttttgggtctctttacaagaggactgctcatttgtttgttggctaagacttgatgtttatgtgcccggtttcttttgaagtttggaatgatcagtttttgtttgttgcaactattgttttttcctgatttgaaacagggtggagccttttcattcttgcaaagtgtttgtcgctctgaacaatgcattcttagagaaagtttctcaaaatagagaaaagtaaacaaaagatatattttgaagaaattcaagatgggctaataggacaatattcaacaagtgatgctaatgtaacagaacaagttaaaatatctgaggcaagagaagcaccaccacaatcacgaaggtcagcaaggcttcgcgagacacgagaggaagtgttgttgttagacaacgatgaacttg

SEQ ID NO: 80393 - DNA, 2140 bp, Zea Mays
attccacctgtacggctgtaccccaccgccaccacccacggcacgctgcgcgcccaagcaaaccagggagcgcggccgaccgaccagccagacctgcgcaatcgaaaccgatcgactcccctattattggtccccatccccatggggcggcggctgagcgcgaccgccgccgccgcggcggcgtcggcggagccgctcctcccgccggcgctgaagcgcggggtgctgatcgagcggtgcgcgtcgcacgccgacgacgagctgcagtggttccgctcctgcctgcggtgggtgtgcatggaccactcgggcccgggccaggccgcgctgtcctggctcctcttcctcgtcctcgccgccatcgtcccggccgccgcgcacttcctcctcgccttccgcgcctcgcgccgccccttctcggccgtcgtgcagctctcgctctcggccgcctccgccgcgggcttcctctgcctctcctcctccttccgccgcgtcggcctccgccgcctgctccacctcgacaagctccgcagcaagagcgaccgcgtccgggccagctacacggcgcgcctcgccttctccttccgcctcctcgcctccctcgtcgcgccgtgcttcgccgccgaggccgcctacaaggcctggtggtacgccacctccgccgaccgcgtccccttcttcgccaacgacgtcctcagcgacgtcctcgtctgctccctcgagatggcctcctggatgtaccgcagcgccatctacctcctcacctgcgtcctcttccgcctcatctgccacctccaggggctcaggctcgaggacttcgccggctccctgctcgaggaagtcgaggagggccgggccggcgtcgatgccgtgctaagagagcacctcgacattcgcaagcagctcaaggtcatcagccatcgcttccgtaagttcatcgtcgctgcgctgctcatcgccacggccagccagttcgcctccgtgctcctcaccacgcgacgcgactctgtcgacgacctcctcaacaccggcgagctcgcgttagaagcattttggacatgccatggtcgaagagtaggattcctggtactcgcatccttgcacactcgacaaaggttccagcctgtagtactgaaagacccattccagtttcagagtcagactgcgatcatgctgtgttcagttgtgctcatgtccgggctcatcataatcctgagcagcgccgccaagatcacccaccaggcgcaggccctcaccggtcacaccaccaagtggcatgcctgctgcaccatcgagcccgtgctggaggaaggggagcccgggtccaaccagaactccatgatcgaccaagaacccgagagtgacagtgacacagaggacagcgaggagaccggcgacgaagatctcctggagaacaccaagattcatatgccgcacgcgcatgtcatctccttccagaagagacaggcactagtgacatacttggaaaacaacagagccgggatcaccgtgttcggtttcacgctggaccgttcgtacctgcacacgatatttatgctcgagtggactctgttcctgtggctgctcggtaagaccatcggcttctcgtgaagaagacggcgatgaaaagaagagaggtggcctgtgtccaacgtccggatggtcgtttttgagaggtttcgcatgtcgcggttgccctttttggggatggatttggatgtgctttgtttttcggtcatcgtggaagggctttttttcgcgtgagcctggctgttggcacgggagcgttgcgcgtgtacacctcaacgcctgtgtatgatagcgattttgtatgatgtgtgtgtataaattgtgaaccgtaattgtccttgtaaatgagcgttgtacagtcgtacactggtaatgctgttttttacaatctcgttgtaagccaacatgttgtagcgagaatttagattgtaaagataaagattcttgtttttttaaatcttgggagggtatgaaattagttcaagatttgctagtttcttatgtttctcttttctcttttatagatactagatattgttagggccttcgtcttccgaaggtcctcaaaaacataatttaacaatgttttccgagtgtaatacgtgaacag

SEQ ID NO: 80394 - DNA, 1990 bp, Zea Mays
accaatgaaaaggaaaagggaaaaccagacggccaaggcagcccccaaccccggccccagccggcagaccatctcgatacgcggccgccgcagacgagatggccgccggggacgcaggccgcgcgccgacggcagcggccgcgcaatcgctggtggagtccttctgcggcgtgacctccgcgaccccccaggaggcggccttctatctcgagagccacaactgggccctcgaatccgccgttcgctcctactacgactccgtggacggtgaagccgacgccgtcgcggccgatccagtgcccccaccaccagctgcaccagccggaggcggggaggataccgaggatgaggattgcgtggtcggcggtggcggtggcggcgacgacgacgaggatgatgaggactacgtcgatggcgacggcagcgatgatgaggacgctgcgctcgcggctgaggccgcggaggaagaggagaggaggaggcctttcaagaggctgaagagaacccacgacgcgcggggtgggagcggtagcagtgccaaggcgcgggggaatgtgaggacgctcgccgatctcgatagtggcaagggaaccgcgggttccgacgagaactccgaagacgatgatgaatggacaccaccgcccgagtacgagacgagagatcgatcaagacgtaaaaacaacacagatgagatcttcaagcaagctaaaaagaagggggctaagcaaggtccgtttgaggctcgtccgcgatctagttcgaggaactttactgggactggtagacttctgacaggtgaaactgtagagcgtaatgcatcacagccaccagaagaaattacccataacatccacttctggaggaatggcttcacagtaaacgatggtccacttagaagttttgatgatccagcaaatgcaccctttttaaaggattctgactgcccaactgagcttgtgccggctgatgagaaatctatagtgaatgtgaatcttgtccggacggaagaagaatttactgagccagtcaagcgtgctgctccttttgaaggggaacgaagaaacctcatggaaccttctgataataatacttccaatgctgctgctgctgctgctgcttccagtagtgcaactgcttctcggacaatcacagtggacgattctttgccatcaacctccctccaaatcaggttcgcagacggcagtcgcttggttgcccgtttcaacacaagccacaggattagtgacgtgcgggcatttatcgacgcgacaaggccaggagccagtgattacacgctgcaggccgggttccccccaaagccgcttgaagacacggccaagaccatcgaggaagccggcgtggccaactcggtaatcattcagtcagtctagcttggcagaacaggtgccgcaaccctattccatcgaacacgctaggcatctgaagctaccaccttccttgatcttccttcattttgtttctcaaacctggcttttaaccttttatcttcatccagtagctacttctggtattgcgagtgtaaaacagtgaggtctgggtgtcctacatcttattcatctatagcatatatagtactacttgttgcatacagtactacttttgcttgtctccttcagcgtttggtcggttaaagtgccctcttgttcttgtctcattccctggttggtagaatgtcggcacctgtggacaaagttagttgcaccagatggtccttattgcggtttagcgatgtccggacgattgcaatctgtaaggcgagtccttgtccaggttacgcatgttcacaagttacgttggcgttctttcttggtgctgcataatgaacgggtctcgtcgatcgctagtcttttttcaatgctaaagataccattcatgttctacttttgtttgaccattacttgcgctcccattccagttgtgcgttgctatctggtgaccgcccattccgttaaagtgtggaatgtagatg

SEQ ID NO: 80395 - DNA, 2775 bp, Zea Mays
accaatgaaaaggaaaagggaaaaccagacggccaaggcagcccccaaccccggccccagccggcagaccatctcgatacgcggccgccgcagacgagatggccgccggggacgcaggccgcgcgccgacggcagcggccgcgcaatcgctggtggagtccttctgcggcgtgacctccgcgaccccccaggaggcggccttctatctcgagagccacaactgggccctcgaatccgccgttcgctcctactacgactccgtggacggtgaagccgacgccgtcgcggccgatccagtgcccccaccaccagctgcaccagccggaggcggggaggataccgaggatgaggattgcgtggtcggcggtggcggtggcggcgacgacgacgaggatgatgaggactacgtcgatggcgacggcagcgatgatgaggacgctgcgctcgcggctgaggccgcggaggaagaggagaggaggaggcctttcaagaggctgaagagaacccacgacgcgcggggtgggagcggtagcagtgccaaggcgcgggggaatgtgaggacgctcgccgatctcgatagtggcaagggaaccgcgggttccgacgagaactccgaagacgatgatgaatggacaccaccgcccgagtacgagacgagagatcgatcaagacgtaaaaacaacacagatgagatcttcaagcaagctaaaaagaagggggctaagcaagagcgtaatgcatcacagccaccagaagaaattacccataacatccacttctggaggaatggcttcacagtaaacgatggtccacttagaagttttgatgatccagcaaatgcaccctttttaaaggtaaagaactctgttctgtgctactgtgcttattagttatcacatttctgattttactatgcctaattttatgttaggcaccacccactttttcttcaaacatatatatatatatatagcctgttcacccttattttcaatccaggatgtagttaatgtttttgtcctgttggcatgtatcctggtactgtgcaatgtgtgtcagactttatattgaaaaatagatttcggagtaacgagtgagaagaatcaaggggtcatatggaacagtattttgtttcacttggaataagtattattacttctctgctggttttcatcataatggttgacaacggttctgtttttagactggtcccctaataattatatatgaatggtgcaggacctgtttggtaggtgtgagagggaagtttttaatagccagtagcttcaaatttcctacaagggggcagattgtttctgttaactcaatctaactcaaaattcgaaataacactttggcctaaattaatcaagttttgtgaatcaaccaattcgagcataggtcaagggatcaagatttaagcaaatgtttaatcgtatcgagttctatatacttattaagcacttacctcatatatgaaggttccaccaggtactcaaagtggagtggaaggagggccatggtattttttttccttaaaacttcttaagtagtgttgcaaactcagggcctcttggctctggactaggcacaaaagccttaaattgtagacagaaggtaaactgtagatggaaggcggatagtgtatgtttcaacattaataagatattttttggtacattgtcgtttactgtcttttattatcccattcagtctgttgttattcttagctttttcttgtttagtttgtggcactgcatgttagtttcttttccccttcatatttctttttactagagcatcaaggattctgactgcccaactgagcttgtgccggctgatgagaaatctatagtgaatgtgaatcttgtccggacggaagaagaatttactgagccagtcaagcgtgctgctccttttgaaggggaacgaagaaacctcatggaaccttctgataataatacttccaatgctgctgctgctgctgctgcttccagtagtgcaactgcttctcggacaatcacagtggacgattctttgccatcaacctccctccaaatcaggagccagtgattacacgctgcaggccgggttccccccaaagccgcttgaagacacggccaagaccatcgaggaagccggcgtggccaactcggtaatcattcagtcagtctagcttggcagaacaggtgccgcaaccctattccatcgaacacgctaggcatctgaagctaccaccttccttgatcttccttcattttgtttctcaaacctggcttttaaccttttatcttcatccagtagctacttctggtattgcgagtgtaaaacagtgaggtctgggtgtcctacatcttattcatctatagcatatatagtactacttgttgcatacagtactacttttgcttgtctccttcagcgtttggtcggttaaagtgccctcttgttcttgtctcattccctggttggtagaatgtcggcacctgtggacaaagttagttgcaccagatggtccttattgcggtttagcgatgtccggacgattgcaatctgtaaggcgagtccttgtccaggttacgcatgttcacaagttacgttggcgttctttcttggtgctgcataatgaacgggtctcgtcgatcgctagtcttttttcaatgctaaagataccattcatgttctacttttgtttgaccattacttgcgctcccattccagttgtgcgttgctatctggtgaccgcccattccgttaaagtgtggaatgtagatg

SEQ ID NO: 80396 - DNA, 1837 bp, Zea Mays
accaatgaaaaggaaaagggaaaaccagacggccaaggcagcccccaaccccggccccagccggcagaccatctcgatacgcggccgccgcagacgagatggccgccggggacgcaggccgcgcgccgacggcagcggccgcgcaatcgctggtggagtccttctgcggcgtgacctccgcgaccccccaggaggcggccttctatctcgagagccacaactgggccctcgaatccgccgttcgctcctactacgactccgtggacggtgaagccgacgccgtcgcggccgatccagtgcccccaccaccagctgcaccagccggaggcggggaggataccgaggatgaggattgcgtggtcggcggtggcggtggcggcgacgacgacgaggatgatgaggactacgtcgatggcgacggcagcgatgatgaggacgctgcgctcgcggctgaggccgcggaggaagaggagaggaggaggcctttcaagaggctgaagagaacccacgacgcgcggggtgggagcggtagcagtgccaaggcgcgggggaatgtgaggacgctcgccgatctcgatagtggcaagggaaccgcgggttccgacgagaactccgaagacgatgatgaatggacaccaccgcccgagtacgagacgagagatcgatcaagacgtaaaaacaacacagatgagatcttcaagcaagctaaaaagaagggggctaagcaagagcgtaatgcatcacagccaccagaagaaattacccataacatccacttctggaggaatggcttcacagtaaacgatggtccacttagaagttttgatgatccagcaaatgcaccctttttaaagagcatcaaggattctgactgcccaactgagcttgtgccggctgatgagaaatctatagtgaatgtgaatcttgtccggacggaagaagaatttactgagccagtcaagcgtgctgctccttttgaaggggaacgaagaaacctcatggaaccttctgataataatacttccaatgctgctgctgctgctgctgcttccagtagtgcaactgcttctcggacaatcacagtggacgattctttgccatcaacctccctccaaatcaggccaggagccagtgattacacgctgcaggccgggttccccccaaagccgcttgaagacacggccaagaccatcgaggaagccggcgtggccaactcggtaatcattcagtcagtctagcttggcagaacaggtgccgcaaccctattccatcgaacacgctaggcatctgaagctaccaccttccttgatcttccttcattttgtttctcaaacctggcttttaaccttttatcttcatccagtagctacttctggtattgcgagtgtaaaacagtgaggtctgggtgtcctacatcttattcatctatagcatatatagtactacttgttgcatacagtactacttttgcttgtctccttcagcgtttggtcggttaaagtgccctcttgttcttgtctcattccctggttggtagaatgtcggcacctgtggacaaagttagttgcaccagatggtccttattgcggtttagcgatgtccggacgattgcaatctgtaaggcgagtccttgtccaggttacgcatgttcacaagttacgttggcgttctttcttggtgctgcataatgaacgggtctcgtcgatcgctagtcttttttcaatgctaaagataccattcatgttctacttttgtttgaccattacttgcgctcccattccagttgtgcgttgctatctggtgaccgcccattccgttaaagtgtggaatgtagatg

SEQ ID NO: 80397 - DNA, 3234 bp, Zea Mays
gtcctcttatacaattgtacatgtcccaaatggaacggacggttcggctctcatctgatcctagcacgatttaacacggcataatagagggcactattaatctgataaaaggatcgcgccactatatgagtagagagaatccaacgatagaaaaaaagtatcgaaccgcatttatgaatccagttctaggtggtgtcactcatacccatgctgacagtgtacaccgaatatatggcctagacacaaacacggtatggaacatgccagaccagaccagacccgtgccggtccagcatcggtggtgttcgagtgcgatgcgagacccctgccgcactccaaatttggtcacgccgaccgtcgtcctctccgctctacctgttcattctctcttctgttccctcctccctcccagtcccagctggcagcagcacagcagacagagagagtgagctttgccgacaccacactgcatcccattccctcggctgtcgctgatggatgatagatagagctgcggaggagcagggtgagggggaggtgctgccgcccacggtgatcatctctatggccgtgtagaggagcactgcagccggaagagattattcagagagagagagagagagagagagagagagagagagagagagagagagaagggaagcatgaagccaagaaccgcgacactggccgccggcctcctccagctcgtcgcgcttgcggcggtggcggaagccgacaccgacgccggcgacgttgccgccctggggaacctctacagctcctggaacagcccggcgcgcctcgccggctggtccgccagcggcggcgacccctgcggcgccgcgtggacgggcgtctcctgctcgggctccgccgtcacctcaatcaagctttctggtatggagctgaacggcactcttggctatcagttgtcaagcctgcaggctctgaaaacgatggacttgagcaacaactacttgcacgattcaattccttaccagctgccatcaaaccttacctatctgaacctggcgaaaaacaacttctctggtaatcttccgtactctatatccaacctggtctcgcttgagtacctcaacctcagccacaactcgttgtttcaggaaatcggagaactgtttggaagcctcagttcactctcagaactagacatatctttcaacaacctcacggggaatcttcctttctcaatgggctccctgtcaaaactttctagcctttatatgcaaaacaatcagctgtcgggcacagttgatgtcatcagcaacataagccttgcgacactagatattgcaagcaacaatttcagcggcatgataccccaagagttcagctcgatcccaaacctaatagttgcaggaaactcatttgtcaatatgcctgcctccccgccacaagctctgacgccacctccgaatccacgtggccggccagacgatcgtcggggaccaaccagcgctccaactgtcccggagactcccattgacccggacgacaagaagatgcaaacgggacctcttgtagggatagctgttggctcaatagctgctgcctcgtgcgttcttttcgcgctggtgttgtgcctccacaacgcacggaaaaaacccgatgatgggagcagtgaagcgaaagcgtctagcagggaagtcatggacagtagccatgacaacgctgctgtggcaacttcagacctccaactgatccagcctgctggaaagatgactccggacgacagagcgcatggtccaaacggttgtaccgccaaaaggccaaagcagcaggttactgtgacgacagtgagttcctacacagttgctgctctccaagtcgctacgaacagcttctgccaagactctctcctaggcgagggctcgcttgggcgtgtttacaaggctgtttttcctaacgggaaggtacttgctgtgaagaagatagacagcgcttcgctgtctctgtacgaagaagacaactttctcgcggttgtgtcgaacgtgtcccggctcaggcatccaaacatcgtgccccttgcaggctactgcgtggagcacgggcagaggctccttgcgtacgagtacgtcgggaacggaacgctgcatgacatgctgcacttctctgacgacgacgggatgacgatgccgggcaagactactaggctcgcatggaacacccgcgcgaggatagcgctaggcaccgcgcgcgctctagagtacctgcatgaggtgtgcctgcccccggtggtgcacagggccttcaagtcatcaaacatcctgctcgacgacgagtacagcccgcgtctgtccgactgtgggctcgctgctctgtcgccgaaccctgagactgagagggaggctttcgctggagtggttggctccttcggatacagcgcccctgagttcgccatgtcagggacgtacactgccaagagtgacgtgtacagtttcggggtagtgatgctggagctgttgaccggccgcaagccgctagacagctccagggagaggtcggaacagtctcttgtgagatgggcgaccccgcagctccacgacatcgatctgctcgccaagatggtcgatcctgcactggatgggctgtaccctgccaagtccctctcccgtttcgccgacataatcgccatctgcgtccagtcggagccggagttccggccgccgatgtccgaagtcgtgcagcagctggtgcgcctgatgcagcgggcgagcatcgtgaggcgacaatcggacgaccagctgggctactcgtacagggttcccgagcgcgacggcggcgaccaaagctggcgtacactcctactcctacacaaagcgctgcacagtttatatatattcataaacaaaagagcgagcaaaagaaaagaaaagcagttggatatggatggatccttcacgttttgttaaaaagtcacccgtaaacgacatatatgtatagggtttgcagcgtactgggacgtttcttcgtgagctgcgagtgtcatgtatagtgtgcgctcttgccagtggtagatatataggataggagaaaaaaaaacgtgtcttcttttgttggtgtgttcagttcttcgaccatacacgccagccgcagacggtgacctctgcagccttgctttgcggcgagaggcaaggcagttttctccggtttgcgatgcggcaattcagcgggcgccttgtggcttatcgcatggaacggaacggattacgg

SEQ ID NO: 80398 - DNA, 3308 bp, Zea Mays
cccaaatggaacggacggttcggctctcatctgatcctagcacgatttaacacggcataatagagggcactattaatctgataaaaggatcgcgccactatatgagtagagagaatccaacgatagaaaaaaagtatcgaaccgcatttatgaatccagttctaggtggtgtcactcatacccatgctgacagtgtacaccgaatatatggcctagacacaaacacggtatggaacatgccagaccagaccagacccgtgccggtccagcatcggtggtgttcgagtgcgatgcgagacccctgccgcactccaaatttggtcacgccgaccgtcgtcctctccgctctacctgttcattctctcttctgttccctcctccctcccagtcccagctggcagcagcacagcagacagagagagtgagctttgccgacaccacactgcatcccattccctcggctgtcgctgatggatgatagatagagctgcggaggagcagggtgagggggaggtgctgccgcccacggtgatcatctctatggccgtgtagaggagcactgcagccggaagagattattcagacacactcacacacacacacacacacacacacacacacacagagagagagagagagagagagagagagagagagagagagagagagagagagagagagagagagagagagagagagagagagagagagagagagaagggaagcatgaagccaagaaccgcgacactggccgccggcctcctccagctcgtcgcgcttgcggcggtggcggaagccgacaccgacgccggcgacgttgccgccctggggaacctctacagctcctggaacagcccggcgcgcctcgccggctggtccgccagcggcggcgacccctgcggcgccgcgtggacgggcgtctcctgctcgggctccgccgtcacctcaatcaagctttctggtatggagctgaacggcactcttggctatcagttgtcaagcctgcaggctctgaaaacgatggacttgagcaacaactacttgcacgattcaattccttaccagctgccatcaaaccttacctatctgaacctggcgaaaaacaacttctctggtaatcttccgtactctatatccaacctggtctcgcttgagtacctcaacctcagccacaactcgttgtttcaggaaatcggagaactgtttggaagcctcagttcactctcagaactagacatatctttcaacaacctcacggggaatcttcctttctcaatgggctccctgtcaaaactttctagcctttatatgcaaaacaatcagctgtcgggcacagttgatgtcatcagcaacataagccttgcgacactagatattgcaagcaacaatttcagcggcatgataccccaagagttcagctcgatcccaaacctaatgtatgcgcaaagttgcaggaaactcatttgtcaatatgcctgcctccccgccacaagctctgacgccacctccgaatccacgtggccggccagacgatcgtcggggaccaaccagcgctccaactgtcccggagactcccattgacccggacgacaagaagatgcaaacgggacctcttgtagggatagctgttggctcaatagctgctgcctcgtgcgttcttttcgcgctggtgttgtgcctccacaacgcacggaaaaaacccgatgatgggagcagtgaagcgaaagcgtctagcagggaagtcatggacagtagccatgacaacgctgctgtggcaacttcagacctccaactgatccagcctgctggaaagatgactccggacgacagagcgcatggtccaaacggttgtaccgccaaaaggccaaagcagcaggttactgtgacgacagtgagttcctacacagttgctgctctccaagtcgctacgaacagcttctgccaagactctctcctaggcgagggctcgcttgggcgtgtttacaaggctgtttttcctaacgggaaggtacttgctgtgaagaagatagacagcgcttcgctgtctctgtacgaagaagacaactttctcgcggttgtgtcgaacgtgtcccggctcaggcatccaaacatcgtgccccttgcaggctactgcgtggagcacgggcagaggctccttgcgtacgagtacgtcgggaacggaacgctgcatgacatgctgcacttctctgacgacgacgggatgacgatgccgggcaagactactaggctcgcatggaacacccgcgcgaggatagcgctaggcaccgcgcgcgctctagagtacctgcatgaggtgtgcctgcccccggtggtgcacagggccttcaagtcatcaaacatcctgctcgacgacgagtacagcccgcgtctgtccgactgtgggctcgctgctctgtcgccgaaccctgagactgagagggaggctttcgctggagtggttggctccttcggatacagcgcccctgagttcgccatgtcagggacgtacactgccaagagtgacgtgtacagtttcggggtagtgatgctggagctgttgaccggccgcaagccgctagacagctccagggagaggtcggaacagtctcttgtgagatgggcgaccccgcagctccacgacatcgatctgctcgccaagatggtcgatcctgcactggatgggctgtaccctgccaagtccctctcccgtttcgccgacataatcgccatctgcgtccagtcggagccggagttccggccgccgatgtccgaagtcgtgcagcagctggtgcgcctgatgcagcgggcgagcatcgtgaggcgacaatcggacgaccagctgggctactcgtacagggttcccgagcgcgacggcggcgaccaaagctggcgtacactcctactcctacacaaagcgctgcacagtttatatatattcataaacaaaagagcgagcaaaagaaaagaaaagcagttggatatggatggatccttcacgttttgttaaaaagtcacccgtaaacgacatatatgtatagggtttgcagcgtactgggacgtttcttcgtgagctgcgagtgtcatgtatagtgtgcgctcttgccagtggtagatatataggataggagaaaaaaaaacgtgtcttcttttgttggtgtgttcagttcttcgaccatacacgccagccgcagacggtgacctctgcagccttgctttgcggcgagaggcaaggcagttttctccggtttgcgatgcggcaattcagcgggcgccttgtggcttatcgcatggaacggaacggattacgg

SEQ ID NO: 80399 - DNA, 2465 bp, Zea Mays
gataaaaggatcgcgccactatatgagtagagagaatccaacgatagaaaaaaagtatcgaaccgcatttatgaatccagttctaggtggtgtcactcatacccatgctgacagtgtacaccgaatatatggcctagacacaaacacggtatggaacatgccagaccagaccagacccgtgccggtccagcatcggtggtgttcgagtgcgatgcgagacccctgccgcactccaaatttggtcacgccgaccgtcgtcctctccgctctacctgttcattctctcttctgttccctcctccctcccagtcccagctggcagcagcacagcagacagagagagtgagctttgccgacaccacactgcatcccattccctcggctgtcgctgatggatgatagatagagctgcggaggagcagggtgagggggaggtgctgccgcccacggtgatcatctctatggccgtgtagaggagcactgcagccggaagagattattcagagagagagagagagagagagagagagagagagagagagagagagagaagggaagcatgaagccaagaaccgcgacactggccgccggcctcctccagctcgtcgcgcttgcggcggtggcggaagccgacaccgacgccggcgacgttgccgccctggggaacctctacagctcctggaacagcccggcgcgcctcgccggctggtccgccagcggcggcgacccctgcggcgccgcgtggacgggcgtctcctgctcgggctccgccgtcacctcaatcaagctttctggtatggagctgaacggcactcttggctatcagttgtcaagcctgcaggctctgaaaacgatggacttgagcaacaactacttgcacgattcaattccttaccagctgccatcaaaccttacctatctgaacctggcgaaaaacaacttctctggtaatcttccgtactctatatccaacctggtctcgcttgagtacctcaacctcagccacaactcgttgtttcaggaaatcggagaactgtttggaagcctcagttcactctcagaactagacatatctttcaacaacctcacggggaatcttcctttctcaatgggctccctgtcaaaactttctagcctttatatgcaaaacaatcagctgtcgggcacagttgatgtcatcagcaacataagccttgcgacactagatattgcaagcaacaatttcagcggcatgataccccaagagttcagctcgatcccaaacctaatgtatgcgcaaagttgcaggaaactcatttgtcaatatgcctgcctccccgccacaagctctgacgccacctccgaatccacgtggccggccagacgatcgtcggggaccaaccagcgctccaactgtcccggagactcccattgacccggacgacaagaagatgcaaacgggacctcttgtagggatagctgttggctcaatagctgctgcctcgtgcgttcttttcgcgctggtgttgtgcctccacaacgcacggaaaaaacccgatgatgggagcagtgaagcgaaaggtattgcgggttcgcatctagtagtgactacgtctagcagggaagtcatggacagtagccatgacaacgctgctgtggcaacttcagacctccaactgatccagcctgctggaaagatgactccggacgacagagcgcatggtccaaacggttgtaccgccaaaaggccaaagcagcaggttactgtgacgacagtgagttcctacacagttgctgctctccaagtcgctacgaacagcttctgccaagactctctcctaggcgagggctcgcttgggcgtgtttacaaggctgtttttcctaacgggaaggtacttgctgtgaagaagatagacagcgcttcgctgtctctgtacgaagaagacaactttctcgcggttgtgtcgaacgtgtcccggctcaggcatccaaacatcgtgccccttgcaggctactgcgtggagcacgggcagaggctccttgcgtacgagtacgtcgggaacggaacgctgcatgacatgctgcacttctctgacgacgacgggatgacgatgccgggcaagactactaggctcgcatggaacacccgcgcgaggatagcgctaggcaccgcgcgcgctctagagtacctgcatgaggtgtgcctgcccccggtggtgcacagggccttcaagtcatcaaacatcctgctcgacgacgagtacagcccgcgtctgtccgactgtgggctcgctgctctgtcgccgaaccctgagactgagagggaggctttcgctggagtggttggctccttcggatacagcgcccctgagttcgccatgtcagggacgtacactgccaagagtgacgtgtacagtttcggggtagtgatgctggagctgttgaccggccgcaagccgctagacagctgtacgcgtgcgcgtgtg

SEQ ID NO: 80400 - DNA, 3253 bp, Zea Mays
gataaaaggatcgcgccactatatgagtagagagaatccaacgatagaaaaaaagtatcgaaccgcatttatgaatccagttctaggtggtgtcactcatacccatgctgacagtgtacaccgaatatatggcctagacacaaacacggtatggaacatgccagaccagaccagacccgtgccggtccagcatcggtggtgttcgagtgcgatgcgagacccctgccgcactccaaatttggtcacgccgaccgtcgtcctctccgctctacctgttcattctctcttctgttccctcctccctcccagtcccagctggcagcagcacagcagacagagagagtgagctttgccgacaccacactgcatcccattccctcggctgtcgctgatggatgatagatagagctgcggaggagcagggtgagggggaggtgctgccgcccacggtgatcatctctatggccgtgtagaggagcactgcagccggaagagattattcagacacactcacacacacacacacacacacacacacacacacagagagagagagagagagagagagagagagagagagagagagagagagagagagagagagagagagagagagagagagagagagagagagagagaagggaagcatgaagccaagaaccgcgacactggccgccggcctcctccagctcgtcgcgcttgcggcggtggcggaagccgacaccgacgccggcgacgttgccgccctggggaacctctacagctcctggaacagcccggcgcgcctcgccggctggtccgccagcggcggcgacccctgcggcgccgcgtggacgggcgtctcctgctcgggctccgccgtcacctcaatcaagctttctggtatggagctgaacggcactcttggctatcagttgtcaagcctgcaggctctgaaaacgatggacttgagcaacaactacttgcacgattcaattccttaccagctgccatcaaaccttacctatctgaacctggcgaaaaacaacttctctggtaatcttccgtactctatatccaacctggtctcgcttgagtacctcaacctcagccacaactcgttgtttcaggaaatcggagaactgtttggaagcctcagttcactctcagaactagacatatctttcaacaacctcacggggaatcttcctttctcaatgggctccctgtcaaaactttctagcctttatatgcaaaacaatcagctgtcgggcacagttgatgtcatcagcaacataagccttgcgacactagatattgcaagcaacaatttcagcggcatgataccccaagagttcagctcgatcccaaacctaatagttgcaggaaactcatttgtcaatatgcctgcctccccgccacaagctctgacgccacctccgaatccacgtggccggccagacgatcgtcggggaccaaccagcgctccaactgtcccggagactcccattgacccggacgacaagaagatgcaaacgggacctcttgtagggatagctgttggctcaatagctgctgcctcgtgcgttcttttcgcgctggtgttgtgcctccacaacgcacggaaaaaacccgatgatgggagcagtgaagcgaaaggtattgcgggttcgcatctagtagtgactacgtctagcagggaagtcatggacagtagccatgacaacgctgctgtggcaacttcagacctccaactgatccagcctgctggaaagatgactccggacgacagagcgcatggtccaaacggttgtaccgccaaaaggccaaagcagcaggttactgtgacgacagtgagttcctacacagttgctgctctccaagtcgctacgaacagcttctgccaagactctctcctaggcgagggctcgcttgggcgtgtttacaaggctgtttttcctaacgggaaggtacttgctgtgaagaagatagacagcgcttcgctgtctctgtacgaagaagacaactttctcgcggttgtgtcgaacgtgtcccggctcaggcatccaaacatcgtgccccttgcaggctactgcgtggagcacgggcagaggctccttgcgtacgagtacgtcgggaacggaacgctgcatgacatgctgcacttctctgacgacgacgggatgacgatgccgggcaagactactaggctcgcatggaacacccgcgcgaggatagcgctaggcaccgcgcgcgctctagagtacgtacctgcatgaggtgtgcctgcccccggtggtgcacagggccttcaagtcatcaaacatcctgctcgacgacgagtacagcccgcgtctgtccgactgtgggctcgctgctctgtcgccgaaccctgagactgagagggaggctttcgctggagtggttggctccttcggatacagcgcccctgagttcgccatgtcagggacgtacactgccaagagtgacgtgtacagtttcggggtagtgatgctggagctgttgaccggccgcaagccgctagacagctccagggagaggtcggaacagtctcttgtgagatgggcgaccccgcagctccacgacatcgatctgctcgccaagatggtcgatcctgcactggatgggctgtaccctgccaagtccctctcccgtttcgccgacataatcgccatctgcgtccagtcggagccggagttccggccgccgatgtccgaagtcgtgcagcagctggtgcgcctgatgcagcgggcgagcatcgtgaggcgacaatcggacgaccagctgggctactcgtacagggttcccgagcgcgacggcggcgaccaaagctggcgtacactcctactcctacacaaagcgctgcacagtttatatatattcataaacaaaagagcgagcaaaagaaaagaaaagcagttggatatggatggatccttcacgttttgttaaaaagtcacccgtaaacgacatatatgtatagggtttgcagcgtactgggacgtttcttcgtgagctgcgagtgtcatgtatagtgtgcgctcttgccagtggtagatatataggataggagaaaaaaaaacgtgtcttcttttgttggtgtgttcagttcttcgaccatacacgccagccgcagacggtgacctctgcagccttgctttgcggcgagaggcaaggcagttttctccggtttgcgatgcggcaattcagcgggcgccttgtggcttatcgcatggaacggaacggattacgg

SEQ ID NO: 80401 - DNA, 2718 bp, Zea Mays
atgactataaggacgtcggtgccggtgcttgctctctatctttttcgcccacccacttcggtcactttggatttatctgaacctttttctcgtgctgcttgcttgcttgcttgctgaaaagtttgttagtggtgcctagcatttacaagtactcaaactcaagtacatccatccactgctgctgccgccacgcttttccaccaaaaaaaattgggccgccaatgctgttatgggccaaacggctatttataataacgatcacaacactgtacagctggtcctggagataatatatgatactcacaacgcactgctttttcatgcgtgctatgatgagagcgatggccacgcattgtgttcttcagctccgcaagctttctggtatggagctgaacggcactcttggctatcagttgtcaagcctgcaggctctgaaaacgatggacttgagcaacaactacttgcacgattcaattccttaccagctgccatcaaaccttacctatctgaacctggcgaaaaacaacttctctggtaatcttccgtactctatatccaacctggtctcgcttgagtacctcaacctcagccacaactcgttgtttcaggaaatcggagaactgtttggaagcctcagttcactctcagaactagacatatctttcaacaacctcacggggaatcttcctttctcaatgggctccctgtcaaaactttctagcctttatatgcaaaacaatcagctgtcgggcacagttgatgtcatcagcaacataagccttgcgacactagatattgcaagcaacaatttcagcggcatgataccccaagagttcagctcgatcccaaacctaatagttgcaggaaactcatttgtcaatatgcctgcctccccgccacaagctctgacgccacctccgaatccacgtggccggccagacgatcgtcggggaccaaccagcgctccaactgtcccggagactcccattgacccggacgacaagaagatgcaaacgggacctcttgtagggatagctgttggctcaatagctgctgcctcgtgcgttcttttcgcgctggtgttgtgcctccacaacgcacggaaaaaacccgatgatgggagcagtgaagcgaaagcgtctagcagggaagtcatggacagtagccatgacaacgctgctgtggcaacttcagacctccaactgatccagcctgctggaaagatgactccggacgacagagcgcatggtccaaacggttgtaccgccaaaaggccaaagcagcaggttactgtgacgacagtgagttcctacacagttgctgctctccaagtcgctacgaacagcttctgccaagactctctcctaggcgagggctcgcttgggcgtgtttacaaggctgtttttcctaacgggaaggtacttgctgtgaagaagatagacagcgcttcgctgtctctgtacgaagaagacaactttctcgcggttgtgtcgaacgtgtcccggctcaggcatccaaacatcgtgccccttgcaggctactgcgtggagcacgggcagaggctccttgcgtacgagtacgtcgggaacggaacgctgcatgacatgctgcacttctctgacgacgacgggatgacgatgccgggcaagactactaggctcgcatggaacacccgcgcgaggatagcgctaggcaccgcgcgcgctctagagtacctgcatgaggtgtgcctgcccccggtggtgcacagggccttcaagtcatcaaacatcctgctcgacgacgagtacagcccgcgtctgtccgactgtgggctcgctgctctgtcgccgaaccctgagactgagagggaggctttcgctggagtggttggctccttcggatacagcgcccctgagttcgccatgtcagggacgtacactgccaagagtgacgtgtacagtttcggggtagtgatgctggagctgttgaccggccgcaagccgctagacagctccagggagaggtcggaacagtctcttgtgagatgggcgaccccgcagctccacgacatcgatctgctcgccaagatggtcgatcctgcactggatgggctgtaccctgccaagtccctctcccgtttcgccgacataatcgccatctgcgtccagtcggagccggagttccggccgccgatgtccgaagtcgtgcagcagctggtgcgcctgatgcagcgggcgagcatcgtgaggcgacaatcggacgaccagctgggctactcgtacagggttcccgagcgcgacggcggcgaccaaagctggcgtacactcctactcctacacaaagcgctgcacagtttatatatattcataaacaaaagagcgagcaaaagaaaagaaaagcagttggatatggatggatccttcacgttttgttaaaaagtcacccgtaaacgacatatatgtatagggtttgcagcgtactgggacgtttcttcgtgagctgcgagtgtcatgtatagtgtgcgctcttgccagtggtagatatataggataggagaaaaaaaaacgtgtcttcttttgttggtgtgttcagttcttcgaccatacacgccagccgcagacggtgacctctgcagccttgctttgcggcgagaggcaaggcagttttctccggtttgcgatgcggcaattcagcgggcgccttgtggcttatcgcatggaacggaacggattacgg

SEQ ID NO: 80402 - DNA, 2376 bp, Zea Mays
cacgcattgtgttcttcagctccgcaagctttctggtatggagctgaacggcactcttggctatcagttgtcaagcctgcaggctctgaaaacgatggacttgagcaacaactacttgcacgattcaattccttaccagctgccatcaaaccttacctatctgaacctggcgaaaaacaacttctctggtaatcttccgtactctatatccaacctggtctcgcttgagtacctcaacctcagccacaactcgttgtttcaggaaatcggagaactgtttggaagcctcagttcactctcagaactagacatatctttcaacaacctcacggggaatcttcctttctcaatgggctccctgtcaaaactttctagcctttatatgcaaaacaatcagctgtcgggcacagttgatgtcatcagcaacataagccttgcgacactagatattgcaagcaacaatttcagcggcatgataccccaagagttcagctcgatcccaaacctaatagttgcaggaaactcatttgtcaatatgcctgcctccccgccacaagctctgacgccacctccgaatccacgtggccggccagacgatcgtcggggaccaaccagcgctccaactgtcccggagactcccattgacccggacgacaagaagatgcaaacgggacctcttgtagggatagctgttggctcaatagctgctgcctcgtgcgttcttttcgcgctggtgttgtgcctccacaacgcacggaaaaaacccgatgatgggagcagtgaagcgaaagcgtctagcagggaagtcatggacagtagccatgacaacgctgctgtggcaacttcagacctccaactgatccagcctgctggaaagatgactccggacgacagagcgcatggtccaaacggttgtaccgccaaaaggccaaagcagcaggttactgtgacgacagtgagttcctacacagttgctgctctccaagtcgctacgaacagcttctgccaagactctctcctaggcgagggctcgcttgggcgtgtttacaaggctgtttttcctaacgggaaggtacttgctgtgaagaagatagacagcgcttcgctgtctctgtacgaagaagacaactttctcgcggttgtgtcgaacgtgtcccggctcaggcatccaaacatcgtgccccttgcaggctactgcgtggagcacgggcagaggctccttgcgtacgagtacgtcgggaacggaacgctgcatgacatgctgcacttctctgacgacgacgggatgacgatgccgggcaagactactaggctcgcatggaacacccgcgcgaggatagcgctaggcaccgcgcgcgctctagagtacgtacctgcatgaggtgtgcctgcccccggtggtgcacagggccttcaagtcatcaaacatcctgctcgacgacgagtacagcccgcgtctgtccgactgtgggctcgctgctctgtcgccgaaccctgagactgagagggaggctttcgctggagtggttggctccttcggatacagcgcccctgagttcgccatgtcagggacgtacactgccaagagtgacgtgtacagtttcggggtagtgatgctggagctgttgaccggccgcaagccgctagacagctccagggagaggtcggaacagtctcttgtgagatgggcgaccccgcagctccacgacatcgatctgctcgccaagatggtcgatcctgcactggatgggctgtaccctgccaagtccctctcccgtttcgccgacataatcgccatctgcgtccagtcggagccggagttccggccgccgatgtccgaagtcgtgcagcagctggtgcgcctgatgcagcgggcgagcatcgtgaggcgacaatcggacgaccagctgggctactcgtacagggttcccgagcgcgacggcggcgaccaaagctggcgtacactcctactcctacacaaagcgctgcacagtttatatatattcataaacaaaagagcgagcaaaagaaaagaaaagcagttggatatggatggatccttcacgttttgttaaaaagtcacccgtaaacgacatatatgtatagggtttgcagcgtactgggacgtttcttcgtgagctgcgagtgtcatgtatagtgtgcgctcttgccagtggtagatatataggataggagaaaaaaaaacgtgtcttcttttgttggtgtgttcagttcttcgaccatacacgccagccgcagacggtgacctctgcagccttgctttgcggcgagaggcaaggcagttttctccggtttgcgatgcggcaattcagcgggcgccttgtggcttatcgcatggaacggaacggattacgg

SEQ ID NO: 80403 - DNA, 1437 bp, Zea Mays
cattccgttgcctactgccaaggccatctgcagacctccactccacctgctcggctgctcctcaggtcctccattccttccaaaataaaagcgggagcgctgagccagacggcggcccactcgttctcgctctccctccccagtcaccaccatcacgagctcgcgtgtgcccctcgcgctccgccgccaccaccttctactaccataccgctgcgtcgccgcccggaccacgcccgccaccaaggcctctcctccgcctcgtccccatcacgggcgcggcccctcgacctcggtggccggccggttcgacaccgcaccgtgaccctcggctacggaggaagaagacggagtggtggactgggccatagaaccatgtcaagttccataatttcaacagtggccacagagttgtcggtggctgagaagagcaggggtattgagccactaccttttattaatgacaaacatggaggtgtcatcattgagatgacgactccgatggatcctggagcgttttcagcttccttgaaagcagctctggtgaaatggagggagcagggaataagaggtgtctggatcaaactgcccatcaccctttccaaccttattccaccagttgtagaggtttctggtaccatcatgcagaggaaacttacttgatgcttgcgtactggcttccaaatacaacacatacactaccagtaaacgcaacccaccgtgttagtgttggagcttttataatgaatgacaaaagagaggtcttggctgtacaagaaaagagtggtgtacttcgaggcctaggtgtgtggaaatttccaactggcgtagtagaaccgggggaagatattaacgttggagccgtccgagaagtaaaagaagagacagggattgatgcagaatttgttgaagtgctggccttcaggcagagccacaaatccttttttgataaatcagatctatttttcgtgtgcctgctacgacccctttcatacgacattacgaagcaagactcggaaatagaggcatgccagtggatgccagtagaggaatttgcagcacaaccatttgtccagaaacatgagcttgtgaagtacatcctcgaagtcggcctggctaaagttgacaaggaatatgcaggcttttcgccaatctccataaaatcggcatttacagacaaattgtccttattttacatgaaccggagggatctggacagggcctcagggtagagtatatatgtaatgacacgggcaattcaggatagttaaattttcactttggtgtgtgacagcgggctaaatcttgttagacctagggtctgtttggttgggctgtggctgtcaaaaaagttgctgtgggctgtgagctgtggaaaaagctgctgtaggctgtgagccattaaaaagctaaaaatcgtttggtagaaaccactaaaaa

SEQ ID NO: 80404 - DNA, 921 bp, Zea Mays
atggcttctaaaaaatgctatgtgaaatgggggagcagggaataagaggtgtctggatcaaactgcccatcaccctttccaaccttattccaccagttgtagaggaaggtttctggtaccatcatgcagaggaaacttacttgatgcttgcgtactggcttccaaatacaacacatacactaccagtaaacgcaacccaccgtgttagtgttggagcttttataatgaatgacaaaagagaggtcttggctgtacaagaaaagagtggtgtacttcgaggcctaggtgtgtggaaatttccaactggcgtagtagaaccgggggaagatattaacgttggagccgtccgagaagtaaaagaagagacagggattgatgcagaatttgttgaagtgctggccttcaggcagagccacaaatccttttttgataaatcagatctatttttcgtgtgcctgctacgacccctttcatacgacattacgaagcaagactcggaaatagaggcatgccagtggatgccagtagaggaatttgcagcacaaccatttgtccagaaacatgagcttgtgaagtacatcctcgaagtcggcctggctaaagttgacaaggaatatgcaggcttttcgccaatctccataaaatcggcatttacagacaaattgtccttattttacatgaaccggagggatctggacagggcctcagggtagagtatatatgtaatgacacgggcaattcaggatagttaaattttcactttggtgtgtgacagcgggctaaatcttgttagacctagggtctgtttggttgggctgtggctgtcaaaaaagttgctgtgggctgtgagctgtggaaaaagctgctgtaggctgtgagccattaaaaagctaaaaatcgtttggtagaaaccactaaaaa

SEQ ID NO: 80405 - DNA, 2799 bp, Zea Mays
atgacgcgtgtggcagcggtagggagcaccgtaggggcagcgctacggcgtatagagagtgtatgttccctctacgcgaggggagggggagcggccgcgggagccactgtagatagtctaagggtccgtagggttaggctccaccagcttgataaacgggccgagctggccagacccgcacggacgattcatccctgcggacaacgatggcggctttgctgcagcgtcgcgcacaccaccagctcgacggaatgccccactagaccaggtccaggacgcctgctcaatgtccatcctagcgtccggtcgcgcccgcctcctccgtggactctccagccactgcacgcagcggcctcaacagcaaggatactatgtcgcgtgcgtccggcggtacaggtcgcgacacatgtcactcgatggagttgaggacgcggcggagcaagccgtcgaaccgccgccggtgtctctggcgaagagcctggcttctctcgccgaggaggccgcggccgtccagaggcagaggaagcccctcacacggatggagcggaagcggttagccgagctccacatcaagaagagggtcaaggagcagtacctcaacggcaagttctaccgcctcatggataaggtcgtggcgaatgctgagacgctggaggatgcatacgacatcgtgcgtctgaattcaaacgttgatctagcgtcttcaaaggatgatgtatgctttgccacgctggcagaggagctgaggaacggggcgtttgatgtccgagctaatgctttctcagtggtcgcgaagagaaaacggggacaccttgttcttcctaggctgaacttgaaagtggttcaggaagcgataagagtggtgcttgaggttgtctacaggcctcaattctcaaagatatcacatggttgtcgcagtgggcgaggatatcactcagttttcagatttatatctgatgaaatcgggattccagattggttctttactgtcccgttgcacaaggcggttgatagcaatgtgacctctaagcttatgtcgctaatacaggagaagatcgatgacgcccagttagttgcattcatgcaaaatatgtttgatgccaaggtgatcaatttggtatttggtgggtaccccaagggtcatgggctgcctcaagaaggagtacttgcaccaatcctgatgaacatatatcttgacagttttgaccacgagatattcaggatttgcttgaaacatgaaggccttggttcagaggcaacagatgtttcagaagaccgtgggtcaaatttgcgtcgctggtttcggagccaactgaagggcaaggatgaaagtagtgaaaatcaaacagattgtctgataaagataaagctatatgcttgtagatatatggatgagatttttgttgcagtttctggatccagagatgtcgcggaagatatgaaatctgaaatggttgcttacttaaacaaatcactttacttggaagttgatgataaaattcatcttgtgccgatcagaaggaacccacgaggcttacagtttgctggttttgtggtcagagtagaaacgaaggaaaatgctaaactgaaagctgtgcataagctgaagcagaagattggtttgtttgcttctcagaagcaagagatttgggacgctatgaatcttagagtaggaaagaagtggttggcatatggattgagaagaataaaagagagtgagatcaagtcgcttggccttagcacccctttgttggatcacattgcacaatttaggaaagagggaatgaagacagatcactggttcaaaacattgctaaaggtatggatgcaggatgtcaatgccaaaaatgagctaaatgaggatgttctcttatcaaaatacattgctgagccagcacttgcacaagaccttagggatgcattctacaactttcagaagcaagctaaggattacatttcatcagagactgctgcaacggaagcattgttgtccgatttgaagagtacctgcactgatggcagtgtcataaaaattcatgcacctcttaactatattcagaagtgccttcatcgctatggaataattcatcgttggataagatggttttctgaagttgacaatttcaaggaacttcagcttatgtttgtggaatgtgtcagaaaatcctgcatcaggacactatctgcgaagtataggatgtatgaaaggctcacagaaaagcggtttgaacttgatgatcatggcattccaatggttgaggattttgaggcaataattaaacctttagaatctagttattctgtggcttctactgatgaagctttggtgtatggcatttctgctagcggtgtagttgtgctaacactgtcaagagttagagtccctactcgacaatttaactgctttgttatgggctgccaatctgcgtcaccaagtatgtatgtgcttcatgtgaaggagaaacagcgtttccctggatggaggacaggtttctcgtcatcaatcgatgggattttggatggtaaacgaattggactgtgcaccaagcatgttaaagatatatatctgggacacatctcccttcaatcagtcgattttggttccctgattagatgactcaatgatatgttacctgtgattttctaataattgaaggccttgaaaatgagtactgactcacatgatagtaggttcagtaattgtaaatctaaacatggttacacatagtttgattttgtagacagcttgattgatatgcttgtggactgtttcaaatagaaattactctacaacttgaa

SEQ ID NO: 80406 - DNA, 187 bp, Zea Mays
agtgtttgttgttgttgaatctgtgtagcatagtattcatgttgcgcagcttattgtctcaagtaatcctgatgtcgcctgttcttcttgcagttgctccacttctactagatcttgattggagcgacgggagctacgagcagcagatctcgacgaacctccacactgaactctcacctggatcgag

SEQ ID NO: 80407 - DNA, 1347 bp, Zea Mays
agcacactcgcaaccgtaggaagtgtatgttttttgtgtagtgtcaaactatggttgttggctctaaatccacactcgcaaccacctagccaacatggtacatatgtctttgtattttatacttcatacttaagtaaaaatgaaaaatgtagcaacgttcactttgatagtgatcattagtccactggttatcttaatcacaaaagccaaacgacccacgttgagcgttgcactatgcaacctctctcggaagaattcttagttaaatttaactaggctttataaacctagtcaaactttaaacatattttaatggacggaggcacattagataataattgtcccttggttagggtgagcagtcgaccaccacttgcttattttaatttggttgtttaaagtcaagttaaattaaatccgacgacctaaatgatgcacacatctatttgtcggttccaaattatggattcactcgaattttgctgtgagtatattatggaaaaaataataaatgtaaatatgacgactgacgagagctagctagctaccacaaaggtcgtcgtcgactatgtctgtggcgtctataaagcaaaactacatacatggcgtgtactgcaccaccgtaccttgcgtacaggctggaagaagcaaacaagaagccaagctataggctctagctagctccggcggacctcagcgactggaatcagatcggaatcagatgggcagcatgggcgtggaggcggatgacgacggcagcatcgtcaaggcgtccctgcagcggtgcgagccctctggcgatgccgcctacggcgagctcagggctctgctggcgcgcctccatgacccggccaccaggcgtgacgcgcgcctcatcctcaccgcgctccaccgccaccagcagcacagctcgtcgcgggcgggggtgtctgcgggccggggcgaagcgggcgtgccggcggtgcggggaggggcgcggcgggggcaccagcaggcgggcgtgggggcgcggcgggcggcggtgcctggcggctgcaacgaacgggagcgagaaagatgagtgagggaaagataaggtagattcgcaggttaagataaaaaaatattacttcctagagtaaagccgtaggaagttacttaactttctagaggttgtacatgtactctaggaagttaattcacttcctagaggcgaccgtaggaagttagtggctcgtttgaccggtcaaaagctgaaagctaactttctagaggaggccgtaggaagttagcatagatagctaaattcctagaggcgaccgtaggaagttagcggctcgtttgactggtcaaaagctgaaacctaac

SEQ ID NO: 80408 - DNA, 1235 bp, Zea Mays
aaatccaacaccaacacacgagacggggacgccacgcccgcgcctcacacggcaacggacgggacgcaccaccagtccaccgccaccccatccaatcccatccccacaaccgggtgccgccgccttctatggcggacttcggcgacgagctctttctcgacgtcggggacgatggtttcggagacctctcctacgtctccttctccgagtccatcgagttggatctcgcctgcccacgcgacgtcttttccgcggggtttgatcccgaaaccctaacccacatcccggggtccccaatctccttcgactccgaccccgacctccgccacctctctccctcgctgacctgctccccgcccttctggggctgcctcgatgacgccgctagcttcgagtgggaggagatcgcggacgctgccctcggcgtcggcggtggcgctggcggcgccggagggggaggacaaggactagaaggagacgccgatgccgacgccgacgtgttcgggttcctcgacgagcgggagatgctgggcgtgatggagggcatcgacagcggtgacgacgactcgatcttctccgatgagcctccgtttgacttcggcgatggcgacacggagcttgaaggcatcttccggagcggtgtcgggtgggagctgctcccggtgcctctggacgaggacgagttcgaggtgctgccggggcacgtcgtggaagtgggcggcgccccgccggcggcgcttgcagtggtggagcggctccaggtggtggccgtcagaggcgaggaggttgtgcaggagtgcgctgtttgcaaggaagggatggaacagggggagctcaccactgggctgccgtgtgggcatttctaccacggggcgtgcattggtccatggcttgccatccggaacacgtgcccggtgtgccggtatgagctgcctactgatgaccctgagtatgagaagcggaggacgaggcgccattctgctggtggttcaacaccacagttgggtgcaccgatgcaggtaccgatgcaacatggtatgataagctgtcgtaaaagaaacactacaaattttgtgtgcctcggtcagagactggaagttgttgcaagccgcaacggtctgttcgtactttccagggtgtttcaacgtcgaaaaatttaccattgttctatggttcagaggctatagaataaatcatggcacactgaaattcctggactagggtgtatacacgtt

SEQ ID NO: 80409 - DNA, 496 bp, Zea Mays
ccgcgcttcaacaaacgcattggcgtcctcctccacggctatataatacggtacgccagagccataccatcccgtcgagcccaacccaggacccgccacgggtgaagcagaggagatcgtctccatagctactccttgtctgggcacgagactgatgccggtgaagtactcgagacagttcgtggtggcgcgctacatgtggtcgtggccttctcgggcgacgtagtccaccagagcactaccaattgctcaccagagaaatttagccaccgtggatccgctcctcgccgtgaatgaagtccggcatgacaaaaccatgggtcaaggacaagtactacaagatgaggagcatgattcgtcgcaatgagttcgtgagaggtctaggccatcgtcttctagtcaactatgattgttggatcatcgtctttgtatgatgtaattatttagttattttgtacagaactccattattattaaagatgtgacaatcgtttct

SEQ ID NO: 80410 - DNA, 2721 bp, Zea Mays
cttcgattaggtttttctgtgcccgcttatctgccgcttgctttctcaaagaaggagacacttatggggaagggacaaatattagctgttcttcaaataggtggagaattcaacaccgatgaagatggacacatgtcatattctggtggagaggcacatgctatgcatgttcaaagtgactggacttttagtgcatttaagcaagagatatcgtcaacacttaacaatctgaagcttgaccagtttgcattcaagtatttccttccaaagaatgataaaactttgatctctatttccaatgacaaggacctacgacgcatggttgaattccatgcggagtcagattcgacatacatttatgtcatgaagaaagctgacaacagatcaaagaacattgttgctgtcttggacactcccacagatgcctttgcgattgtcccaacaactcaggatgggtctaagagacaaaaggtttgtgcaagttggaagaatgtgataactggagttggccaagtgtttgaaggacctaaggatttccgtgatgccttacataagtatgccattgcacatagattccattatagatttatcaagaatgactcatctcgtgtgactgctgaatgtactggtgaaggttgcccatggcgaatacatgcttctaagtcccctgcaaagaaagaatttatggtcaagaaaatatctgaaagccacacctgtgaatctgaaacagtcaaaagcaatcggttggcttctcaacgatgggttgctagtgtcataaaagaaaagttgcgtgatagtccaaactacaggccaagagatattgcaaatgatcttcaacgagagtatggactatgcctgaactattcacaggcttggcgtggaagatcaattgctcagaaggaactttatagtacacacgaagaggcctgcagtcagttgccttggttttgtgaaaggattgtagagacaaaccctggaagtgtggcaactgtagtggccttggaagattcaaagtttcgtttttttgttgcattccatgcatcgctccatggttttgagcatgggtgcaggccgctcctttttcttgaagcgataactgcaaagccgaataagcactggaagctactggctgctgcttcagttgatggtgaaggtgatgtgtttccagttgcttttggtgttgtggatgacgagtcgcgtgaaaattggcattggtttcttgagcaactaaaatcttcacttggcacatctcgaaccatcacattcatatcgaatggagaacatggactttgggatgtattatcttcagttttccaagagtgtcatcatggctactgtgtggagtctcttattgaagaatttaagatgcaactggatgatgcatggactgaggaactaaaagattcgatggttgagcatcttaagaaggccataaattcatgcacagctgatgagttcaatcagtatattgagctcatcaaaagtggttctgacaagcttgctgattggctcttggagatcaaacctgagcgatggtcagatgcttttttcaagggatcacgtcatgggcagtattcttgtaatatttttggcactgtgtctgagtggattcccacgagatatgagctttcagttgtgcaattggttgacacgataagatgcaagctgatggagatgatgtacacacgcagagagtcttccaatgcatggactgaggtattaacaccggcagccaatcagaaacttcaggaagaggtgaacaaagcccacaccctcaatgtccttccagcagaaaacggtgaaaatggcaatgtgtttaaggtctgtgatgactcagttaatgttgtcaaccttgacacatgggaatgcacctgccaaaggtggcatatttctgggctgccatgcatgcatgtgattgctgtattggagcgcactgggcaatatgcatatgactactgtgtgaagtacttcacaacagaatgctaccgcttgacctattccttgtcaataaatcccatacctgatgttattgtgccgcctacattaatcgacttagctcagagcccagcaacatacccatgcccactgcgaacccgccgtcgggttggccggccaaaagagaagcctgctgatcctcgcattgcaatcaagagggcagtgcgctgcagcaggtgcaagggttatggacacaacaaggcaacctgcaaagttcctatcagcagtttcagcacgtagtatttactcatcaaatcagttgtgcagtgtgcattagtgtggagagttgttcgtgttattctctgcaatgttagtgttgatgtttcttttgatagtctgtgatacatgctagggatgatcttagcttggctgccaagagaggagtctgctgatcctcgcattgcaattaagagagcagtgcgctgcagaaggtgcaagggttatgggcttatggccaccacaaggcaatctgcaatgttccgatcagcacatagtatttaatcattggatcagttccgcaatgtatattaaggtggagagttgttcgtgttaattctccaaaatgctagttctgatgtttcttcggatagtctgttatacatgcaagggttgatcttagctctaaattgatctgtattttcaccattgcttagactaactgtattcagcttgtgagtaaaacgccgtagcttatactcatgttgctatccactttactcactttct

SEQ ID NO: 80411 - DNA, 803 bp, Zea Mays
cttgtccacatatatatacacaacgaaaagctcgtccagtattgctcttatttaggacgatcagatgtacacatccttacataagttacagacgatatttgagaatagatcgacctattgacatggatgggttgattgagagacccacagaaagaccaaagatttcacatggtgatacgatcggcgcggcgtgcatgcacatggacacctgcagggctagctccacggacctagctgctggaggcggtggcatggaacctggcgatgaacgccgacgccttcatgtcgacgtcgcgctcgccaacgtaccacaggccatcctcgtcactcggccgcaccttcctggacgaccgccgcggctgctcgtaccccggctcgtcggcgtagtacccgcctcctgacccgccgaagcaagacaggctggctcccattccggcggcgaccgaccgatcacccgaagcttctctcggagtcggagcacagcacagacgacagtttcaggcactggacgcggtaagctcactaggaaacttctgctgcctgctgctggagggtgtggtagttgtgctcggaggtcggagggcaaccgggtctcctccccaatttatagcggagggcagcggacggcggccaggagatcgcttctgcggaggcatccgacggccgggaccgatcggctcatcgagcgggccacgcgttgtgcacgtcgggagaagacgacgaatagactgcagattctttcttcagactcctccagctatcttcatggatgaaccccctgcaatgtctgaacaggtaggtag

SEQ ID NO: 80412 - DNA, 814 bp, Zea Mays
cccgcggccggcagccgccgccgccgtgcctgtgcgtgcggttgcgctcggccattgagaaagcgaagggcgaacgaaggcgcggggcagctccgcaggccgcagctgagggggaggggatccgcgacgtggacatgctgctcgggcctcggtggtcactcgaactggatcgctgtgtccacctctgatctcttcatcctcgggtcgggactcctctgtctccttgccctgtccccaaacaacctctgaataaagggtaactaccattacgccattcgcataaaaaaaactgagcctgcccgcccgcccgcgcgctccgctccgtgaactatatctatctatcacctgctgctccaaggaggcggacagaggcaggcaggaaggcactcacttctccaggagcccggagtcggcagcaagagagaatggccgccgacgccgccgccgccgccacccttcgtactgctctctcccaagcaacagggcaagagcagagagcttcactgctgtgcacaccgaagcaccgagttgctgccagcaggagaagcttgagattcaccactagggccagctcgaatgcgggcgccagtgtgagcatccctaagcaatggtataacctcatcgccgacctgccggtgaagccaccgccaccgctgcacccgcagacacaccagcctctgaatcccagcgacctctcccctctgttccccgacgagctgatcaggcaggatgttagcggcagatagtggagatagatccgagacaggaattggaggtaggaagcaggaactggggattcaggaagatagcaaga

SEQ ID NO: 80413 - DNA, 2158 bp, Zea Mays
gtgtccacctctgatctcttcatcctcgggtcgggactcctctgtctccttgccctgtccccaaacaacctctgaataaagggaggcggacagaggcaggcaggaaggcactcacttctccaggagcccggagtcggcagcaagagagaatggccgccgacgccgccgccgccgccacccttcgtactgctctctcccaaggtctggtgctgtggcatgtttagtgcaatcttcattgcttgctgtcttgctgcatttaacacagcacgagcttcagagaatagtccaagcctatctgtgttgccaagagatctcatccaaggtttacggcaatgaaccatttctaaagcacaaagacgtgatgtctttatcaattcatcaggagagcaaatggcgtcaacaggaggtcaccgacgagcggttcgtcgacatacccgaggaggtcatcgacgtgtacaagctctggcgcccgacgcccctgatcagggccaggaggctggagaagctgctcggcacgccggcgaagatctactacaagtacgaggggaccagcccggcggggtcgcacaagcccaacaccgccgtgccgcaggcgtggtacaacgccgcggcgggggtgaagaacgtggtcaccgagaccggcgccggccagtggggcagcgcgctgtccttcgccagcagcctcttcggcctcaactgcgaggtatggcaggtgcgcgcgtcgttcgaccagaagccgtaccggaggctgatgatggagacgtggggcgccaaggtgcacccgtcgccgtcgacggcgacggaggccggcaagaggatccttgaggcggacccgtccagcccgggcagcctcgggattgccatctccgaggcggtggaggtggcggccaccagcgccgacaccaagtactgcctgggcagcgtgctcaaccacgtcctgctccaccagaccgtcatcggggaggagtgcctggagcagctggcggcgctcggcgagacgcccgacgtcgtcatcggctgcaccggcggcgggtccaacttcggcgggctcgcgttcccgttcttgcgcgagaagctgcgcggcaagatgagccccgcgttcagggccgtggagcccgccgcgtgccccacgctcaccaagggcgtctacgcgtacgacttcggcgacacggccgggctcacgccgctgatgaagatgcacaccctcggccacggcttcgtccccgacccgatccatgcaggtgggcttcggtaccatggaatggcacctctgatctcgcacgtgtacgagctgggcttcatggatgccgttgctatacagcagactgaatgcttccaagctgccttgcaattcgccaggacggagggcatcatcccggcgccggagccgacgcacgcaatcgccgcggcgatcagggaggcgctggagtgcaagcggaccggggaggagaaggtcatcctgatggccatgtgcgggcacggacatttcgacctcgccgcgtacgagaagtacctgaggggagacatggtcgatctctcgcacccggcggacaagctggaggcctccctcgctgccgtgcccaaagtctgacggcgttggagccaacagcacatgcgactggaatgggacgaataatccattgatatcggcttcttgaatcttgtggtcatccatcgcccatcggcagtgggatacttgtgttccttatgaaatgaatgaataaaatttcaataaaagcattaattttatcatattcatggatatgtttgaatgtttgatcgttcttttttagggcattagtatttggtacagcatacactttcaagtttgaactctaaactccacttaaaaagaaacctggtagcatctcatacctaatataccaagatttacttccaaatagcacacttttaaccgctttatttgtttgaaaatacttgacgatacaacaacaacaacaacaacaacaacaacaaagcctttttgtcccaagcacgttggggtaggctagagatgaaaccccatatgaaaacctcagagctcaacccccaaagaacagaaaagggaaacaaaggcaaaggagaaccgaaaacaacgaaacagggaaacacataaaagagataaaacccacaatgaccagcaagatctaaaatggac

SEQ ID NO: 80414 - DNA, 2484 bp, Zea Mays
acggcctcggccatagcatgctcggtgagcccccaagtcgaacaggttgtgggcatggcgaagttggtgttgctgtgcgcgagttgagacagcgcagcgccgccgctaccatggacggagttgtatgagccatattcgatgccggtggcgatgagctcaccggcgtggtggttgtcgagcaacgccttgtccgagtgggaggtgacgaacgcctcgtcggggtcggagtcgcgcaggttcgaagagatatcgccgtcagcatcacaaccctcgaagagcccgccccagttgtcggcgacgacagatggcgctgcatagtactccttgccgtcatcgaagcacccgccccagttgtcggcgatgacgacggccccaacagccgcagtcggggtgggcggcatgctggcggatgtgtcggaggattggtggacgctgagcagtgtgggcggaaggtcgaggtacgcagaaggcgagaagcgccggtcccagcgaacctccagctcgtcgaatcgccggttgagctcgtcgaggatgagcttgaaatcgagcgacatggcgtgggcaaattgaagtcgaggatcgaacgaatctgataccaattgttagcggcagatagtggagatagatccgagacaggaattggaggtaggaagcaggaactggggattcaggaagatagcaagagattcataggaacagaggaagcagaggttagagacgaagaagaaggaggtcaccgacgagcggttcgtcgacatacccgaggaggtcatcgacgtgtacaagctctggcgcccgacgcccctgatcagggccaggaggctggagaagctgctcggcacgccggcgaagatctactacaagtacgaggggaccagcccggcggggtcgcacaagcccaacaccgccgtgccgcaggcgtggtacaacgccgcggcgggggtgaagaacgtggtcaccgagaccggcgccggccagtggggcagcgcgctgtccttcgccagcagcctcttcggcctcaactgcgaggtatggcaggtgcgcgcgtcgttcgaccagaagccgtaccggaggctgatgatggagacgtggggcgccaaggtgcacccgtcgccgtcgacggcgacggaggccggcaagaggatccttgaggcggacccgtccagcccgggcagcctcgggattgccatctccgaggcggtggaggtggcggccaccagcgccgacaccaagtactgcctgggcagcgtgctcaaccacgtcctgctccaccagaccgtcatcggggaggagtgcctggagcagctggcggcgctcggcgagacgcccgacgtcgtcatcggctgcaccggcggcgggtccaacttcggcgggctcgcgttcccgttcttgcgcgagaagctgcgcggcaagatgagccccgcgttcagggccgtggagcccgccgcgtgccccacgctcaccaagggcgtctacgcgtacgacttcggcgacacggccgggctcacgccgctgatgaagatgcacaccctcggccacggcttcgtccccgacccgatccatgcaggtgggcttcggtaccatggaatggcacctctgatctcgcacgtgtacgagctgggcttcatggatgccgttgctatacagcagactgaatgcttccaagctgccttgcaattcgccaggacggagggcatcatcccggcgccggagccgacgcacgcaatcgccgcggcgatcagggaggcgctggagtgcaagcggaccggggaggagaaggtcatcctgatggccatgtgcgggcacggacatttcgacctcgccgcgtacgagaagtacctgaggggagacatggtcgatctctcgcacccggcggacaagctggaggcctccctcgctgccgtgcccaaagtctgacggcgttggagccaacagcacatgcgactggaatgggacgaataatccattgatatcggcttcttgaatcttgtggtcatccatcgcccatcggcagtgggatacttgtgttccttatgaaatgaatgaataaaatttcaataaaagcattaattttatcatattcatggatatgtttgaatgtttgatcgttcttttttagggcattagtatttggtacagcatacactttcaagtttgaactctaaactccacttaaaaagaaacctggtagcatctcatacctaatataccaagatttacttccaaatagcacacttttaaccgctttatttgtttgaaaatacttgacgatacaacaacaacaacaacaacaacaacaacaaagcctttttgtcccaagcacgttggggtaggctagagatgaaaccccatatgaaaacctcagagctcaacccccaaagaacagaaaagggaaacaaaggcaaaggagaaccgaaaacaacgaaacagggaaacacataaaagagataaaacccacaatgaccagcaagatctaaaatggac

SEQ ID NO: 80415 - DNA, 2734 bp, Zea Mays
cttctcgtctccttccttccgcttcctccgtcccctggcggcctggcccctgcggtttctggttgtccctcacgccaatgtagcttgcccctgttttgttgctttgaccaccttaaaaacctcagggccttcaaatatactcaccgaatcacatcctgtcacgcctcctgctcaaattcctaacgcccgagaaaccaagaaccgggaccggagttaccgggcggtggaggccgcgatgaagagccctcctgtcatggatcccgaggcgccgccatcgccgccgctgccgggcactcctcccgatgacgaggaggagaagcggggaggacggaacggggtgccatggcggatgacgctgagcctggcgtaccagagccttggcgtggtttacggcgacctcagcacgtcgccgctgtacgtgtacaaggcggcgttcgcggaggacatccagcacacggagagcaacgaggagatcctcggcgtgctctccttcgtcttctggacgctcacgctcgtcccgctcctcaagtacgtctgcgtcgtcctccgcgccgacgaccacggcgaaggaggcaccttcgcgctctactccctcctctgccgccacgcgcgcgccgcgctcctcccgccaggacgaaccgccgccggggacgaggaccagttcttggacggagccgacggtggcaccaagaaggctacggcgcagaacggcaatgcagtgacgctgggcgggggcgctgctgccagcgtcaggaggctgctggagcggcacaaggtgctgcagcgtgtgctgctcgtgctggcgctggtgggcacctgcatggtgatcggcgacggtgtgctcacgccggccatctccgtgttctctgcagtttccgggctggagctgtccatggagaaggaacatcataagtatgtggaacttcctattgcctgtatcatactggtttgcctgtttgcactgcaacactatgttcttgaggaagacacagagaggaggttggatgtccctgggaggaatactgttatgcgtaactggttctgaagcaatgtttgccgatctagggcattttaaccagttgtcaatacagattgcttttacatgcatggtgtatccagcattgatccttgcatacatgggacaagctgcttatctgtgtaagcatcataccatggaaagtgactataggattggattctatgtgtctgtgccagagaaaattaggtggcccgttatggcaattgctattcttgcagcagttgtgggaagccaagctgtcatcactggtacattctcaatgatcaagcagtgcacttctctgggctgctttcctcgggtgaagataattcatacatctgccaaagtacacgggcaaatatacatccctgagatcaattggattctgatgatactgtgcttagctgtaaccattggtttcaggaacacaaaacacttggggaatgcatcaggattggctgttataaccgtcatgctggtgacaacgtgtctgatgtccctggtgatagtcttgtgctggcataagagcatatttctggcaattggcttcattgtgttctttggaaccattgaggcactgtacttctcagcggcactcatcaagttcagggagggggcctgggtcccaatcgtccttgcttttatcttcattttgataatgtgcatctggcactatggcaccatcaagaggtatgagtttgacgtccagagcaaggtttccatcaactggctccttggtctcagcccgaacctcggcatagttcgtgtccgcggcattggcctcatccacaccgagctcgaaactggcgtcccggcaatcttctcgcattttgtcaccaacttaccagccttccaccaggtactcatattcatgtgcatcaagaacgtaccaataccacatgtccgtcctgaagagaggttcctcgttgggaggatcggcccgaagcagtacagaatgtaccggtgcatcgtcaggtacggctaccacgacttccacaaggacgacattgagttcgagaaggagctggtgtgcagcgtcgcggagttcatccggtcagggtcgtccaagttgaacggcatgcccgaggagttcgacgaggaggagcagcgcatggcggtagtccgctccaacagcatccgcatgctcgaggaagaggctacagtggagaagaccgtcggcccgtcccaggccagcagggagatacggtcgccgtcgcccactcctcccccggtggttggccccaagaagcgggtgcggttcgtgctgccggcagcgagcccgaagccgaatgccggcgtgcaggaggagctgcaggagctgtccgacgcgcgggaggccggcatggcgttcatcctgggccactcgcacgtgaaggcgaagagcgggtccagcttcctccgccggttcgtgatcaacttctgctacgacttcctgcggaggaacagccggggtcccaactacgccgtctccatcccgcacgcctccacgctggaggtgggtatgatgtactatatctgatctgatgactgaacccctgaaactgagggggagaaatataggagcaggaaaagatgaagaggaaatggaacaaaaagttttcagctgtatatgctagatcttgtaagtaactgctggtgagttccgttgtaaatgcagcttagttttcttgttaggccttcggcttctctcgtgaataggagtaccaaaattgcctt

SEQ ID NO: 80416 - DNA, 2927 bp, Zea Mays
cttccttccgcttcctccgtcccctggcggcctggcccctgcggtttctggttgtccctcacgccaatgtagcttgcccctgttttgttgctttgaccaccttaaaaacctcagggccttcaaatatactcaccgaatcacatcctgtcacgcctcctgctcaaattcctaacgcccgagaaaccaagaaccggggtgaggccgctgtgcgacgccgtcaccttcacctaatcccaacttccccactagtcctcaagtgtctctcttcttctcttcggttacaagagcagaccggagttaccgggcggtggaggccgcgatgaagagccctcctgtcatggatcccgaggcgccgccatcgccgccgctgccgggcactcctcccgatgacgaggaggagaagcggggaggacggaacggggtgccatggcggatgacgctgagcctggcgtaccagagccttggcgtggtttacggcgacctcagcacgtcgccgctgtacgtgtacaaggcggcgttcgcggaggacatccagcacacggagagcaacgaggagatcctcggcgtgctctccttcgtcttctggacgctcacgctcgtcccgctcctcaagtacgtctgcgtcgtcctccgcgccgacgaccacggcgaaggaggcaccttcgcgctctactccctcctctgccgccacgcgcgcgccgcgctcctcccgccaggacgaaccgccgccggggacgaggaccagttcttggacggagccgacggtggcaccaagaaggctacggcgcagaacggcaatgcagtgacgctgggcgggggcgctgctgccagcgtcaggaggctgctggagcggcacaaggtgctgcagcgtgtgctgctcgtgctggcgctggtgggcacctgcatggtgatcggcgacggtgtgctcacgccggccatctccgtgttctctgcagtttccgggctggagctgtccatggagaaggaacatcataagtatgtggaacttcctattgcctgtatcatactggtttgcctgtttgcactgcaacactatggtacacaccgggttggcttcatttttgctccagtagtggtcacatggctcctatgtataagcgttattggtgtttacaatattattcactgggaacccactgtatatcgagcattatctccgtattacatgtacaagttcttgaggaagacacagagaggaggttggatgtccctgggaggaatactgttatgcgtaactggttctgaagcaatgtttgccgatctagggcattttaaccagttgtcaatacagcattgatccttgcatacatgggacaagctgcttatctgtgtaagcatcataccatggaaagtgactataggattggattctatgtgtctgtgccagagaaaattaggtggcccgttatggcaattgctattcttgcagcagttgtgggaagccaagctgtcatcactggtacattctcaatgatcaagcagtgcacttctctgggctgctttcctcgggtgaagataattcatacatctgccaaagtacacgggcaaatatacatccctgagatcaattggattctgatgatactgtgcttagctgtaaccattggtttcaggaacacaaaacacttggggaatgcatcaggattggctgttataaccgtcatgctggtgacaacgtgtctgatgtccctggtgatagtcttgtgctggcataagagcatatttctggcaattggcttcattgtgttctttggaaccattgaggcactgtacttctcagcggcactcatcaagttcagggagggggcctgggtcccaatcgtccttgcttttatcttcattttgataatgtgcatctggcactatggcaccatcaagaggtatgagtttgacgtccagagcaaggtttccatcaactggctccttggtctcagcccgaacctcggcatagttcgtgtccgcggcattggcctcatccacaccgagctcgaaactggcgtcccggcaatcttctcgcattttgtcaccaacttaccagccttccaccaggtactcatattcatgtgcatcaagaacgtaccaataccacatgtccgtcctgaagagaggttcctcgttgggaggatcggcccgaagcagtacagaatgtaccggtgcatcgtcaggtacggctaccacgacttccacaaggacgacattgagttcgagaaggagctggtgtgcagcgtcgcggagttcatccggtcagggtcgtccaagttgaacggcatgcccgaggagttcgacgaggaggagcagcgcatggcggtagtccgctccaacagcatccgcatgctcgaggaagaggctacagtggagaagaccgtcggcccgtcccaggccagcagggagatacggtcgccgtcgcccactcctcccccggtggttggccccaagaagcgggtgcggttcgtgctgccggcagcgagcccgaagccgaatgccggcgtgcaggaggagctgcaggagctgtccgacgcgcgggaggccggcatggcgttcatcctgggccactcgcacgtgaaggcgaagagcgggtccagcttcctccgccggttcgtgatcaacttctgctacgacttcctgcggaggaacagccggggtcccaactacgccgtctccatcccgcacgcctccacgctggaggtgggtatgatgtactatatctgatctgatgactgaacccctgaaactgagggggagaaatataggagcaggaaaagatgaagaggaaatggaacaaaaagttttcagctgtatatgctagatcttgtaagtaactgctggtgagttccgttgtaaatgcagcttagttttcttgttaggccttcggcttctctcgtgaataggagtaccaaaattgcctt

SEQ ID NO: 80417 - DNA, 2006 bp, Zea Mays
aaaggaccttattcttgacttttaaatcaataattttttcctttgtcaaatgtggaacttcctattgcctgtatcatactggtttgcctgtttgcactgcaacactatggtacacaccgggttggcttcatttttgctccagtagtggtcacatggctcctatgtataagcgttattggtgtttacaatattattcactgggaacccactgtatatcgagcattatctccgtattacatgtacaagttcttgaggaagacacagagaggaggttggatgtccctgggaggaatactgttatgcgtaactggttctgaagcaatgtttgccgatctagggcattttaaccagttgtcaatacagattgcttttacatgcatggtgtatccagcattgatccttgcatacatgggacaagctgcttatctgtgtaagcatcataccatggaaagtgactataggattggattctatgtgtctgtgccagagaaaattaggtggcccgttatggcaattgctattcttgcagcagttgtgggaagccaagctgtcatcactggtacattctcaatgatcaagcagtgcacttctctgggctgctttcctcgggtgaagataattcatacatctgccaaagtacacgggcaaatatacatccctgagatcaattggattctgatgatactgtgcttagctgtaaccattggtttcaggaacacaaaacacttggggaatgcatcaggattggctgttataaccgtcatgctggtgacaacgtgtctgatgtccctggtgatagtcttgtgctggcataagagcatatttctggcaattggcttcattgtgttctttggaaccattgaggcactgtacttctcagcggcactcatcaagttcagggagggggcctgggtcccaatcgtccttgcttttatcttcattttgataatgtgcatctggcactatggcaccatcaagaggtatgagtttgacgtccagagcaaggtttccatcaactggctccttggtctcagcccgaacctcggcatagttcgtgtccgcggcattggcctcatccacaccgagctcgaaactggcgtcccggcaatcttctcgcattttgtcaccaacttaccagccttccaccaggtactcatattcatgtgcatcaagaacgtaccaataccacatgtccgtcctgaagagaggttcctcgttgggaggatcggcccgaagcagtacagaatgtaccggtgcatcgtcaggtacggctaccacgacttccacaaggacgacattgagttcgagaaggagctggtgtgcagcgtcgcggagttcatccggtcagggtcgtccaagttgaacggcatgcccgaggagttcgacgaggaggagcagcgcatggcggtagtccgctccaacagcatccgcatgctcgaggaagaggctacagtggagaagaccgtcggcccgtcccaggccagcagggagatacggtcgccgtcgcccactcctcccccggtggttggccccaagaagcgggtgcggttcgtgctgccggcagcgagcccgaagccgaatgccggcgtgcaggaggagctgcaggagctgtccgacgcgcgggaggccggcatggcgttcatcctgggccactcgcacgtgaaggcgaagagcgggtccagcttcctccgccggttcgtgatcaacttctgctacgacttcctgcggaggaacagccggggtcccaactacgccgtctccatcccgcacgcctccacgctggaggtgggtatgatgtactatatctgatctgatgactgaacccctgaaactgagggggagaaatataggagcaggaaaagatgaagaggaaatggaacaaaaagttttcagctgtatatgctagatcttgtaagtaactgctggtgagttccgttgtaaatgcagcttagttttcttgttaggccttcggcttctctcgtgaataggagtaccaaaattgcctt

SEQ ID NO: 80418 - DNA, 4500 bp, Zea Mays
ctcaccccgatggcctcggcccccttcccgccagtcgcggcgtcggcggcctccgcgccgccgcgcctggccccgcgccaccccttcgctgctgccgcagccgcgcgccgctcctcgctctcgttccgccccgccgcgcgccggcccgttctcccgctccgctcctccgcggtcgcggctaacaccctccgctgcacgcaccgccgcgccgtctcatccaggtcgaggagacgcgcgcaagaactcggcgcggcgcccgcgttggctgcgtcgacctggggcgtcggcgaggagaagggcggttgcctctcgtgcttccccaagagtaggcggggcaggtcggggctcgcgaggttcgcgccgtgcgcgctcccgcacgcgtcgggactatcgtttcgcagccggttgagcgggtccaaggtcaagcctagccatatattgcacgccgctggacctgatgaaccacatgttgcaagtccaacatggtctgatacttcccttgatacacgtgacatggatcatgctattagtaaggaggagcttgaagatgttctcaacactccgcttcctgagcatccgaagctaattcgtggtcaattgaagaatggacttcggtatcttatcttaccaaataaagttccagcaaacaggtttgaggctcacatggaagttcatgttggatcaattgatgaggaggaggatgagcaaggaattgcccatatgattgaacatgtcgcgtttcttggcagtaaaaaacgtgaaaaacttttggggacaggtgcgaggtctaatgcgtatacagacttccaccatacggtgttccatatccactctccaactaaaacaaaggaatatggtgaagacttactcccttctgtgctggatgcattgaatgagatagcttttcatccaaagttttcttcatctcgtgttgagaaggagagaagagcaattctttctgagctccagatgatgaacacgatagagtatcgtgttgattgccagttgttgcaacatctgcactcagaaaacaaactgagcaacagatttcctattggacttgaagagcaaatacagaaatgggatccggagaagatccgtagatttcacgaacgttggtactaccctgctaatgccactttatatctggtgggggaaattgatgatattcctagagctgtgcgggaaatagaggctgtatttgaacacactctttcagaaaatgaaggaaaccctgtaccgagcactagtccatttggtgctatggcaagcctttttgcaccaaaactcccaagtggctttactacaaacctaactggtgaaaaatcacctgccacagataaaataaagcctgtaaaaagggaaagacaagcagttagaccacctgtagagcataagtggtcccttcctgaagttgctcaggacgccaaacccccagcaatttttcagcatgagttgattcagagtttctctatcaacatgttctgtaagatacctgttagcaaagttcagacctacaaggacctgcgtagtgtactcatgaaaaggatatttttgtctgccctacattttcgaatcaatacaagatacaagagctcaaatcctccttttacttcagttgagctggaccacagtgactctggaagggaagggtgcactgtcactactcttactgtaacggctgaaccccaaaattggagaagtgccatcaaagttgctgttcatgaggtgcgaaggctgaaagaatttggtgttacaatgggagaaatgacccgttacatggatgcactgataaaagatagtgaacagcttgctatgatgattgacagtgttccctcagttgacaacttggacttcatcatggagagtgatgcacttggccacactgtcatggatcagttgcagggacatgaaagtttgcttgcagtagctgaaactgtcacccttgaagaggtcaatactgttggtgcggaagtattggaattcatttcagattttggaaaacccaatgctccccttcctgctgctattgtggcatgtgtacccaaaaaggtacatgttgatgacataggtgaaactgaatttgagatatatccagaagaaatcactgaggctatcaaggcaggtcttgaggaacctatttacccagagcctgagcttgaggtgccaaaggaattgatcactcaatcaaagctcgatgaactgaaattgcaacacaatccatcatttgttcctttaaccaaagaggagaatgcggtgaaagtgtttgacagtgaaactggtatatcacaacgccgtctttctaacggaatttccatcaactacaagattacacaaaatgaagctagggttggtgtcatgcggctcatagtagggggagggagagcgacagaagattctgaatcaaagggatctgtcattgttggtgttcgttccctgagtgaaggtggctgtgttggtaacttttctagggaacaggttgaacttttctgcgtcaataaccttatcaactgctcactggaatcaaatgaggaattcatatttatggaatttagatttgctttaagagacaatggcatgcgtgctgctttccaactccttcatatggtccttgagcataatgtatggctagaagatgcatttgatagagcaatccagttatatttgtcttactatcgctctatccccaaaagtttggaacgttctacagctcataagcttatgttagccatgctaaaccatgatgaaaggtttgtagagccatcgccacattcactgcagaagttgactcttcagtcagttaaagatgctgtcatgaaccagtttgtgggtagcaacatggaggtcagcattgttggtgatttcactgaagaagaagtagaatcttgtgttcttgattatcttgggactgtgagggcttcaagttctccaaccatagaggagcgtattgaaaagatttcctttcgaccatttccatcagatgttcatttccagcaagtatacataaaggacacagacgagagagcctgtgcatatattgcaggccctgctcctaaccgttgggggttcgctactgaaggaaatgacctatttaatgtcattcagagatctgacgctgatgcagaaatatctgaaccagtaagcttggatctaacagggaagagacacatcaatgttcgcagccaccctcttttctttggcatcactttgagtctgcttgctgaaattatcaattctaggctatttacaacagttcgagattccatgggattaacatatgatgtttcttttgaattgaacctttttgacaaattggatcttggttggtatgtgatcgcagtcacttcaactccaagcaaggtccataaagctgttgatgcctgcaaaggtgttctgagaggattgcatagtagccgaattgtggaaagggagctcgatcgggcaaagaggacactgttgatgaaacatgaagctgagacgaagacaaacgcctactggcttggtttgcttgcccatctacaatcttcatctgtaccaagaaaggatgtatcatgcatcaaggaattgacgacattatatgaaaatgcaacgattgaggatctgtatattgcatatgagcacctgaaagttgacgattcttctttgtttgcttgcattgggattgctggcgctgaatctggtgaagatacaaacgatgacgagcctgatgtggatcttcatggcatgggtcccatgggaggccggggtctttcaacaatgaccagaccaaccacatgatcaccattgggatggccaacccttccaagggattaaccttgctccccaagacagggagtcacatggccctaggagactgcatgttgactgtcgtttcccagcaaaactgtttaaagataattcaagcatttgatctggatctggaagactattatatcctgagccacaaccaaaagcttggtggctgcattttttccccgaggagcgttgagttaatgactcagcaaggtcgtgaaaaagaatttattgtttgaggtcatgtagcttcacatgtacagtaaaagcaggttggttcttgcatacagttgttgtaactagtgcgttcagggcattgaagataggatgacagtagatcacagacgttgctgggctgcgaatagcgtaaggcatctgctgtaactgtaacgaaataatgaagcgcagtgtcaggaccctggatagatggcaagtgggtggcatgtgtgcctataaaaagggagaacgtatagaccaagggatatgaaagaaccatttgaacaaactaaatcctctctacctttccattactgttatctcttcataatctctcctctcatgtatcctgtttctctaccttctagaacaatttggctatcagatatcaaattagatcgtcttcctcgctgctatctccttcttcaacccttcttctacctgaacatctctcttctctccgatattcccttctgtggcgctaacacgcag

SEQ ID NO: 80419 - DNA, 4466 bp, Zea Mays
atggcctcggcccccttcccgccagtcgcggcgtcggcggcctccgcgccgccgcgcctggccccgcgccaccccttcgctgctgccgcagccgcgcgccgctcctcgctctcgttccgccccgccgcgcgccggcccgttctcccgctccgctcctccgcggtcgcggctaacaccctccgctgcacgcaccgccgcgccgtctcatccaggtcgaggagacgcgcgcaagaactcggcgcggcgcccgcgttggctgcgtcgacctggggcgtcggcgaggagaagggcggttgcctctcgtgcttccccaagagtaggcggggcaggtcggggctcgcgaggttcgcgccgtgcgcgctcccgcacgcgtcgggactatcgtttcgcagccggttgagcgggtccaaggtcaagcctagccatatattgcacgccgctggacctgatgaaccacatgttgcaagtccaacatggtctgatacttcccttgatacacgtgacatggatcatgctattagtaaggaggagcttgaagatgttctcaacactccgcttcctgagcatccgaagctaattcgtggtcaattgaagaatggacttcggtatcttatcttaccaaataaagttccagcaaacaggtttgaggctcacatggaagttcatgttggatcaattgatgaggaggaggatgagcaaggaattgcccatatgattgaacatgtcgcgtttcttggcagtaaaaaacgtgaaaaacttttggggacaggtgcgaggtctaatgcgtatacagacttccaccatacggtgttccatatccactctccaactaaaacaaaggaatatggtgaagacttactcccttctgtgctggatgcattgaatgagatagcttttcatccaaagttttcttcatctcgtgttgagaaggagagaagagcaattctttctgagctccagatgatgaacacgatagagtatcgtgttgattgccagttgttgcaacatctgcactcagaaaacaaactgagcaacagatttcctattggacttgaagagcaaatacagaaatgggatccggagaagatccgtagatttcacgaacgttggtactaccctgctaatgccactttatatctggtgggggaaattgatgatattcctagagctgtgcgggaaatagaggctgtatttgaacacactctttcagaaaatgaaggaaaccctgtaccgagcactagtccatttggtgctatggcaagcctttttgcaccaaaactcccaagtggctttactacaaacctaactggtgaaaaatcacctgccacagataaaataaagcctgtaaaaagggaaagacaagcagttagaccacctgtagagcataagtggtcccttcctgaagttgctcaggacgccaaacccccagcaatttttcagcatgagttgattcagagtttctctatcaacatgttctgtaagatacctgttagcaaagttcagacctacaaggacctgcgtagtgtactcatgaaaaggatatttttgtctgccctacattttcgaatcaatacaagatacaagagctcaaatcctccttttacttcagttgagctggaccacagtgactctggaagggaagggtgcactgtcactactcttactgtaacggctgaaccccaaaattggagaagtgccatcaaagttgctgttcatgaggtgcgaaggctgaaagaatttggtgttacaatgggagaaatgacccgttacatggatgcactgataaaagatagtgaacagcttgctatgatgattgacagtgttccctcagttgacaacttggacttcatcatggagagtgatgcacttggccacactgtcatggatcagttgcagggacatgaaagtttgcttgcagtagctgaaactgtcacccttgaagaggtcaatactgttggtgcggaagtattggaattcatttcagattttggaaaacccaatgctccccttcctgctgctattgtggcatgtgtacccaaaaaggtacatgttgatgacataggtgaaactgaatttgagatatatccagaagaaatcactgaggctatcaaggcaggtcttgaggaacctatttacccagagcctgagcttgaggtgccaaaggaattgatcactcaatcaaagctcgatgaactgaaattgcaacacaatccatcatttgttcctttaaccaaagaggagaatgcggtgaaagtgtttgacagtgaaactggtatatcacaacgccgtctttctaacggaatttccatcaactacaagattacacaaaatgaagctagggttggtgtcatgcggctcatagtagggggagggagagcgacagaagattctgaatcaaagggatctgtcattgttggtgttcgttccctgagtgaaggtggctgtgttggtaacttttctagggaacaggttgaacttttctgcgtcaataaccttatcaactgctcactggaatcaaatgaggaattcatatttatggaatttagatttgctttaagagacaatggcatgcgtgctgctttccaactccttcatatggtccttgagcataatgtatggctagaagatgcatttgatagagcaatccagttatatttgtcttactatcgctctatccccaaaagtttggaacgttctacagctcataagcttatgttagccatgctaaaccatgatgaaaggtttgtagagccatcgccacattcactgcagaagttgactcttcagtcagttaaagatgctgtcatgaaccagtttgtgggtagcaacatggaggtcagcattgttggtgatttcactgaagaagaagtagaatcttgtgttcttgattatcttgggactgtgagggcttcaagttctccaaccatagaggagcgtattgaaaagatttcctttcgaccatttccatcagatgttcatttccagcaagtatacataaaggacacagacgagagagcctgtgcatatattgcaggccctgctcctaaccgttgggggttcgctactgaaggaaatgacctatttaatgtcattcagagatctgacgctgatgcagaaatatctgaaccagtaagcttggatctaacagggaagagacacatcaatgttcgcagccaccctcttttctttggcatcactttgagtctgcttgctgaaattatcaattctaggctatttacaacagttcgagattccatgggattaacatatgatgtttcttttgaattgaacctttttgacaaattggatcttggttggtatgtgatcgcagtcacttcaactccaagcaaggtccataaagctgttgatgcctgcaaaggtgttctgagaggattgcatagtagccgaattgtggaaagggagctcgatcgggcaaagaggacactgttgatgaaacatgaagctgagacgaagacaaacgcctactggcttggtttgcttgcccatctacaatcttcatctgtaccaagaaaggatgtatcatgcatcaaggaattgacgacattatatgaaaatgcaacgattgaggatctgtatattgcatatgagcacctgaaagttgacgattcttctttgtttgcttgcattgggattgctggcgctgaatctggtgaagatacaaacgatgacgagcctgatgtggatcttcatggcatgggtcccatgggaggccggggtctttcaacaatgaccagaccaaccacatgatcaccattgggatggccaacccttccaagggagtcacatggccctaggagactgcatgttgactgtcgtttcccagcaaaactgtttaaagataattcaagcatttgatctggatctggaagactattatatcctgagccacaaccaaaagcttggtggctgcattttttccccgaggagcgttgagttaatgactcagcaaggtcgtgaaaaagaatttattgtttgaggtcatgtagcttcacatgtacagtaaaagcaggttggttcttgcatacagttgttgtaactagtgcgttcagggcattgaagataggatgacagtagatcacagacgttgctgggctgcgaatagcgtaaggcatctgctgtaactgtaacgaaataatgaagcgcagtgtcaggaccctggatagatggcaagtgggtggcatgtgtgcctataaaaagggagaacgtatagaccaagggatatgaaagaaccatttgaacaaactaaatcctctctacctttccattactgttatctcttcataatctctcctctcatgtatcctgtttctctaccttctagaacaatttggctatcagatatcaaattagatcgtcttcctcgctgctatctccttcttcaacccttcttctacctgaacatctctcttctctccgatattcccttctgtggcgctaacacgcag

SEQ ID NO: 80420 - DNA, 4481 bp, Zea Mays
atggcctcggcccccttcccgccagtcgcggcgtcggcggcctccgcgccgccgcgcctggccccgcgccaccccttcgctgctgccgcagccgcgcgccgctcctcgctctcgttccgccccgccgcgcgccggcccgttctcccgctccgctcctccgcggtcgcggctaacaccctccgctgcacgcaccgccgcgccgtctcatccaggtcgaggagacgcgcgcaagaactcggcgcggcgcccgcgttggctgcgtcgacctggggcgtcggcgaggagaagggcggttgcctctcgtgcttccccaagagtaggcggggcaggtcggggctcgcgaggttcgcgccgtgcgcgctcccgcacgcgtcgggactatcgtttcgcagccggttgagcgggtccaaggtcaagcctagccatatattgcacgccgctggacctgatgaaccacatgttgcaagtccaacatggtctgatacttcccttgatacacgtgacatggatcatgctattagtaaggaggagcttgaagatgttctcaacactccgcttcctgagcatccgaagctaattcgtggtcaattgaagaatggacttcggtatcttatcttaccaaataaagttccagcaaacaggtttgaggctcacatggaagttcatgttggatcaattgatgaggaggaggatgagcaaggaattgcccatatgattgaacatgtcgcgtttcttggcagtaaaaaacgtgaaaaacttttggggacaggtgcgaggtctaatgcgtatacagacttccaccatacggtgttccatatccactctccaactaaaacaaaggaatatggtgaagacttactcccttctgtgctggatgcattgaatgagatagcttttcatccaaagttttcttcatctcgtgttgagaaggagagaagagcaattctttctgagctccagatgatgaacacgatagagtatcgtgttgattgccagttgttgcaacatctgcactcagaaaacaaactgagcaacagatttcctattggacttgaagagcaaatacagaaatgggatccggagaagatccgtagatttcacgaacgttggtactaccctgctaatgccactttatatctggtgggggaaattgatgatattcctagagctgtgcgggaaatagaggctgtatttgaacacactctttcagaaaatgaaggaaaccctgtaccgagcactagtccatttggtgctatggcaagcctttttgcaccaaaactcccaagtggctttactacaaacctaactggtgaaaaatcacctgccacagataaaataaagcctgtaaaaagggaaagacaagcagttagaccacctgtagagcataagtggtcccttcctgaagttgctcaggacgccaaacccccagcaatttttcagcatgagttgattcagagtttctctatcaacatgttctgtaagatacctgttagcaaagttcagacctacaaggacctgcgtagtgtactcatgaaaaggatatttttgtctgccctacattttcgaatcaatacaagatacaagagctcaaatcctccttttacttcagttgagctggaccacagtgactctggaagggaagggtgcactgtcactactcttactgtaacggctgaaccccaaaattggagaagtgccatcaaagttgctgttcatgaggtgcgaaggctgaaagaatttggtgttacaatgggagaaatgacccgttacatggatgcactgataaaagatagtgaacagcttgctatgatgattgacagtgttccctcagttgacaacttggacttcatcatggagagtgatgcacttggccacactgtcatggatcagttgcagggacatgaaagtttgcttgcagtagctgaaactgtcacccttgaagaggtcaatactgttggtgcggaagtattggaattcatttcagattttggaaaacccaatgctccccttcctgctgctattgtggcatgtgtacccaaaaaggtacatgttgatgacataggtgaaactgaatttgagatatatccagaagaaatcactgaggctatcaaggcaggtcttgaggaacctatttacccagagcctgagcttgaggtgccaaaggaattgatcactcaatcaaagctcgatgaactgaaattgcaacacaatccatcatttgttcctttaaccaaagaggagaatgcggtgaaagtgtttgacagtgaaactggtatatcacaacgccgtctttctaacggaatttccatcaactacaagattacacaaaatgaagctagggttggtgtcatgcggctcatagtagggggagggagagcgacagaagattctgaatcaaagggatctgtcattgttggtgttcgttccctgagtgaaggtggctgtgttggtaacttttctagggaacaggttgaacttttctgcgtcaataaccttatcaactgctcactggaatcaaatgaggaattcatatttatggaatttagatttgctttaagagacaatggcatgcgtgctgctttccaactccttcatatggtccttgagcataatgtatggctagaagatgcatttgatagagcaatccagttatatttgtcttactatcgctctatccccaaaagtttggaacgttctacagctcataagcttatgttagccatgctaaaccatgatgaaaggtttgtagagccatcgccacattcactgcagaagttgactcttcagtcagttaaagatgctgtcatgaaccagtttgtgggtagcaacatggaggtcagcattgttggtgatttcactgaagaagaagtagaatcttgtgttcttgattatcttgggactgtgagggcttcaagttctccaaccatagaggagcgtattgaaaagatttcctttcgaccatttccatcagatgttcatttccagcaagtatacataaaggacacagacgagagagcctgtgcatatattgcaggccctgctcctaaccgttgggggttcgctactgaaggaaatgacctatttaatgtcattcagagatctgacgctgatgcagaaatatctgaaccagtaagcttggatctaacagggaagagacacatcaatgttcgcagccaccctcttttctttggcatcactttgagtctgcttgctgaaattatcaattctaggctatttacaacagttcgagattccatgggattaacatatgatgtttcttttgaattgaacctttttgacaaattggatcttggttggtatgtgatcgcagtcacttcaactccaagcaagctgttgatgcctgcaaaggtgttctgagaggattgcatagtagccgaattgtggaaagggagctcgatcgggcaaagaggacactgttgatgaaacatgaagctgagacgaagacaaacgcctactggcttggtttgcttgcccatctacaatcttcatctgtaccaagaaaggatgtatcatgcatcaaggaattgacgacattatatgaaaatgcaacgattgaggatctgtatattgcatatgagcacctgaaagttgacgattcttctttgtttgcttgcattgggattgctggcgctgaatctggtgaagatacaaacgatgacgagcctgatgtggatcttcatggcatgggtcccatgggaggccggggtctttcaacaatgaccagaccaaccacatgatcaccattgggatggccaacccttccaagggattaaccttgctccccaagacagggagtcacatggccctaggagactgcatgttgactgtcgtttcccagcaaaactgtttaaagataattcaagcatttgatctggatctggaagactattatatcctgagccacaaccaaaagcttggtggctgcattttttccccgaggagcgttgagttaatgactcagcaaggtcgtgaaaaagaatttattgtttgaggtcatgtagcttcacatgtacagtaaaagcaggttggttcttgcatacagttgttgtaactagtgcgttcagggcattgaagataggatgacagtagatcacagacgttgctgggctgcgaatagcgtaaggcatctgctgtaactgtaacgaaataatgaagcgcagtgtcaggaccctggatagatggcaagtgggtggcatgtgtgcctataaaaagggagaacgtatagaccaagggatatgaaagaaccatttgaacaaactaaatcctctctacctttccattactgttatctcttcataatctctcctctcatgtatcctgtttctctaccttctagaacaatttggctatcagatatcaaattagatcgtcttcctcgctgctatctccttcttcaacccttcttctacctgaacatctctcttctctccgatattcccttctgtggcgctaacacgcag

SEQ ID NO: 80421 - DNA, 4455 bp, Zea Mays
atggcctcggcccccttcccgccagtcgcggcgtcggcggcctccgcgccgccgcgcctggccccgcgccaccccttcgctgctgccgcagccgcgcgccgctcctcgctctcgttccgccccgccgcgcgccggcccgttctcccgctccgctcctccgcggtcgcggctaacaccctccgctgcacgcaccgccgcgccgtctcatccaggtcgaggagacgcgcgcaagaactcggcgcggcgcccgcgttggctgcgtcgacctggggcgtcggcgaggagaagggcggttgcctctcgtgcttccccaagagtaggcggggcaggtcggggctcgcgaggttcgcgccgtgcgcgctcccgcacgcgtcgggactatcgtttcgcagccggttgagcgggtccaaggtcaagcctagccatatattgcacgccgctggacctgatgaaccacatgttgcaagtccaacatggtctgatacttcccttgatacacgtgacatggatcatgctattagtaaggaggagcttgaagatgttctcaacactccgcttcctgagcatccgaagctaattcgtggtcaattgaagaatggacttcggtatcttatcttaccaaataaagttccagcaaacaggtttgaggctcacatggaagttcatgttggatcaattgatgaggaggaggatgagcaaggaattgcccatatgattgaacatgtcgcgtttcttggcagtaaaaaacgtgaaaaacttttggggacaggtgcgaggtctaatgcgtatacagacttccaccatacggtgttccatatccactctccaactaaaacaaaggaatatggtgaagacttactcccttctgtgctggatgcattgaatgagatagcttttcatccaaagttttcttcatctcgtgttgagaaggagagaagagcaattctttctgagctccagatgatgaacacgatagagtatcgtgttgattgccagttgttgcaacatctgcactcagaaaacaaactgagcaacagatttcctattggacttgaagagcaaatacagaaatgggatccggagaagatccgtagatttcacgaacgttggtactaccctgctaatgccactttatatctggtgggggaaattgatgatattcctagagctgtgcgggaaatagaggctgtatttgaacacactctttcagaaaatgaaggaaaccctgtaccgagcactagtccatttggtgctatggcaagcctttttgcaccaaaactcccaagtggctttactacaaacctaactggtgaaaaatcacctgccacagataaaataaagcctgtaaaaagggaaagacaagcagttagaccacctgtagagcataagtggtcccttcctgaagttgctcaggacgccaaacccccagcaatttttcagcatgagttgattcagagtttctctatcaacatgttctgtaagatacctgttagcaaagttcagacctacaaggacctgcgtagtgtactcatgaaaaggatatttttgtctgccctacattttcgaatcaatacaagatacaagagctcaaatcctccttttacttcagttgagctggaccacagtgactctggaagggaagggtgcactgtcactactcttactgtaacggctgaaccccaaaattggagaagtgccatcaaagttgctgttcatgaggtgcgaaggctgaaagaatttggtgttacaatgggagaaatgacccgttacatggatgcactgataaaagatagtgaacagcttgctatgatgattgacagtgttccctcagttgacaacttggacttcatcatggagagtgatgcacttggccacactgtcatggatcagttgcagggacatgaaagtttgcttgcagtagctgaaactgtcacccttgaagaggtcaatactgttggtgcggaagtattggaattcatttcagattttggaaaacccaatgctccccttcctgctgctattgtggcatgtgtacccaaaaaggtacatgttgatgacataggtgaaactgaatttgagatatatccagaagaaatcactgaggctatcaaggcaggtcttgaggaacctatttacccagagcctgagcttgaggtgccaaaggaattgatcactcaatcaaagctcgatgaactgaaattgcaacacaatccatcatttgttcctttaaccaaagaggagaatgcggtgaaagtgtttgacagtgaaactggtatatcacaacgccgtctttctaacggaatttccatcaactacaagattacacaaaatgaagctagggttggtgtcatgcggctcatagtagggggagggagagcgacagaagattctgaatcaaagggatctgtcattgttggtgttcgttccctgagtgaaggtggctgtgttggtaacttttctagggaacaggttgaacttttctgcgtcaataaccttatcaactgctcactggaatcaaatgaggaattcatatttatggaatttagatttgctttaagagacaatggcatgcgtgctgctttccaactccttcatatggtccttgagcataatgtatggctagaagatgcatttgatagagcaatccagttatatttgtcttactatcgctctatccccaaaagtttggaacgttctacagctcataagcttatgttagccatgctaaaccatgatgaaaggtttgtagagccatcgccacattcactgcagaagttgactcttcagtcagttaaagatgctgtcatgaaccagtttgtgggtagcaacatggaggtcagcattgttggtgatttcactgaagaagaagtagaatcttgtgttcttgattatcttgggactgtgagggcttcaagttctccaaccatagaggagcgtattgaaaagatttcctttcgaccatttccatcagatgttcatttccagcaagtatacataaaggacacagacgagagagcctgtgcatatattgcaggccctgctcctaaccgttgggggttcgctactgaaggaaatgacctatttaatgtcattcagagatctgacgctgatgggaagagacacatcaatgttcgcagccaccctcttttctttggcatcactttgagtctgcttgctgaaattatcaattctaggctatttacaacagttcgagattccatgggattaacatatgatgtttcttttgaattgaacctttttgacaaattggatcttggttggtatgtgatcgcagtcacttcaactccaagcaaggtccataaagctgttgatgcctgcaaaggtgttctgagaggattgcatagtagccgaattgtggaaagggagctcgatcgggcaaagaggacactgttgatgaaacatgaagctgagacgaagacaaacgcctactggcttggtttgcttgcccatctacaatcttcatctgtaccaagaaaggatgtatcatgcatcaaggaattgacgacattatatgaaaatgcaacgattgaggatctgtatattgcatatgagcacctgaaagttgacgattcttctttgtttgcttgcattgggattgctggcgctgaatctggtgaagatacaaacgatgacgagcctgatgtggatcttcatggcatgggtcccatgggaggccggggtctttcaacaatgaccagaccaaccacatgatcaccattgggatggccaacccttccaagggattaaccttgctccccaagacagggagtcacatggccctaggagactgcatgttgactgtcgtttcccagcaaaactgtttaaagataattcaagcatttgatctggatctggaagactattatatcctgagccacaaccaaaagcttggtggctgcattttttccccgaggagcgttgagttaatgactcagcaaggtcgtgaaaaagaatttattgtttgaggtcatgtagcttcacatgtacagtaaaagcaggttggttcttgcatacagttgttgtaactagtgcgttcagggcattgaagataggatgacagtagatcacagacgttgctgggctgcgaatagcgtaaggcatctgctgtaactgtaacgaaataatgaagcgcagtgtcaggaccctggatagatggcaagtgggtggcatgtgtgcctataaaaagggagaacgtatagaccaagggatatgaaagaaccatttgaacaaactaaatcctctctacctttccattactgttatctcttcataatctctcctctcatgtatcctgtttctctaccttctagaacaatttggctatcagatatcaaattagatcgtcttcctcgctgctatctccttcttcaacccttcttctacctgaacatctctcttctctccgatattcccttctgtggcgctaacacgcag

SEQ ID NO: 80422 - DNA, 455 bp, Zea Mays
ttcgatcgaagaagcacggccacattcgaagtttgaaatggtgcaagtgaaaaagcacagttctctcaacagatgtacacggagaatgctattcgctctagtggaaaaagtagcgatttatggccataccaagtgtcactctattctctattgtgcctgtctcaatatctacaacagtcagcagcagcactaccatcttctccattctctatttccctcctgctcataaacataaaacaccgcttcactaaaacctacgctaatcagatagaaaacgttgaatagctaacgaaagaatagaaccctctcactactctagcactggggtaactcaaaacctattccctaagcaaagaagctgtatcttctcctacctccctcactcacaatccaagccacagacctccagaacaggtccatcgaacttggtggcgaaggggctcacccggacccac

SEQ ID NO: 80423 - DNA, 320 bp, Zea Mays
catcttcgccccaaccccaaattagaacccctcccccgtgagacccgcaccgccgcacgcgcatcacagggtacactccacctctccttcccacgctcactctccctgttacgacgtccgcgtccatcggcacctacgccacccgtctcccccgcgtctgcctgcgccaccatcgcgcggtctcggactctcggtgcctcgcgtcagcctgataaatgaaagcacacgctgtcgtctcagtctgataaccagacacaatacgccaatgcggcaacaatggaggtcctcccccaggcttggccgtgggccgcctgtccgcc

SEQ ID NO: 80424 - DNA, 635 bp, Zea Mays
atcactttgtccatagccacaataaagatcaagctggagtggtcagatgtccctctgcgtggccaaaacgttctaggaaggagttaaattcgtcgtgcccctaactcctttgttcaaattggttgtgcgccatggtccgccatccccttgcgaccatgtagcccaagtataaaatcctgacctcgcccgagctcgccacagcgtgctctttaccatgccggacctcgccgtgctctttctcacttgcctcaccgtgaccggcactccctgagtgtggagtccagaacatcgtcgcgccgcggcaggccagcgccgtggacaacttcaccttgaccgatcaacctgtatcttccccgagcggtttagtgcgcgcaccgagaacttggtgagtccttgatgcactccactggtgtcatgactagagcaggtgggtgcttggcgaggatgtagcggacttgtggccggtttgtgttggtcggggacatgttgctgtggtgattaaggaacgttcgagagcagtgtcgccgcgtccgtggtcgctagttcaccggggtgggcggcggaagagtcggggatgagcatttgtaaatagaacaaaccaaggggcttaggtgattcgatcagagagacagatg

SEQ ID NO: 80425 - DNA, 789 bp, Zea Mays
ggccgttctttctcctccagacctgcccctgcccctgcctggcaatcttctcgtctctctctgccccagaccccagtgccagtgccccagcggcgcaggcgcaggcgcagcagcggacggagcctgccctccctctccctcccagaccccagtgaaggctggctggctgatggcgagagtggcatggcagcctgacaagaaaacaaattcagacacaccattactgctgccgctgctacctttcgtgtccgacgagcacactccattccctccctctccctgcaccgtaccgtggttcggttcggttcgtttgacccagcgatggcatctttgatttggcatcattttgccctgcccgtcctcatcaaagctccaaactcgagcggaacttttgggctttttcgtgagtggatccatcatcaacagtgacacagggccaggggcgcagcgtccgaggtaaagagttccggcactgacagcgtgcgtagagctgctggtggtgatcttttctttccctgctgtggtgtgtcaaggacttcagaaggcgaggaaacggatggagtgccttggctaggagcagtgtgcaagcacatacaacatggctcgctttggaagcttcaatggcaggctgtatctgctttacaaaacatcgattccatggtgctttctcaacaccatctactcaggactgttaaggagaaatcatgcgccaattttataaactttaatttaattttatgtatatacatgaaatcaatatttttttcccttgttccaaccagactatac

SEQ ID NO: 80426 - DNA, 795 bp, Zea Mays
ggccgttctttctcctccagacctgcccctgcccctgcctggcaatcttctcgtctctctctgccccagaccccagtgccagtgccccagcggcgcaggcgcaggcgcagcagcggacggagcctgccctccctctccctcccagaccccagtgaaggctggctggctgatggcgagagtggcatggcagcctgacaagaaaacaaattcagacacaccattactgctgccgctgctacctttcgtgtccgacgagcacactccattccctccctctccctgcaccgtaccgtggttcggttcggttcgtttgacccagcgatggcatctttgatttggcatcattttgccctgcccgtcctcatcaaagctccaaactcgagcggaacttttgggctttttcgtgagtggatccatcatcaacagtgacattgcagcagggccaggggcgcagcgtccgaggtaaagagttccggcactgacagcgtgcgtagagctgctggtggtgatcttttctttccctgctgtggtgtgtcaaggacttcagaaggcgaggaaacggatggagtgccttggctaggagcagtgtgcaagcacatacaacatggctcgctttggaagcttcaatggcaggctgtatctgctttacaaaacatcgattccatggtgctttctcaacaccatctactcaggactgttaaggagaaatcatgcgccaattttataaactttaatttaattttatgtatatacatgaaatcaatatttttttcccttgttccaaccagactatac

SEQ ID NO: 80427 - DNA, 1709 bp, Zea Mays
ctcgataaaggtttagttattcgtcaaagaacacgttttgagtataggtaaatcataccaaatccatacgcacatgtgacatgaggctgccgggctagatgaagtccagaattctgtagaactcgacaagaactggtgccatcacgtgggttatgctcccgctgtagcaataattgaagaaacgtctagatcgctcgtccggtgtggtctctggacttgcttgccgttcacttctcttcagcggcagcgtggcaaggcaacgagagcaacgaagagtattcaaaccgaaaacaatggatccggtgcggaagagcgtgtgcgtgaccggcgctggcggcttcgtcgcgtcggagctggtgaagctcctcctctcccggggccaatacgcggtccgcggcaccgtgcgcgaccctgatgcggatagagagacgtgggaatgtggaaccgcatttttcttggaagtcgaaagaagctccagattctttataaaaaaaggtgctagcaagaatgcccatctcaaggtgctggaaggagctgaggaaaggttgcagcttctcaaggctgatctgatggactacgacagcattgcatcagcagttgccggctgtgagggtgtcttccatgtagctagccctgtcctttcccatcgaccctccaaccctgaggtggaggtcatagctcccgctgtaataggtacaaccaatgtgttaaaggcttgctatgaggcaaaagttaggcgagttgtggtggtgtcttcatgtggagctgtgtatgctaatcctatttatccgaagggtaaggtgtttgatgaagactgctggtcagatgaggattactgcaggaagaaggaggattggtatttagtttccaaaacactgtcggaacgagaggctcttgcttttgcagcaaaaacagggctggacgttgtaactgtttgtccgtcattagtatttggacccttgatgcagcctacagtaaatttgagcagcgaaatgatccttaaatatttcaaagcagatctcgagactgttgaaaatgtactcagtaatatggtggatattcgtgatgttgctgatgctcttcttctgacttacgaaaagccagaagcgtctggacgatacatctgcagttcacatgcaataaaaatttctgatatgataaacatactgaagaccatgtatccgtcttacccttatcccaaaaattttgtggaagatgatgtcaactctgtatacagctctgagaaactgcagaagctggggtggagcttcaagcctatagaggaatccctccgtgacactgttgaatcctacaaggcatttggcatcctgaattgaacatcgaactaggattgtttccatctgctgttgcctccgaactcctcctgaataatgtaggcgcagtgacagcagcactgccgttctctttatttttcaacactattatgtagtggttcaggccaaataagtaggcccggtgctgactgttgtatggtttgtggcctattgtcgttgctaaaaactagaaatatgcgtactaatgttgcattgctgcacttgatttgcttgtcgtcattctgatgcattttgatttgagcttttgaaagatgcagcatatgattttctgaaacggagatcgacagccagttggggtaaatgaagtgtagaggtccgttatttgtgataaaaaaggcaaactaaaaaaccata

SEQ ID NO: 80428 - DNA, 1445 bp, Zea Mays
tcgcagttatggcggccgaatcggccgccgtatcttaggcggggtgtggcgctggacgccagcgtccaaacaggcccttagccacaaacaaacatgcccgtgtagaatcactgtagcaataaagaagcgtctagagcgctcgtccggtctgaactgtggtctctgtacttccgttcacttcttcagcggcggcgtgacaacgagagcaagaaagtatcaaaacccgagagcaatggaggcggtggggaagagcgtgtgcgtgaccggcgcgggcggcttcatcgcgtcgtggctggtgaagctcctcctctgccggggccaatacaaggtccgcggcaccgtgcgcgaccctggtgctagcaagaatgctcatctcaaggtgctggaaggagctggggaaaggttgcagcttgtcaaggctgatttgttggactacagcagtgttgcttcagcaattgccggctgtgagggtgtcttccatgtagctagccctgtcccttccggtggaggtcataggtcctgctgtaacaggtacaaccaatgtgttaaaggcttgctatgaggcaaaagttgggcgagttgtggtggtgtcttcatgtgcagctgtctatgctaatcctaattatcccaagggtaaggtctttgatgaagactgctggtcagatgaagcttactgcaggaagaacgaggattggtattttgtttccaagacactggcggaacgagaggcttttgcttatgcagcaaaaacagggctggatgttgtaactatttgcccgtcattagtatttggacccttgatgcagcctacagtaaattcgagcagcaaaatcatccttaaatatttcacaggagatcgcgagactgttgaaaacatactcagaaatatggtggatgttcgtgatgttgctgatgctcttcttctggcttacgaaaagccagaagcgtctggacgatacatctgcagttcacatgcaataaaagttgctgatatgataaacatactgaagaccttgtatccatcttacccttatcccaaaaatttcgtggaagatgatgacaactctgtatacagctctgagaaactgcagaagctggggtggagcttcaagcctatagaggaatccctccgtgacactgttgaatcctacaaagcatttggcatcctgaattgaacatccagctaggactgttccatctgctgtttttgcctccgaactctttctgaataatgtatgtaggcagtgaaacagcattgccagcaggttaatcctggcatcatgctggagcagcactgtagttctatctttttcttttttttttccatccccaatactatctagtggttcaggaccaaataagtaggcccagtgctgactggtttatggcttgtggcctattgtcgctgctaaaactagaagcgttcgtactatcttgcactcatg

SEQ ID NO: 80429 - DNA, 820 bp, Zea Mays
gtccgaccccggtgagctctctcgccgcgcgcacatctcgccgagtgtaaccgctttcctcgtatggcccgtgcctcgcaggtcgctcggactcggaggccggcgagccgctcgttctgggcgccgggatgctgctcgtccatctccgcgcggcggaccggtgggagcgcgtggccgcggtgctgcccgggaggacggtggccgacgtcacggcgcactacgacgacctggaggtcgctgtcggctccatcgaggccggcttcgtgcccttccccgctacggcggctgcggcggtggcgcgtcgcagtgggccgccgggttcacgttcgagtgggacggcgacgccggcgggacgggctttaagcgctcctgccacgtggttggcggcggcaagcgcgagcgcgggccagaccacgagcgcaagaagggcatcccctggacgaaggaggagcacaagcataattgctgactcaagcctgtcgaatcatcatgaggattcccttggctctggtttaccctccatatctactggtaaaccttttgatagtgacgaggtaccaccaggagtgacattgactgcccagtttccgtaccatttggccaataaggtcattggaaagctgatgatggatatgtcaagtctatatgatgttggtcgcaataagagatctgctggtctactgatcgtagatcatatagttgatctcctaactccttgcttccatggtgactcatttcttgataggatgctatccttgttgccacacaaggaaaatatgcgatccaattctgcagcgaaaaatccacaaactccaagtaa

SEQ ID NO: 80430 - DNA, 1800 bp, Zea Mays
atacaactgtgtacatgatggcacaggagcagtagtatctctaagcaatgttctgcactgtatcatccgtattatatataagtgaataaaaaaactgcagattttattgtggaattccaaaagcagctacagctagcctacatcgccggtctagctcaacaagattggtaccgtatctataagactataagataaattcgcctgatatatctccaagaaaaagcaagcccatcgtcctaccgtattagcaatggaggcagcagcaggagaggggccgacgacgacgatgaagacggtgtgcgtgaccggcgcggggggtttcgtggcctcgtggctcgtcgagcgcctcctcgccggcggacgatacaagatccacggcaccgtccgcgatcccggcgacgccaagaacgcgcacctgctggggctggacggcgccgcggagcggctgcggctgttcaaggccgacctgctcgacttcggcagcctggcggcggccattgcaggctgtgacggcgtcttccacgtggcctgccccgtccccgactataccctcaccgaccccgagaccgagctgctggctcctgccgtgacgggcaccatgaacatcctcagggcgtgctccgacgcccatgtcaggagggtcgtcgtggtctcctctctctcggctgtcatgataaaccctgactggggcgagtgcaaggtcatggacgaaggttgctggtctgatgtcgacctctgcagaactactaaggtatatggaggcacgacatgaagagcatctaactacagtaaaacacattttgaggtacatgctactacaatcaaggttgggggtattctatccaaggaacaagaacatgatagaaatgtcgggatgcagtgataaggacctagctggtgatatggacagtaggaagagcacttcaagtaccatattcttcctataaaaaagtactatcaactagcaatcctccaagcaaagtgtggtggctctcttaagttgcgaagctaagtatatagcagctgcaacaactgcctaccaagctatttggctgacagggttgctgtttgaattgaaggatgaaagagcaagtgtgttagtgttgagtgtgtcattgtccaagaatcatgttctcatgattgatccaaacatactgatgtgagatttcatttgattcgggtatatgacaacatgaagaaaattgaagtgaagttcatcagaacaaaagagtaattgggggatattctcaccaagcctttttgcaagaataagtttgctgaattttgcaacaagattgctatgtgtatcaaggattatggggagagttgctaaaataaaccttggacacacttgtttcaatcttcagtttgtctatctattcattttcattctattgccggtgttcgatttcagttttgtttatatgccgctcctatcagtcttgtggtcaaagctagttggttgttagtgtaagcatgatctgatcgtgtgtagtgaggaagttagtgtgtatgcatggtgttgtgtttgtgtgtgaagtagaatcgcactaatgtaactagtgtcttttagttgttgcattcaatcaatgcaatatgaaaaaagctactgctagttagagcatcaccaatctgtgttctattccctagcatcacatgtgtatgttggtgatcatttgcaagcttgtcgatgacctagtggaggtggtctcaccagcgatttgctaacaggcgctatagtgcctaatcttgttgcgccagcacaatgtggcactagcacgtagtagtgctcgagtcagc

SEQ ID NO: 80431 - DNA, 1092 bp, Zea Mays
ctctaagcaatgttctgcactgtatcatccgtattatatataagtgaataaaaaaactgcagattttattgtggaattccaaaagcagctacagctagcctacatcgccggtctagctcaacaagattggtaccgtatctataagactataagataaattcgcctgatatatctccaagaaaaagcaagcccatcgtcctaccgtattagcaatggaggcagcagcaggagaggggccgacgacgacgatgaagacggtgtgcgtgaccggcgcggggggtttcgtggcctcgtggctcgtcgagcgcctcctcgccggcggacgatacaagatccacggcaccgtccgcgatcccggcgacgccaagaacgcgcacctgctggggctggacggcgccgcggagcggctgcggctgttcaaggccgacctgctcgacttcggcagcctggcggcggccattgcaggctgtgacggcgtcttccacgtggcctgccccgtccccgactataccctcaccgaccccgaggcaccagctagctagcactcgcccttaatttctcgtcatgcatgcatttgccttcgcttcgatctccatcggacagacagacactcactgactcacacacagtacggcgtacgtctccatgtgttgttgcagaccgagctgctggctcctgccgtgacgggcaccatgaacatcctcagggcgtgctccgacgcccatgtcaggagggtcgtcgtggtctcctctctctcggctgtcatgataaaccctgactggggcgagtgcaaggtcatggacgaaggttgctggtctgatgtcgacctctgcagaactactaagggcatgtacaatgctgaaggcaactaccatctccaagtgttttgaggaatgcagaggcaagactgtgagaaaggatgttatgtactatatttaattcatacacaatctttatcactatgcatcgatcaagaatatattggatatttgtagccattttcttgcatgtttatggtggatactaaaataaggcatgtgaatttcatgtagaatcataaatataatttatatttatataataagcactcat

SEQ ID NO: 80432 - DNA, 2276 bp, Zea Mays
ccacgttccacttacccatttctcctccagctctccccatcccctcctccctcccgtccggccgttggcctctactagtagtctctcgcgcgctcgttgctaggcagttggcaaagcagtccttaccaactgcccttccccaccccgctcccgcgtaatccaaccgctaataataaccgctgctctgattagcgcaatctccaccgctataattacgctcccgcctgcgcgcgcgggcctatcagccctagctagctacccagccgcctccgctgctcgcctcctcacttgcgcgtgtcgtgtcgtgtcgtgttgcgctaagtcagctgcttgctactagggttagggtttgcggctgcgcgctcgcgtgcgtgcatgcgcgtgggttggccgcggcagggatgacgccgcagcggtcgccgatgggtaccggaggaggaggaagtagcggcggaggcggcgggggaccgccggcgctacactacctgagcggcccgtacggagacaccacctttaccaaggttttcgtgggcggccttgcctgggagacgcgaagcgagggccttcgcgcgcactttgaggtctatggggacatcctcgaggccgttgtcatcaccgaccgcgccacgggccgctccaagggctacggattcgtaaccttccgggacccagagtcagcgaggatggcctgcatggacccatacccagtgatcgacggccggcgtgctaattgcaaccttgccatcttagggcggcctggtccagctgtgccttttgtagcacctacaaggccggtcatcccatacaatggaggtgtggcggttccagggggcatgtatgtgcaaagcccaacatatcagcaatccccttacaactactcacaggcctttgtatatccttatgggccatcagcatatggaccagaatacctatatcagcagctttgtagaatgcatacggtccatatgttggacaacagtacgtgccggtttacggtggcccaaggacagtaggcccagcagtctacccatatgggcagtttggccaacctgtaccaagcgatcatgcttattctcctggttatgccccaagtcatgttctcccactgtcgaatcagaatgttagtgctgcaaatgttgtgcgcataccaccagttcagcaacaacttcctccaggagctccacgccctcagcaacagcttttggtccctgcccgtgcaccaccgttcccgcagaacaacatttctgaacaagcgacaggttgacaaggacgccagaaagtgacgaattttaggcatcctatagtctgcagcaggactaagaaaagccataccgctaaattgggcggcatgcttttttttcttgcaaattgttttcttttgcactctaaaggttgtcgttatccatggttacccgaacttcttataatgtgagtgtctgaagatgaagcccctcttgctcagcttctgtcagtgtgtgtgtacattccccatctcctgccagaaattctgatagctggtggtctgtgcatggaccaaagtggatggccggaaatggagtccggcctccaacctgtgtataataatataggtcatgcagtaggtccaaatcgtagaacattctttcaaaacatctggttgtgtatattaattctcttcttcgcaccttctcagtacctccagtgcatgttcccatgtctcattagagcataggtatttcagtgtcactgtgtcgtcgtcagcgagtcatgtacattattatcctgaaactgtaaactatatatcacctatgtcaactgtaatcaaataatgacagccctaccttgggaaagaatgtgatttgttgcaaattgcaacggatggggggaaaacatcggggcatattcatcatactattcgtctgtttctatggataagaaatactgcatacataactacagaacgagcaaaattgaaaatcgtgtttgttggcatgtaactctagtttatggttttgtataaaattaaaaacaatctacgtagcaaagccagtagtaacatcaaaacggttcgtagctctagtgctatatatataaacacgatcctggggatggcaatgggcaaatggtaacatggggctctgagaagccgaggtcacctgacttatatgattccatatccgtgtctttcttcctgatcccagcatatatgatgaacatcattggtaaaatgaatattaaaaagatgctccatagtccttaagctgaatgacagaccctgcagcatttttatacgtcat

SEQ ID NO: 80433 - DNA, 2181 bp, Zea Mays
ctcgcgcgctcgttgctaggcagttggcaaagcagtccttaccaactgcccttccccaccccgctcccgcgtaatccaaccgctaataataaccgctgctctgattagcgcaatctccaccgctataattacgctcccgcctgcgcgcgcgggcctatcagccctagctagctacccagccgcctccgctgctcgcctcctcacttgcgcgtgtcgtgtcgtgtcgtgttgcgctaagtcagctgcttgctactagggttagggtttgcggctgcgcgctcgcgtgcgtgcatgcgcgtgggttggccgcggcagggatgacgccgcagcggtcgccgatgggtaccggaggaggaggaagtagcggcggaggcggcgggggaccgccggcgctacactacctgagcggcccgtacggagacaccacctttaccaaggttttcgtgggcggccttgcctgggagacgcgaagcgagggccttcgcgcgcactttgaggtctatggggacatcctcgaggccgttgtcatcaccgaccgcgccacgggccgctccaagggctacggattcgtaaccttccgggacccagagtcagcgaggatggcctgcatggacccatacccagtgatcgacggccggcgtgctaattgcaaccttgccatcttagggcggcctggtccagctgtgccttttgcacctacaaggccggtcatcccatacaatggaggtgtggcggttccagggggcatgtatgtgcaaagcccaacatatcagcaatccccttacaactactcacaggcctttgtatatccttatgggccatcagcatatggaccagaatacctatatcagcagaatgcatacggtccatatgttggacaacagtacgtgccggtttacggtggcccaaggacagtaggcccagcagtctacccatatgggcagtttggccaacctgtaccaagcgatcatgcttattctcctggttatgccccaagtcatgttctcccactgtcgaatcagaatgttagtgctgcaaatgttgtgcgcataccaccagttcagcaacaacttcctccaggagctccacgccctcagcaacagcttttggtccctgcccgtgcaccaccgttcccgcagaacaacatttctgaacaagcgacaggttgacaaggacgccagaaagtgacgaattttaggcatcctatagtctgcagcaggactaagaaaagccataccgctaaattgggcggcatgcttttttttcttgcaaattgttttcttttgcactctaaaggttgtcgttatccatggttacccgaacttcttataatgtgagtgtctgaagatgaagcccctcttgctcagcttctgtcagtgtgtgtgtacattccccatctcctgccagaaattctgatagctggtggtctgtgcatggaccaaagtggatggccggaaatggagtccggcctccaacctgtgtataataatataggtcatgcagtaggtccaaatcgtagaacattctttcaaaacatctggttgtgtatattaattctcttcttcgcaccttctcagtacctccagtgcatgttcccatgtctcattagagcataggtatttcagtgtcactgtgtcgtcgtcagcgagtcatgtacattattatcctgaaactgtaaactatatatcacctatgtcaactgtaatcaaataatgacagccctaccttgggaaagaatgtgatttgttgcaaattgcaacggatggggggaaaacatcggggcatattcatcatactattcgtctgtttctatggataagaaatactgcatacataactacagaacgagcaaaattgaaaatcgtgtttgttggcatgtaactctagtttatggttttgtataaaattaaaaacaatctacgtagcaaagccagtagtaacatcaaaacggttcgtagctctagtgctatatatataaacacgatcctggggatggcaatgggcaaatggtaacatggggctctgagaagccgaggtcacctgacttatatgattccatatccgtgtctttcttcctgatcccagcatatatgatgaacatcattggtaaaatgaatattaaaaagatgctccatagtccttaagctgaatgacagaccctgcagcatttttatacgtcat

SEQ ID NO: 80434 - DNA, 2174 bp, Zea Mays
gcagtccttaccaactgcccttccccaccccgctcccgcgtaatccaaccgctaataataaccgctgctctgattagcgcaatctccaccgctataattacgctcccgcctgcgcgcgcgggcctatcagccctagctagctacccagccgcctccgctgctcgcctcctcacttgcgcgtgtcgtgtcgtgtcgtgttgcgctaagtcagctgcttgctactagggttagggtttgcggctgcgcgctcgcgtgcgtgcatgcgcgtgggttggccgcggcagggatgacgccgcagcggtcgccgatgggtaccggaggaggaggaagtagcggcggaggcggcgggggaccgccggcgctacactacctgagcggcccgtacggagacaccacctttaccaaggttttcgtgggcggccttgcctgggagacgcgaagcgagggccttcgcgcgcactttgaggtctatggggacatcctcgaggccgttgtcatcaccgaccgcgccacgggccgctccaagggctacggattcgtaaccttccgggacccagagtcagcgaggatggcctgcatggacccatacccagtgatcgacggccggcgtgctaattgcaaccttgccatcttagggcggcctggtccagctgtgccttttgtagcacctacaaggccggtcatcccatacaatggaggtgtggcggttccagggggcatgccatcagcatatggaccagaatacctatatcagcagaatgcatacggtccatatgttggacaacagtacgtgccggtttacggtggcccaaggacagtaggcccagcagtctacccatatgggcagtttggccaacctgtaccaagcgatcatgcttattctcctggttatgccccaagtcatgttctcccactgtcgaatcagaatgttagtgctgcaaatgttgtgcgcataccaccagttcagcaacaacttcctccaggagctccacgccctcagcaacagcttttggtccctgcccgtgcaccaccgttcccgcagaacaacatttctgaacaagcgacaggttgacaaggacgccagaaagtgacgaattttaggcatcctatagtctgcagcaggactaagaaaagccataccgctaaattgggcggcatgcttttttttcttgcaaattgttttcttttgcactctaaaggttagttatcacatttatctagtatctgcagcggcatcagtttatgctgcatctgggctgattgatgtactgtctcttatcatattgcaggttgtcgttatccatggttacccgaacttcttataatgtgagtgtctgaagatgaagcccctcttgctcagcttctgtcagtgtgtgtgtacattccccatctcctgccagaaattctgatagctggtggtctgtgcatggaccaaagtggatggccggaaatggagtccggcctccaacctgtgtataataatataggtcatgcagtaggtccaaatcgtagaacattctttcaaaacatctggttgtgtatattaattctcttcttcgcaccttctcagtacctccagtgcatgttcccatgtctcattagagcataggtatttcagtgtcactgtgtcgtcgtcagcgagtcatgtacattattatcctgaaactgtaaactatatatcacctatgtcaactgtaatcaaataatgacagccctaccttgggaaagaatgtgatttgttgcaaattgcaacggatggggggaaaacatcggggcatattcatcatactattcgtctgtttctatggataagaaatactgcatacataactacagaacgagcaaaattgaaaatcgtgtttgttggcatgtaactctagtttatggttttgtataaaattaaaaacaatctacgtagcaaagccagtagtaacatcaaaacggttcgtagctctagtgctatatatataaacacgatcctggggatggcaatgggcaaatggtaacatggggctctgagaagccgaggtcacctgacttatatgattccatatccgtgtctttcttcctgatcccagcatatatgatgaacatcattggtaaaatgaatattaaaaagatgctccatagtccttaagctgaatgacagaccctgcagcatttttatacgtcat

SEQ ID NO: 80435 - DNA, 2116 bp, Zea Mays
gcagtccttaccaactgcccttccccaccccgctcccgcgtaatccaaccgctaataataaccgctgctctgattagcgcaatctccaccgctataattacgctcccgcctgcgcgcgcgggcctatcagccctagctagctacccagccgcctccgctgctcgcctcctcacttgcgcgtgtcgtgtcgtgtcgtgttgcgctaagtcagctgcttgctactagggttagggtttgcggctgcgcgctcgcgtgcgtgcatgcgcgtgggttggccgcggcagggatgacgccgcagcggtcgccgatgggtaccggaggaggaggaagtagcggcggaggcggcgggggaccgccggcgctacactacctgagcggcccgtacggagacaccacctttaccaaggttttcgtgggcggccttgcctgggagacgcgaagcgagggccttcgcgcgcactttgaggtctatggggacatcctcgaggccgttgtcatcaccgaccgcgccacgggccgctccaagggctacggattcgtaaccttccgggacccagagtcagcgaggatggcctgcatggacccatacccagtgatcgacggccggcgtgctaattgcaaccttgccatcttagggcggcctggtccagctgtgccttttggccatcagcatatggaccagaatacctatatcagcagaatgcatacggtccatatgttggacaacagtacgtgccggtttacggtggcccaaggacagtaggcccagcagtctacccatatgggcagtttggccaacctgtaccaagcgatcatgcttattctcctggttatgccccaagtcatgttctcccactgtcgaatcagaatgttagtgctgcaaatgttgtgcgcataccaccagttcagcaacaacttcctccaggagctccacgccctcagcaacagcttttggtccctgcccgtgcaccaccgttcccgcagaacaacatttctgaacaagcgacaggttgacaaggacgccagaaagtgacgaattttaggcatcctatagtctgcagcaggactaagaaaagccataccgctaaattgggcggcatgcttttttttcttgcaaattgttttcttttgcactctaaaggttagttatcacatttatctagtatctgcagcggcatcagtttatgctgcatctgggctgattgatgtactgtctcttatcatattgcaggttgtcgttatccatggttacccgaacttcttataatgtgagtgtctgaagatgaagcccctcttgctcagcttctgtcagtgtgtgtgtacattccccatctcctgccagaaattctgatagctggtggtctgtgcatggaccaaagtggatggccggaaatggagtccggcctccaacctgtgtataataatataggtcatgcagtaggtccaaatcgtagaacattctttcaaaacatctggttgtgtatattaattctcttcttcgcaccttctcagtacctccagtgcatgttcccatgtctcattagagcataggtatttcagtgtcactgtgtcgtcgtcagcgagtcatgtacattattatcctgaaactgtaaactatatatcacctatgtcaactgtaatcaaataatgacagccctaccttgggaaagaatgtgatttgttgcaaattgcaacggatggggggaaaacatcggggcatattcatcatactattcgtctgtttctatggataagaaatactgcatacataactacagaacgagcaaaattgaaaatcgtgtttgttggcatgtaactctagtttatggttttgtataaaattaaaaacaatctacgtagcaaagccagtagtaacatcaaaacggttcgtagctctagtgctatatatataaacacgatcctggggatggcaatgggcaaatggtaacatggggctctgagaagccgaggtcacctgacttatatgattccatatccgtgtctttcttcctgatcccagcatatatgatgaacatcattggtaaaatgaatattaaaaagatgctccatagtccttaagctgaatgacagaccctgcagcatttttatacgtcat

SEQ ID NO: 80436 - DNA, 3629 bp, Zea Mays
ctcaaatgcccgtggattaccaccacccaagggcaaacccgtgccgctccacagtatcctcggggccagccatccgccgttccggcttcctccgcattgtggtcttctgtcttcctgcctgcctgtaaacccactctccctcgccccgcctttgccgccggtaaagcaaaaaatgggaagtgagacatttgatttgaatgagcaaccacatgaaaatgaaggtggcggcctgaattatgtgttgttgcaaaaggattgtaagaacatatgccgcaccaaagtttatgatcttcccatagaagtgccgatcatttggtcagttactgcatttgtgccaattaaagcttaccaaaagagtgatttcccaaaatttttgctgcttccctatcctgaagacagtcgtcagaaatctgaatggggaaaattcatgcgcttcctttcagaaaataaaagggctgctattgctagatgtgggtcctcaactttccacatacttgctcctgaacctgatgaatgctcaagttttccgcatgcggtgctcttgtatgagtgtggacaaaatggccctggagattgcaaacatatggcaggaacatctgggaaacgtgtgaatagtaatgtgatgaatgcttcaaagaggccttttaagagtgactttcaatatggttcaagaaactctaagccaccacactttaaagaggaggtctgtgatagtttactgaagcccaagaagatggaaacttcacctaagcattatgatcctttcgtcacagaacaccatagactagttctggaatcctctccatgtgaatctgttgaagacagcccaagagttttgaatccggtggtaaaaaagagaatggcttctcctaccaaaaatttcattgttgcagaccctagttatctgcgaacacttagtcagacacatgctagctggatatttggagcgatagctgagctcattgataattccagagatgctggtgcatcaaggttgagtatttccatcgagcatttgttttcaaagaaagcacagaagaaaattcctgtcttatctgtaattgatgatggacatggaatgacatatcctgacatcatgagaatgatctcttttggccataaacgaccaaatggacatcgtgaggatcagattggaagatttggcattggattcaagactggtgctatgaaactcggaaaagatgcaattgttctcacacaaactaaatcctccagatcggtggcctttctttctcagtcttttaatgaagaaaaggataatcttgagatccctgtggtggcatatcgaaaggaagggcagtatatggaagttgatttgagtgtgcagtctgatgctactgcagaatataacttgaacgctattaagaatttttcttccttcaacgagtatttcattggagaaaagttgggcctatttggtgaagatactgggacacaaatctacatatggaatttagacacatggggtactgattacacattggagtggaattctggtaagtcttcagaaaatcctgtgcaccatggtcgtggagacatattaatccgttcaagaagagtcagatcacgtccaggacaaacaagtaacaaggtgctgttggattattctcttcagtcctatctggaagttatgttcttgaatcctcggatgaagatatctgtccaagggtctttggtcaaaagccgcccgttggcgaagacccttaacaagacttctgttgtgtctggtgaaattatggaaaggactattatattgactctgggaaggagcaaggtagaatgggacagaacaaactgtggaatcttcttgtattggcatggtcgtttgatagagtcttacaagcgggttggaggccaaaagcatagtactgacatggggcgtggagtaataggagttgcagatatcacaaatctcattgatgatgaagatggtaattcatgggttctgaacaataaacagggatttcaagattgtgaaatgtatgctaaactggaggagtggcttggtaggaaagtggatgaatactgggatacgaaatttgacagtctcacgctgagaaaaggggatgagcaccacaatactgattctgactgggttcagtgctacagctgtcgtaaatggagaatgttgaatgcaggcttcaatgtagacaatcttcctgaggaatggttctgctacatgccaccattcaatggcaaatgtgagattcctgaacaacaagcgggaccagacatcattgtgataggtgagaagagatctggacatgatgaacaaaaaaaggctgccctgcaaggaggtacaccggaggaggaaatgaggcatgagaaccacgagattcagatgattactcaagatgaatttgtgaagaatgttcaggatatgccggaggttgtccacaagcgaaagaaaatttcaagtggcaccccatcaaagccccaaaaaaaccgcgatgatgatctggaaggcgtgtcctcacaaactgaagatgacgtccctctcactaggttaaagaggctaaggagagggcctgcaaggactaacaaaaggtgacagaaagtgaaaatacacgccggtgcaatgcttcatttggactggacggattttggacttaacgagactgatgcatgaatcatgatgacatgagaccttcgtttagcacactgccagctataattctctagcttttgtgtagtagaatttggaaacatgcgttgctgttggattaggcgtctgtttgtaaataggtgtccctcgcattcaaatgttgcagcttaggccctgggatccattagctactattagttagctagctaatagactaagggggtgtttgaatgtattagagctaatagttagttagctaaaaagttgctagtggaattagctagctaacaaatagatagctaactattaactaatttactaaaaatagctaatagttgaactattagtcagggtgttcggatgtctccaactaattttagccactaactattagctctagtgcattcaaacactccctaaaggggtatttgaacgtactagagctaatagttagaggttgtttaaatgcactagaactaatagttagtggctaaaattagttgatgcatccaaacactctagctaatagttcaactattaagggtgtgtttggtttgaggttaaagtaagatgagtcgggggcgccaccgtcccctcaattttttgggatcacgccgcccccaaaaatcactccggtgttcacatcacccccgcttgactctcaaccaaacactatagaaaacgtggtcgtctcatttcatccctctttgtacattcaaccaaacgcaccataactatttttggtaaattagttaataggtaggtagttatttgttatctagctaattccactgacaaattttagcaaactaactattagttctagtgcatttaaacaccctcttagttgactaagtgaaattagctagctaaaaaatagttatctaactattagctaatttgctaaaatagataatagctaaattactatctagactgtttggatgtcatcaactaattttagcagctaactattatctctagtgtgttaagcactccctag

SEQ ID NO: 80437 - DNA, 3527 bp, Zea Mays
cttctgtcttcctgcctgcctgtaaacccactctccctcgccccgcctttgccgccgggtaaagcaaaaaatgggaagtgagacatttgatttgaatgagcaaccacatgaaaatgaaggtggcggcctgaattatgtgttgttgcaaaaggattgtaagaacatatgccgcaccaaagtttatgatcttcccatagaagtgccgatcatttggtcagttactgcatttgtgccaattaaagcttaccaaaagagtgatttcccaaaatttttgctgcttccctatcctgaagacagtcgtcagaaatctgaatggggaaaattcatgcgcttcctttcagaaaataaaagggctgctattgctagatgtgggtcctcaactttccacatacttgctcctgaacctgatgaatgctcaagttttccgcatgcggtgctcttgtatgagtgtggacaaaatggccctggagattgcaaacatatggcaggaacatctgggaaacgtgtgaatagtaatgtgatgaatgcttcaaagaggccttttaagagtgactttcaatatggttcaagaaactctaagccaccacactttaaagaggaggtctgtgatagtttactgaagcccaagaagatggaaacttcacctaagcattatgatcctttcgtcacagaacaccatagactagttctggaatcctctccatgtgaatctgttgaagacagcccaagagttttgaatccggtggtaaaaaagagaatggcttctcctaccaaaaatttcattgttgcagaccctagttatctgcgaacacttagtcagacacatgctagctggatatttggagcgatagctgagctcattgataattccagagatgctggtgcatcaaggttgagtatttccatcgagcatttgttttcaaagaaagcacagaagaaaattcctgtcttatctgtaattgatgatggacatggaatgacatatcctgacatcatgagaatgatctcttttggccataaacgaccaaatggacatcgtgaggatcagattggaagatttggcattggattcaagactggtgctatgaaactcggaaaagatgcaattgttctcacacaaactaaatcctccagatcggtggcctttctttctcagtcttttaatgaagaaaaggataatcttgagatccctgtggtggcatatcgaaaggaagggcagtatatggaagttgatttgagtgtgcagtctgatgctactgcagaatataacttgaacgctattaagaatttttcttccttcaacgagtatttcattggagaaaagttgggcctatttggtgaagatactgggacacaaatctacatatggaatttagacacatggggtactgattacacattggagtggaattctggtaagtcttcagaaaatcctgtgcaccatggtcgtggagacatattaatccgttcaagaagagtcagatcacgtccaggacaaacaagtaacaaggtgctgttggattattctcttcagtcctatctggaagttatgttcttgaatcctcggatgaagatatctgtccaagggtctttggtcaaaagccgcccgttggcgaagacccttaacaagacttctgttgtgtctggtgaaattatggaaaggactattatattgactctgggaaggagcaaggtagaatgggacagaacaaactgtggaatcttcttgtattggcatggtcgtttgatagagtcttacaagcgggttggaggccaaaagcatagtactgacatggggcgtggagtaataggagttgcagatatcacaaatctcattgatgatgaagatggtaattcatgggttctgaacaataaacagggatttcaagattgtgaaatgtatgctaaactggaggagtggcttggtaggaaagtggatgaatactgggatacgaaatttgacagtctcacgctgagaaaaggggatgagcaccacaatactgattctgactgggttcagtgctacagctgtcgtaaatggagaatgttgaatgcaggcttcaatgtagacaatcttcctgaggaatggttctgctacatgccaccattcaatggcaaatgtgagattcctgaacaacaagcgggaccagacatcattgtgataggtgagaagagatctggacatgatgaacaaaaaaaggctgccctgcaaggaggtacaccggaggaggaaatgaggcatgagaaccacgagattcagatgattactcaagatgaatttgtgaagaatgttcaggatatgccggaggttgtccacaagcgaaagaaaatttcaagtggcaccccatcaaagccccaaaaaaaccgcgatgatgatctggaaggcgtgtcctcacaaactgaagatgacgtccctctcactaggttaaagaggctaaggagagggcctgcaaggactaacaaaaggtgacagaaagtgaaaatacacgccggtgcaatgcttcatttggactggacggattttggacttaacgagactgatgcatgaatcatgatgacatgagaccttcgtttagcacactgccagctataattctctagcttttgtgtagtagaatttggaaacatgcgttgctgttggattaggcgtctgtttgtaaataggtgtccctcgcattcaaatgttgcagcttaggccctgggatccattagctactattagttagctagctaatagactaagggggtgtttgaatgtattagagctaatagttagttagctaaaaagttgctagtggaattagctagctaacaaatagatagctaactattaactaatttactaaaaatagctaatagttgaactattagtcagggtgttcggatgtctccaactaattttagccactaactattagctctagtgcattcaaacactccctaaaggggtatttgaacgtactagagctaatagttagaggttgtttaaatgcactagaactaatagttagtggctaaaattagttgatgcatccaaacactctagctaatagttcaactattaagggtgtgtttggtttgaggttaaagtaagatgagtcgggggcgccaccgtcccctcaattttttgggatcacgccgcccccaaaaatcactccggtgttcacatcacccccgcttgactctcaaccaaacactatagaaaacgtggtcgtctcatttcatccctctttgtacattcaaccaaacgcaccataactatttttggtaaattagttaataggtaggtagttatttgttatctagctaattccactgacaaattttagcaaactaactattagttctagtgcatttaaacaccctcttagttgactaagtgaaattagctagctaaaaaatagttatctaactattagctaatttgctaaaatagataatagctaaattactatctagactgtttggatgtcatcaactaattttagcagctaactattatctctagtgtgttaagcactccctag

SEQ ID NO: 80438 - DNA, 3562 bp, Zea Mays
aaacccactctccctcgccccgcctttgccgccgtggtggtgggggtttggtgctttcgcctcgacgtcacactacgttgtttgcgtaaatcggtaaagcaaaaaatgggaagtgagacatttgatttgaatgagcaaccacatgaaaatgaaggtggcggcctgaattatgtgttgttgcaaaaggattgtaagaacatatgccgcaccaaagtttatgatcttcccatagaagtgccgatcatttggtcagttactgcatttgtgccaattaaagcttaccaaaagagtgatttcccaaaatttttgctgcttccctatcctgaagacagtcgtcagaaatctgaatggggaaaattcatgcgcttcctttcagaaaataaaagggctgctattgctagatgtgggtcctcaactttccacatacttgctcctgaacctgatgaatgctcaagttttccgcatgcggtgctcttgtatgagtgtggacaaaatggccctggagattgcaaacatatggcaggaacatctgggaaacgtgtgaatagtaatgtgatgaatgcttcaaagaggccttttaagagtgactttcaatatggttcaagaaactctaagccaccacactttaaagaggaggtctgtgatagtttactgaagcccaagaagatggaaacttcacctaagcattatgatcctttcgtcacagaacaccatagactagttctggaatcctctccatgtgaatctgttgaagacagcccaagagttttgaatccggtggtaaaaaagagaatggcttctcctaccaaaaatttcattgttgcagaccctagttatctgcgaacacttagtcagacacatgctagctggatatttggagcgatagctgagctcattgataattccagagatgctggtgcatcaaggttgagtatttccatcgagcatttgttttcaaagaaagcacagaagaaaattcctgtcttatctgtaattgatgatggacatggaatgacatatcctgacatcatgagaatgatctcttttggccataaacgaccaaatggacatcgtgaggatcagattggaagatttggcattggattcaagactggtgctatgaaactcggaaaagatgcaattgttctcacacaaactaaatcctccagatcggtggcctttctttctcagtcttttaatgaagaaaaggataatcttgagatccctgtggtggcatatcgaaaggaagggcagtatatggaagttgatttgagtgtgcagtctgatgctactgcagaatataacttgaacgctattaagaatttttcttccttcaacgagtatttcattggagaaaagttgggcctatttggtgaagatactgggacacaaatctacatatggaatttagacacatggggtactgattacacattggagtggaattctggtaagtcttcagaaaatcctgtgcaccatggtcgtggagacatattaatccgttcaagaagagtcagatcacgtccaggacaaacaagtaacaaggtgctgttggattattctcttcagtcctatctggaagttatgttcttgaatcctcggatgaagatatctgtccaagggtctttggtcaaaagccgcccgttggcgaagacccttaacaagacttctgttgtgtctggtgaaattatggaaaggactattatattgactctgggaaggagcaaggtagaatgggacagaacaaactgtggaatcttcttgtattggcatggtcgtttgatagagtcttacaagcgggttggaggccaaaagcatagtactgacatggggcgtggagtaataggagttgcagatatcacaaatctcattgatgatgaagatggtaattcatgggttctgaacaataaacagggatttcaagattgtgaaatgtatgctaaactggaggagtggcttggtaggaaagtggatgaatactgggatacgaaatttgacagtctcacgctgagaaaaggggatgagcaccacaatactgattctgactgggttcagtgctacagctgtcgtaaatggagaatgttgaatgcaggcttcaatgtagacaatcttcctgaggaatggttctgctacatgccaccattcaatggcaaatgtgagattcctgaacaacaagcgggaccagacatcattgtgataggtgagaagagatctggacatgatgaacaaaaaaaggctgccctgcaaggaggtacaccggaggaggaaatgaggcatgagaaccacgagattcagatgattactcaagatgaatttgtgaagaatgttcaggatatgccggaggttgtccacaagcgaaagaaaatttcaagtggcaccccatcaaagccccaaaaaaaccgcgatgatgatctggaaggcgtgtcctcacaaactgaagatgacgtccctctcactaggttaaagaggctaaggagagggcctgcaaggactaacaaaaggtgacagaaagtgaaaatacacgccggtgcaatgcttcatttggactggacggattttggacttaacgagactgatgcatgaatcatgatgacatgagaccttcgtttagcacactgccagctataattctctagcttttgtgtagtagaatttggaaacatgcgttgctgttggattaggcgtctgtttgtaaataggtgtccctcgcattcaaatgttgcagcttaggccctgggatccattagctactattagttagctagctaatagactaagggggtgtttgaatgtattagagctaatagttagttagctaaaaagttgctagtggaattagctagctaacaaatagatagctaactattaactaatttactaaaaatagctaatagttgaactattagtcagggtgttcggatgtctccaactaattttagccactaactattagctctagtgcattcaaacactccctaaaggggtatttgaacgtactagagctaatagttagaggttgtttaaatgcactagaactaatagttagtggctaaaattagttgatgcatccaaacactctagctaatagttcaactattaagggtgtgtttggtttgaggttaaagtaagatgagtcgggggcgccaccgtcccctcaattttttgggatcacgccgcccccaaaaatcactccggtgttcacatcacccccgcttgactctcaaccaaacactatagaaaacgtggtcgtctcatttcatccctctttgtacattcaaccaaacgcaccataactatttttggtaaattagttaataggtaggtagttatttgttatctagctaattccactgacaaattttagcaaactaactattagttctagtgcatttaaacaccctcttagttgactaagtgaaattagctagctaaaaaatagttatctaactattagctaatttgctaaaatagataatagctaaattactatctagactgtttggatgtcatcaactaattttagcagctaactattatctctagtgtgttaagcactccctag

SEQ ID NO: 80439 - DNA, 3387 bp, Zea Mays
gtaaagcaaaaaatgggaagtgagacatttgatttgaatgagcaaccacatgaaaatgaaggccgatcatttggtcagttactgcatttgtgccaattaaagcttaccaaaagagtgatttcccaaaatttttgctgcttccctatcctgaagacagtcgtcagaaatctgaatggggaaaattcatgcgcttcctttcagaaaataaaagggctgctattgctagatgtgggtcctcaactttccacatacttgctcctgaacctgatgaatgctcaagttttccgcatgcggtgctcttgtatgagtgtggacaaaatggccctggagattgcaaacatatggcaggaacatctgggaaacgtgtgaatagtaatgtgatgaatgcttcaaagaggccttttaagagtgactttcaatatggttcaagaaactctaagccaccacactttaaagaggaggtctgtgatagtttactgaagcccaagaagatggaaacttcacctaagcattatgatcctttcgtcacagaacaccatagactagttctggaatcctctccatgtgaatctgttgaagacagcccaagagttttgaatccggtggtaaaaaagagaatggcttctcctaccaaaaatttcattgttgcagaccctagttatctgcgaacacttagtcagacacatgctagctggatatttggagcgatagctgagctcattgataattccagagatgctggtgcatcaaggttgagtatttccatcgagcatttgttttcaaagaaagcacagaagaaaattcctgtcttatctgtaattgatgatggacatggaatgacatatcctgacatcatgagaatgatctcttttggccataaacgaccaaatggacatcgtgaggatcagattggaagatttggcattggattcaagactggtgctatgaaactcggaaaagatgcaattgttctcacacaaactaaatcctccagatcggtggcctttctttctcagtcttttaatgaagaaaaggataatcttgagatccctgtggtggcatatcgaaaggaagggcagtatatggaagttgatttgagtgtgcagtctgatgctactgcagaatataacttgaacgctattaagaatttttcttccttcaacgagtatttcattggagaaaagttgggcctatttggtgaagatactgggacacaaatctacatatggaatttagacacatggggtactgattacacattggagtggaattctggtaagtcttcagaaaatcctgtgcaccatggtcgtggagacatattaatccgttcaagaagagtcagatcacgtccaggacaaacaagtaacaaggtgctgttggattattctcttcagtcctatctggaagttatgttcttgaatcctcggatgaagatatctgtccaagggtctttggtcaaaagccgcccgttggcgaagacccttaacaagacttctgttgtgtctggtgaaattatggaaaggactattatattgactctgggaaggagcaaggtagaatgggacagaacaaactgtggaatcttcttgtattggcatggtcgtttgatagagtcttacaagcgggttggaggccaaaagcatagtactgacatggggcgtggagtaataggagttgcagatatcacaaatctcattgatgatgaagatggtaattcatgggttctgaacaataaacagggatttcaagattgtgaaatgtatgctaaactggaggagtggcttggtaggaaagtggatgaatactgggatacgaaatttgacagtctcacgctgagaaaaggggatgagcaccacaatactgattctgactgggttcagtgctacagctgtcgtaaatggagaatgttgaatgcaggcttcaatgtagacaatcttcctgaggaatggttctgctacatgccaccattcaatggcaaatgtgagattcctgaacaacaagcgggaccagacatcattgtgataggtgagaagagatctggacatgatgaacaaaaaaaggctgccctgcaaggaggtacaccggaggaggaaatgaggcatgagaaccacgagattcagatgattactcaagatgaatttgtgaagaatgttcaggatatgccggaggttgtccacaagcgaaagaaaatttcaagtggcaccccatcaaagccccaaaaaaaccgcgatgatgatctggaaggcgtgtcctcacaaactgaagatgacgtccctctcactaggttaaagaggctaaggagagggcctgcaaggactaacaaaaggtgacagaaagtgaaaatacacgccggtgcaatgcttcatttggactggacggattttggacttaacgagactgatgcatgaatcatgatgacatgagaccttcgtttagcacactgccagctataattctctagcttttgtgtagtagaatttggaaacatgcgttgctgttggattaggcgtctgtttgtaaataggtgtccctcgcattcaaatgttgcagcttaggccctgggatccattagctactattagttagctagctaatagactaagggggtgtttgaatgtattagagctaatagttagttagctaaaaagttgctagtggaattagctagctaacaaatagatagctaactattaactaatttactaaaaatagctaatagttgaactattagtcagggtgttcggatgtctccaactaattttagccactaactattagctctagtgcattcaaacactccctaaaggggtatttgaacgtactagagctaatagttagaggttgtttaaatgcactagaactaatagttagtggctaaaattagttgatgcatccaaacactctagctaatagttcaactattaagggtgtgtttggtttgaggttaaagtaagatgagtcgggggcgccaccgtcccctcaattttttgggatcacgccgcccccaaaaatcactccggtgttcacatcacccccgcttgactctcaaccaaacactatagaaaacgtggtcgtctcatttcatccctctttgtacattcaaccaaacgcaccataactatttttggtaaattagttaataggtaggtagttatttgttatctagctaattccactgacaaattttagcaaactaactattagttctagtgcatttaaacaccctcttagttgactaagtgaaattagctagctaaaaaatagttatctaactattagctaatttgctaaaatagataatagctaaattactatctagactgtttggatgtcatcaactaattttagcagctaactattatctctagtgtgttaagcactccctag

SEQ ID NO: 80440 - DNA, 2886 bp, Zea Mays
tatgtctaggtacatagcaaaagttctgtatttagaaaaaccaaaatgtcttataatgtggaatggagggagtattattttcacgggactgaagcagttttatctgaaggctcttagttgtgtgacactgagaatttgtttctatattattcaacagtcgcagaagatatgttcattgataaatatctacattcgtcatttctgttagctagcttttttctttcctgcctggcgctatccttcaagttgatatacactccatcatttctgccttaaaagctcacatgaatgaaaatgcctattgtttgtttcaatgttttcaagtcggacgacttgctggctgaccgacttgggcgagtaatcgtgattaatcacgattagtcggatgacttggcgattaatcgctattttcccgaaccgacttggacgacctgactggtgctatgaaactcggaaaagatgcaattgttctcacacaaactaaatcctccagatcggtggcctttctttctcagtcttttaatgaagaaaaggataatcttgagatccctgtggtggcatatcgaaaggaagggcagtatatggaagttgatttgagtgtgcagtctgatgctactgcagaatataacttgaacgctattaagaatttttcttccttcaacgagtatttcattggagaaaagttgggcctatttggtgaagatactgggacacaaatctacatatggaatttagacacatggggtactgattacacattggagtggaattctggtaagtcttcagaaaatcctgtgcaccatggtcgtggagacatattaatccgttcaagaagagtcagatcacgtccaggacaaacaagtaacaaggtgctgttggattattctcttcagtcctatctggaagttatgttcttgaatcctcggatgaagatatctgtccaagggtctttggtcaaaagccgcccgttggcgaagacccttaacaagacttctgttgtgtctggtgaaattatggaaaggactattatattgactctgggaaggagcaaggtagaatgggacagaacaaactgtggaatcttcttgtattggcatggtcgtttgatagagtcttacaagcgggttggaggccaaaagcatagtactgacatggggcgtggagtaataggagttgcagatatcacaaatctcattgatgatgaagatggtaattcatgggttctgaacaataaacagggatttcaagattgtgaaatgtatgctaaactggaggagtggcttggtaggaaagtggatgaatactgggatacgaaatttgacagtctcacgctgagaaaaggggatgagcaccacaatactgattctgactgggttcagtgctacagctgtcgtaaatggagaatgttgaatgcaggcttcaatgtagacaatcttcctgaggaatggttctgctacatgccaccattcaatggcaaatgtgagattcctgaacaacaagcgggaccagacatcattgtgataggtgagaagagatctggacatgatgaacaaaaaaaggctgccctgcaaggaggtacaccggaggaggaaatgaggcatgagaaccacgagattcagatgattactcaagatgaatttgtgaagaatgttcaggatatgccggaggttgtccacaagcgaaagaaaatttcaagtggcaccccatcaaagccccaaaaaaaccgcgatgatgatctggaaggcgtgtcctcacaaactgaagatgacgtccctctcactaggttaaagaggctaaggagagggcctgcaaggactaacaaaaggtgacagaaagtgaaaatacacgccggtgcaatgcttcatttggactggacggattttggacttaacgagactgatgcatgaatcatgatgacatgagaccttcgtttagcacactgccagctataattctctagcttttgtgtagtagaatttggaaacatgcgttgctgttggattaggcgtctgtttgtaaataggtgtccctcgcattcaaatgttgcagcttaggccctgggatccattagctactattagttagctagctaatagactaagggggtgtttgaatgtattagagctaatagttagttagctaaaaagttgctagtggaattagctagctaacaaatagatagctaactattaactaatttactaaaaatagctaatagttgaactattagtcagggtgttcggatgtctccaactaattttagccactaactattagctctagtgcattcaaacactccctaaaggggtatttgaacgtactagagctaatagttagaggttgtttaaatgcactagaactaatagttagtggctaaaattagttgatgcatccaaacactctagctaatagttcaactattaagggtgtgtttggtttgaggttaaagtaagatgagtcgggggcgccaccgtcccctcaattttttgggatcacgccgcccccaaaaatcactccggtgttcacatcacccccgcttgactctcaaccaaacactatagaaaacgtggtcgtctcatttcatccctctttgtacattcaaccaaacgcaccataactatttttggtaaattagttaataggtaggtagttatttgttatctagctaattccactgacaaattttagcaaactaactattagttctagtgcatttaaacaccctcttagttgactaagtgaaattagctagctaaaaaatagttatctaactattagctaatttgctaaaatagataatagctaaattactatctagactgtttggatgtcatcaactaattttagcagctaactattatctctagtgtgttaagcactccctag

SEQ ID NO: 80441 - DNA, 2424 bp, Zea Mays
cgctattttcccgaaccgacttggacgacctgactggtgctatgaaactcggaaaagatgcaattgttctcacacaaactaaatcctccagatcggtggcctttctttctcagtcttttaatgaagaaaaggataatcttgagatccctgtggtggcatatcgaaaggaagggcagtatatggaagttgatttgagtgtgcagtctgatgctactgcagaatataacttgaacgctattaagaatttttcttccttcaacgagtatttcattggagaaaagttgggcctatttggtgaagatactgggacacaaatctacatatggaatttagacacatggggtactgattacacattggagtggaattctggtaagtcttcagaaaatcctgtgcaccatggtcgtggagacatattaatccgttcaagaagagtcagatcacgtccaggacaaacaagtaacaaggtgctgttggattattctcttcagtcctatctggaagttatgttcttgaatcctcggatgaagatatctgtccaagggtctttggtcaaaagccgcccgttggcgaagacccttaacaagacttctgttgtgtctggtgaaattatggaaaggactattatattgactctgggaaggagcaagtcttacaagcgggttggaggccaaaagcatagtactgacatggggcgtggagtaataggagttgcagatatcacaaatctcattgatgatgaagatggtaattcatgggttctgaacaataaacagggatttcaagattgtgaaatgtatgctaaactggaggagtggcttggtaggaaagtggatgaatactgggatacgaaatttgacagtctcacgctgagaaaaggggatgagcaccacaatactgattctgactgggttcagtgctacagctgtcgtaaatggagaatgttgaatgcaggcttcaatgtagacaatcttcctgaggaatggttctgctacatgccaccattcaatggcaaatgtgagattcctgaacaacaagcgggaccagacatcattgtgataggtgagaagagatctggacatgatgaacaaaaaaaggctgccctgcaaggaggtacaccggaggaggaaatgaggcatgagaaccacgagattcagatgattactcaagatgaatttgtgaagaatgttcaggatatgccggaggttgtccacaagcgaaagaaaatttcaagtggcaccccatcaaagccccaaaaaaaccgcgatgatgatctggaaggcgtgtcctcacaaactgaagatgacgtccctctcactaggttaaagaggctaaggagagggcctgcaaggactaacaaaaggtgacagaaagtgaaaatacacgccggtgcaatgcttcatttggactggacggattttggacttaacgagactgatgcatgaatcatgatgacatgagaccttcgtttagcacactgccagctataattctctagcttttgtgtagtagaatttggaaacatgcgttgctgttggattaggcgtctgtttgtaaataggtgtccctcgcattcaaatgttgcagcttaggccctgggatccattagctactattagttagctagctaatagactaagggggtgtttgaatgtattagagctaatagttagttagctaaaaagttgctagtggaattagctagctaacaaatagatagctaactattaactaatttactaaaaatagctaatagttgaactattagtcagggtgttcggatgtctccaactaattttagccactaactattagctctagtgcattcaaacactccctaaaggggtatttgaacgtactagagctaatagttagaggttgtttaaatgcactagaactaatagttagtggctaaaattagttgatgcatccaaacactctagctaatagttcaactattaagggtgtgtttggtttgaggttaaagtaagatgagtcgggggcgccaccgtcccctcaattttttgggatcacgccgcccccaaaaatcactccggtgttcacatcacccccgcttgactctcaaccaaacactatagaaaacgtggtcgtctcatttcatccctctttgtacattcaaccaaacgcaccataactatttttggtaaattagttaataggtaggtagttatttgttatctagctaattccactgacaaattttagcaaactaactattagttctagtgcatttaaacaccctcttagttgactaagtgaaattagctagctaaaaaatagttatctaactattagctaatttgctaaaatagataatagctaaattactatctagactgtttggatgtcatcaactaattttagcagctaactattatctctagtgtgttaagcactccctag

SEQ ID NO: 80442 - DNA, 937 bp, Zea Mays
tgcaggagcaaatgccactttgctcatggagagagggagcttggaaagcccctgcagatggacaactcgatgggagctcctccaatgggtccagggccaaacggtcacttcatgccacctccaatgcctatcccagacatggttcctcactccacattcggtgcttcggccacagccaagatcagtgtcgatgcatcccttgctggcgccatcattgggaagagtggtatcaacacaaagcatatatcccgagtgactggggccaagttagccatccgggacaatgaggctgatcccaaccataaaaacatcgagctcgagggaacgtttgaccagatcaagcacgctagcgcaatggtcacagagttgattgtccgcatcagtggtaaggtgcctccacaagcaaagaacaacccaggcagggggcctggttctcatgctgggggtcctgcaagcaacttcaagaccaagttgtgcgagaacttcaacaaaggctcctgcacctttggagacaggtgccactttgcccatggcgaaagtgagttgcgcaaacctgctgctgcttgatagatgtgtttagtgtggcttgcggtgattactctgcctgtgtggctgaataacaccacagtcgcctatggtgagatgtactgggccacgtgctgcctgagagagatcatttccatcgcttgcgtagagacaatggccgttttttaggatttgtaggattgccgtattgttctgttcgatttatatctaaccctgccagaatcctatttttgtaccgtttcttagctactaattggtgccagatcattgtggttctgttgactcgagaatagttgctatcgatggtatgggtttgtgaattattgatagcatttttgaaatccagatagctaagctgaaatccagacatcattagtgttcagttgatggt

SEQ ID NO: 80443 - DNA, 2381 bp, Zea Mays
cggacctcaattaaaaaccgcagaaaaggaatcaatccgaccatccataaaaaggacggcgacgcggtcaccactgcggcaccgccgccgccgccatcctcgacccctgaagtgaagaggcaacccgaggacgcctctcccatccacgcgcgaatcctaccgccctcccactcccaaaaacctagccgcgcgcgccacctgcatcccatggcggcaaccgcggccgtggcggggaccgggtcgtccctctcctcgcgccgcagtcgcagcgttgtctcctcgtccttccgcgcagctgcctcgcgcttccgctcgccgagatgcgtgctcgggagcgagcagctgcgggtggcgcatgaagggaagcggatgagcggcgccgagtccaggaccgcgtgggcgccaaaggtgcccgcaccggagtccaggcttgccgcactgccaagggagctgcgggactccaggatgaagatcttctccggcacggctaaccgtccgctcgctcaggaaattgctgcttacctgggtatagaactcggcaagatcctgatcaagcgctttgctgatggagaaatttatgtgcaactgcaagagagcgtgagaggatgtgatgtgttcttgatccagcccacatgctctcctgtcaacgaaaacctcatggagctcttcatcatgattgatgcatgccggcgggcttcagcacggtctattaccgttgttattccatactttggttatgccagagcagacagaaaggctcaagggcgtgaacccattactgccaaacttgctgcaaatttacttactgaagctggtagtgaccgtgtcattgtatgtgatattcattctacgcaagcgttggggtacttcgatattcctgtggatcatatatatggacagcctgtgattctggattacctggccagcaagacgatatctgaagatcttgtggttgtttctcctgatgtgggtggcgttgttagagcacgtgcattcgctaagaaattattgaatgcccgtttagctattgttgataaaagaagacagggtcacaacatgtcagaggtcatgaatttaattggcgacgtgaaaggaaaagtggctatcctgattgatgacatgattgatacagcagggacaatcactagcgcagcggctttgttaaagcaggagggagcagaagctgtatatgcttgttgtacacatgctgttttcaggttttctagttggctttatcgaatgtacttctggttttggtattttttatggtcacatcctatatgatgtggcttcatctctgagcactttctaatatttcgctgcaagaacattcacaacactgtacaaaaaagtacaccaggggtaatagtatctgttaacacctgtaggccatattaactttgctaatcttgggggcacccatattatcatcagcatcaatcctaacgatatgattgcttgaatcttatgcaatatgttttctacctcgtggtatcttattgtaggaaggtgcctgagaaatcttttcggcgtagtcacttgtctaaatttgactgctttcaataaatttgcctgtttgatgctcagtatgctactttatttcagaaagtagcaggacgctttatttggtttgaacaagttgctgcctttatattccgacatgcttattccttcagaggatttgtgtattaacatggttgacttttcagccctcccgcgattgaaaggctttctggaggcgtctttgaggaagttattgtgacaaactccatcctgctgccggaagacaaatgcttccctcagctgactgtgctttcgatggcgaaccttgtgggggagacaatttggcatgttcatcgcgatggctccgtcagcagcatcttccaatagcagaaacgagcgcgtagcatcgtcacctcgtcttgcgttcgtgtgcttggtatagagaaggcacccagtgcctgtgctgcttgcgtattttcgtagggagtcaattttggcggcaaggtataataaggttgtattgcccgatgtacggggtgataaataaggtggttattgccagtgtacgtgggataataaggttgtatgctggtgtaggtgttctgcaggctgcagcgtgttactaattaagtgcatctcttgtcctattatgtattgctgaggtagttgttgtcgagttgaagtttcagtgtctcagatacatggggatagtgatgtacccagcactcggtcactagtgaagtcctggtcattggaaatatgggagcaccaatttctgttttaaggtcggcattgtagctcaagctgttaatactcaaaattgcctgattgtctatgagcaccctgcaatatttactggtgtgatgctgcatatttgc

SEQ ID NO: 80444 - DNA, 1902 bp, Zea Mays
aattaaaaaccgcagaaaaggaatcaatccgaccatccataaaaaggacggcgacgcggtcaccactgcggcaccgccgccgccgccatcctcgacccctgaagtgaagaggcaacccgaggacgcctctcccatccacgcgcgaatcctaccgccctcccactcccaaaaacctagccgcgcgcgccacctgcatcccatggcggcaaccgcggccgtggcggggaccgggtcgtccctctcctcgcgccgcagtcgcagcgttgtctcctcgtccttccgcgcagctgcctcgcgcttccgctcgccgagatgcgtgctcgggagcgagcagctgcgggtggcgcatgaagggaagcggatgagcggcgccgagtccaggaccgcgtgggcgccaaaggtgcccgcaccggagtccaggcttgccgcactgccaagggagctgcgggactccaggatgaagatcttctccggcacggctaaccgtccgctcgctcaggaaattgctgcttacctgggtatagaactcggcaagatcctgatcaagcgctttgctgatggagaaatttatgtgcaactgcaagagagcgtgagaggatgtgatgtgttcttgatccagcccacatgctctcctgtcaacgaaaacctcatggagctcttcatcatgattgatgcatgccggcgggcttcagcacggtctattaccgttgttattccatactttggttatgccagagcagacagaaaggctcaagggcgtgaacccattactgccaaacttgctgcaaatttacttactgaagctggtagtgaccgtgtcattgtatgtgatattcattctacgcaagcgttggggtacttcgatattcctgtggatcatatatatggacagtgtcatccttggtgtctgtagcctgtgattctggattacctggccagcaagacgatatctgaagatcttgtggttgtttctcctgatgtgggtggcgttgttagagcacgtgcattcgctaagaaattattgaatgcccgtttagctattgttgataaaagaagacagggtcacaacatgtcagaggtcatgaatttaattggcgacgtgaaaggaaaagtggctatcctgattgatgacatgattgatacagcagggacaatcactagcgcagcggctttgttaaagcaggagggagcagaagctgtatatgcttgttgtacacatgctgttttcagccctcccgcgattgaaaggctttctggaggcgtctttgaggaagttattgtgacaaactccatcctgctgccggaagacaaatgcttccctcagctgactgtgctttcgatggcgaaccttgtgggggagacaatttggcatgttcatcgcgatggctccgtcagcagcatcttccaatagcagaaacgagcgcgtagcatcgtcacctcgtcttgcgttcgtgtgcttggtatagagaaggcacccagtgcctgtgctgcttgcgtattttcgtagggagtcaattttggcggcaaggtataataaggttgtattgcccgatgtacggggtgataaataaggtggttattgccagtgtacgtgggataataaggttgtatgctggtgtaggtgttctgcaggctgcagcgtgttactaattaagtgcatctcttgtcctattatgtattgctgaggtagttgttgtcgagttgaagtttcagtgtctcagatacatggggatagtgatgtacccagcactcggtcactagtgaagtcctggtcattggaaatatgggagcaccaatttctgttttaaggtcggcattgtagctcaagctgttaatactcaaaattgcctgattgtctatgagcaccctgcaatatttactggtgtgatgctgcatatttgc

SEQ ID NO: 80445 - DNA, 1257 bp, Zea Mays
taaatgatacaggacaatcactagcgcagcggctttgttaaagcaggagggagcagaagctgtatatgcttgttgtacacatgctgttttcaggttttctagttggctttatcgaatgtacttctggttttggtattttttatggtcacatcctatatgatgtggcttcatctctgagcactttctaatatttcgctgcaagaacattcacaacactgtacaaaaaagtacaccaggggtaatagtatctgttaacacctgtaggccatattaactttgctaatcttgggggcacccatattatcatcagcatcaatcctaacgatatgattgcttgaatcttatgcaatatgttttctacctcgtggtatcttattgtaggaaggtgcctgagaaatcttttcggcgtagtcacttgtctaaatttgactgctttcaataaatttgcctgtttgatgctcagtatgctactttatttcagaaagtagcaggacgctttatttggtttgaacaagttgctgcctttatattccgacatgcttattccttcagaggatttgtgtattaacatggttgacttttcagccctcccgcgattgaaaggctttctggaggcgtctttgaggaagttattgtgacaaactccatcctgctgccggaagacaaatgcttccctcagctgactgtgctttcgatggcgaaccttgtgggggagacaatttggcatgttcatcgcgatggctccgtcagcagcatcttccaatagcagaaacgagcgcgtagcatcgtcacctcgtcttgcgttcgtgtgcttggtatagagaaggcacccagtgcctgtgctgcttgcgtattttcgtagggagtcaattttggcggcaaggtataataaggttgtattgcccgatgtacggggtgataaataaggtggttattgccagtgtacgtgggataataaggttgtatgctggtgtaggtgttctgcaggctgcagcgtgttactaattaagtgcatctcttgtcctattatgtattgctgaggtagttgttgtcgagttgaagtttcagtgtctcagatacatggggatagtgatgtacccagcactcggtcactagtgaagtcctggtcattggaaatatgggagcaccaatttctgttttaaggtcggcattgtagctcaagctgttaatactcaaaattgcctgattgtctatgagcaccctgcaatatttactggtgtgatgctgcatatttgc

SEQ ID NO: 80446 - DNA, 411 bp, Zea Mays
ctcacggtgaattctccggcgatggcttgcgctcctcaacggtctccgcccatctataaaaccatggcgtgggttttccctcccctcatccttctcctctgtgtaccgcgcgacctatgagagtgtgggcatggtagaccgaaccggggcggaatccgttcaccgccgtttggccttctcgccagcgtcttgctcctcgtgacagcaccggaggggccgcctaggaggagggagtctagtgctgacctcgggcagaggtgatggccactgtcgcggcggcgattcctcaccgtcgtggtcacggtgtcgtagttccgctccgcgccgtggactgggtcagctacgtctccatccctggtcacgagtcacctgaagagcaagttggtacctgcaaactcaagtgtcaggcaa

SEQ ID NO: 80447 - DNA, 1605 bp, Zea Mays
aacactctccactgcatgctgaacatgtgtagggacaccttgcccatattcaggtacttatagggcatggatatgggaagcttccttactgtccttgagctctggattccctgcataagtaaggtggtccttgtgccatcaagatggtgtaacttcctctccccagtctctagccttgatctgaactagatctgagcacgccagccctctgcgtggtaaccattgtccacatcacagtggccaggtcatagttttgtgctgatgatgatggtgttaagtgccggtgggctcggccttcttataagtttaagtaactcttctatactttttattgaggatggtcacttgagctagcatatatttcaaacttatacttttgtaatcactccgatgaatataatgaaaaatttttgtaacctgtaaaatttggtaataagattttcgctgcaaaaatgttgatgtgtgtgatttgtgtttacttaatcacgtggttctggttgtaagtggtttatctggtgtccttggggcaatcggacggatcctgttaagttagctggtgcacagacatagcagtctgaggtctttgagacaaggacaggtgcatgtgggcccaataacttaggaggttctgccacacgttcgatcacaatcaatggctcagatcaatcctctcaacgggtatgccagggatctgatcgccgccgtacacccccacatcccatggcacacacggttttcccccaaccctttcttcttccctgggcaccacggattgaacacggcggccagggaacccaccatggcggacaccatggcagagcacgtgtcacgacgcaagctcgactccccgattcaaaagagcgacatgcagaggagaatgctacgaataacatggataggttgatcacctgcaatcggctgcagaggagcccgcccacggtgcgagcggaacccacggtggagcaccaactccggcgtgaaatcgcgggttccccgatcggcaatcccatctagcgaagcaccttgtgccatccatgcctctaatcaaagctcccagacccactggtggaatcccgagcggtagcgtgggcgagttccacggcggtggaaccacaacatcggcgcaaaggcgaccgaccaccacagtgcccaaaacgtcgattaaaccgagctacgcatagaggagacaatagcgaacgtgggggatgaggactcaccagagaaggagtctgcggagaggctgaccacggaggacagtgggttcgcggtctcccgtgaagaaatcccaagcctcgggcgccggttcaacgcggcgaggccacaataacttctccacgcacaggtggagcttcacggcacggcactggggcagcgacaacgacgagcccaccggcgatggcatagctcggttctttctctctctcttcgttctcaccatggaaatggcggcgccactagcttaacccacgccccttgttgaccgcgacccgcggatggctagggaagaggaggtataggggggtttggcccgcttttgtagccggtcgaggggagtccatgggcgcaggggtatcgggcggcgtaacaacatgcccgagatgcccg

SEQ ID NO: 80448 - DNA, 2020 bp, Zea Mays
atgcgagtatgcataggtgcgcgcgtgtttgttttccggccatctgctccatttgctcggggagccagctgattaataaagcatttaggcgcgcgcgaagcaacaaactaattctgggctagctatggccggtagcaacggaactctgctgctcgcactccgcatcgtcctcttctgcgccctcgcctccgtggccaccaccttgctccctctcgtcacaaggccatgcgcctactccctgccaagaaccatcctcgccgccagcggcctcgaccctcgcctcatctcctgcgcggacgacggctccgccaaggcccagctgtcggatggcgatggaggccacaacaaggccggtagcggcggcaggcccatagtcaccgacctgctgtcgtgcggcgagccccgcctcccatcccacgcgctcccgcccttccgctgctgcccgccgacgccggcgtccgacgctgccgtcgccaacttcacgttccccgacccaggcgagccgctccggacgcggcagccagcgcacggggccgccggcgcggacagcgtcgccaggtacgcgcgcgcggtggcgctgatgaaggcgcttccggagtcggacccgcgcagcttctaccagcaggccaacatccactgcgcctactgcaccgcggcgtaccggcaggcggggcggccggagctgcacgtgcagatccacttctcgtggctcttcttccccttccaccgcgcctacctctacttcttcgagcgcgtcgcggcgaggctcctgggcgaccccgggttcgccgtgccgttctggagctgggacgtgccggaggggatgcgggtgccgccggagttcgccgacgcggcgtccccgctgtacgacccgataaggaacccagagcacgcgccgcccagagtcgtggacctcgacttctcgaaagtggacaagaattacaccgacgagcagcaaatccagctcaacctccggaccatgtataaacagatggtcaccaacgcgccgctgccgtccctcttctacggccagccctaccgcgccggcgaccgggagatgccgggggctggaacggtggagctgagcccgcacaacacaatccatgtatgggccggcgacctctcgcagcccaaccacgagaacatgggcacctactactccgccgcccgcgaccccatcttcttcccgcaccacaccaactccgaccgcctctgggaggtctggcgcggcggtccggcgcgccacgcggacttcacggaccccgactggctcgactcgtcgttcctgttctacgacgaggacgcccggctcgtgcgagtcaccgtccgtgacatgctcgacatcgggaggctccgttacgcgtacgccgaggtcgggctgccgtggctcagcgcgcggccccccatcaaccctggcgacgtgaaccgcggaagagacccgccgcacctggagtccgtccgcttcccggtgtcgctcgatgccccggtgactgcggaggtgagccggcggccgggaaagccacggagccactgggaggaggtgctggtggtcgagggcatcaaggcggacggcgcggacttcgtgaagttcgacgtgtacgtgaacgcggtggatcacgagaagatcatgccgggcggtcgggagatggctggaagcttcgtgtccctgaagcaccccggaaatatggtggtgcagagcagcatgagggtggcgctgaacgagctcctggaggacctgggcgccgagggagacgacagcgttacggtgacgttggtgcccgtggaggggagggtcaggatcggaggtctcaggatagtgtacatggcggagtgaggaccagcgtaggaaccgtttactctgcagtacgtccagggaggttttgaacagacccacatatctctgtattttaattatttggcagtgcaccctcacattgctagagccttcaagaagatgtcgttcgaccacaagttaatttgggctcgtaatttcgtcaatgagaagttcccaggagtgtga

SEQ ID NO: 80449 - DNA, 1961 bp, Zea Mays
aggtgcgcgcgtgtttgttttccggccatctgctccatttgctcggggagccagctgattaataaagcatttaggcgcgcgcgaagcaacaaactaattctgggctagctatggccggtagcaacggaactctgctgctcgcactccgcatcgtcctcttctgcgccctcgcctccgtggccaccaccttgctccctctcgtcacaaggccatgcgcctactccctgccaagaaccatcctcgccgccagcggcctcgaccctcgcctcatctcctgcgcggacgacggctccgccaaggcccagctgtcggatggcgatggaggccacaacaaggccggtagcggcggcaggcccatagtcaccgacctgctgtcgtgcggcgagccccgcctcccatcccacgcgctcccgcccttccgctgctgcccgccgacgccggcgtccgacgctgccgtcgccaacttcacgttccccgacccaggcgagccgctccggacgcggcagccagcgcacggggccgccggcgcggacagcgtcgccaggtacgcgcgcgcggtggcgctgatgaaggcgcttccggagtcggacccgcgcagcttctaccagcaggccaacatccactgcgcctactgcaccgcggcgtaccggcaggcggggcggccggagctgcacgtgcagatccacttctcgtggctcttcttccccttccaccgcgcctacctctacttcttcgagcgcgtcgcggcgaggctcctgggcgaccccgggttcgccgtgccgttctggagctgggacgtgccggaggggatgcgggtgccgccggagttcgccgacgcggcgtccccgctgtacgacccgataaggaacccagagcacgcgccgcccagagtcgtggacctcgacttctcgaaagtggacaagaattacaccgacgagcagcaaatccagctcaacctccggaccatgtataaacagatggtcaccaacgcgccgctgccgtccctcttctacggccagccctaccgcgccggcgaccgggagatgccgggggctggaacggtggagctgagcccgcacaacacaatccatgtatgggccggcgacctctcgcagcccaaccacgagaacatgggcacctactactccgccgcccgcgaccccatcttcttcccgcaccacaccaactccgaccgcctctgggaggtctggcgcggcggtccggcgcgccacgcggacttcacggaccccgactggctcgactcgtcgttcctgttctacgacgaggacgcccggctcgtgcgagtcaccgtccgtgacatgctcgacatcgggaggctccgttacgcgtacgccgaggtcgggctgccgtggctcagcgcgcggccccccatcaaccctggcgacgtgaaccgcggaagagacccgccgcacctggagtccgtccgcttcccggtgtcgctcgatgccccggtgactgcggaggtgagccggcggccgggaaagccacggagccactgggaggaggtgctggtggtcgagggcatcaaggcggacggcgcggacttcgtgaagttcgacgtgtacgtgaacgcggtggatcacgagaagatcatgccgggcggtcgggagatggctggaagcttcgtgtccctgaagcaccccggaaatatggtggtgcagagcagcatgagggtggcgctgaacgagctcctggaggacctgggcgccgagggagacgacagcgttacggtgacgttggtgcccgtggaggggagggtcaggatcggaggtctcaggatagtgtacatggcggagtgaggaccagcgtaggaaccgtttactctgcagtacgtccagggagtgcaccctcacattgctagagccttcaagaagatgtcgttcgaccacaagttaatttgggctcgtaatttcgtcaatgagaagttcccaggagtgtga

SEQ ID NO: 80450 - DNA, 3408 bp, Zea Mays
gtcgatcgagcactccacgcccctctagtaccctcctctgcacctccctctctctctcctctctactgcctttgtttttgctcgcaagaaaaacccgaaaaagaccttgcgcaaatccgtcgtcctgtccaccgacgaagcttctgagtcctcctcgccgcgcgcctctacgcgtgatatcggtcatcgttgatatgagggcggtagtgggaaaaagctgaaaaaaagaaggctagcgagtttgaaaaaggtcttttcccctgaatggtgatgtggaggtcattctcttcaattcaaatggtccccccccgcagagcaagatgaggaaatgttcaaaatactcttaagccgtgtagcacgacaagtttgttgcagaggacaagcgacgactgggttttcttggcactttgtcaagtccgtgagtagaagtttggtgtaagcttgtcttcgaacaagatgatgcagaggccaccgctccgtccggaggagtactccttgaaggaaaccacacctcaccttggtggtgcagctgctggtgacaagctcacaaccacatatgacctggttgagcagatgcagtacctttatgtaagagtggtaaaagcaaaggaacttccgaacaaggacatcactgggagttgtgatccttatgttgaggtgaaactaggaaattataagggccaaactgggcatttcgagaagaagaacaacccggagtggaatcaggtctttgcctttgcaaaggagcgcatccagtcatcagttgtggagattctggtcaaggacaaggatcttgtcaaggatgacttcattggacgtgttatatttgatttgaatgaggtcccaaagagagtgccacctgatagcccattggctccacaatggtatcggttggaagaccgcaatgggcacaaggtgaagggggagttgatgctggctgtttggatgggtactcaagctgatgaagcgttccctgaagcatggcattctgatgcagcctccgtccctggtgatggccttgcaagcattaggtcgaaagtgtatctaactccaaagctttggtatctccgtgtaaatgtcattgaagcccaggatcttataccaaatgacaagactaggttccctgaagtttatgtcaaagcaatgctaggcaaccaagtccaaagaaccagggcattggcaagccggactttgaatccattgtggaatgaggacttgatgtttgttgcagctgagccatttgaagagcacctagttttgagtgtagaggacagggtggccccaggaaaggatgaagtaattggaaggacaatcattgcactgcagcatgtaccccggaggctggatcacaggttgctaaccagccagtggtataaccttgagaagcatgtgattattgatggtgagcagaagaaagagaccaagttttcaagccggatccacttgagaatatgtcttgaaggtggatatcatgtcttggatgagtcaacacattacagtagtgatttaaggccaactgcaaagcccctgtggaaacctagcattggcattcttgaactgggtatattgacagcacagggcctgttgccaatgaagaccaaggatgggcgtggcacaactgatgcatattgtgttgcaaagtacggacaaaaatgggtgcgtaccaggactataatcgacagtttcactcccaaatggaatgaacagtacacctgggaggtgtatgatccatgcactgtggtcacaattggtgtattcgacaattgccacctgaatggcggggaaaaggccaatggtgcgagggacaccagaattgggaaggtccgcatccgcctctcgacactcgaaactgatcgggtgtatacccactcataccctcttattgttctgacacctggtggtgttaagaagatgggtgaggtgcagctcgctgtccgtttcacgtgttcatcactgctgaacatgatgcatctgtactcacagcccttgctgcccaagatgcactatgtgcacccgctgtctgtgatacaggtggacaacctgaggcgccaagccacaagcattgtctccacaaggctgggccgtgcagagccaccgctgcggaaggaaatcgtggaatacatgcttgacgtggactcgcacatgtggagcatgagaaagagcaaggcaaatttcttccgtatcacgggtgtcctgagccccctgtttgccgtggcgaggtggttcgatcagatctgtcactggaagaacccgctgaccaccgtactgatccatgtactctttatgatactggttctatacccagagctgatactgcccacaatcttcctctacctgttcctgatcggggtgtggtactacaggtggcggccgaggcagccaccgcacatggacacccgcctctcccacgcagagaccgcccacccggacgagcttgacgaggagttcgacaccttccccacctcccgcccaccggacttggtgcggatgcggtatgacaagctgcgcagcgtcgccgggaggatccagaccgtggtcggcgaccttgccacgcaaggcgagcggctgcagtcgctgctgagctggagggacccaagggcgaccgcgctgttcgtggtcttctgcttcgtcgccgccatcgtcctgtatgtcactccgttccgcgtcgtggtcttcctcgcaggcctgtacgtgctgaggcaccccaggttccgccacaagatgccatctgtcccgctcaacttcttcaggcgtctgccggcgaggaccgacagcatgctgtaggcgcggcaggtgcatggccccatcgctggcgggtggtttcgcctctcagttgcagctcacagatggttgttgctctctcttaagtaagtgtatcaaaaaaaaaaaggggctgctagctatcttcgtttactttttgagcttctctgtgttgcatggttggttatgtattcatatggttgtgaacctttcctgtaacaactggacgcatgatgcgtgactgtgtctaggtatgcatgcatgtgtgtgatgcttgaaaactccgagctttagtgtttattgctttacctacttgttcagcggcagtgctgtcagctaacaaggctctctactgctgcatgtgcatcgtgtttggtttgcagctcaatttaccgacttgccagttgtaattgggaaatactgatctgaattttgcctagccgagagcccgagagttctcttctacgcagactggaactatttgggtgccaatctgagcagaggcgagctgttgtacttgtgaacttaatagtgatgtcatggttgaatttccttccaaacggagctgatgcttgtcttcaaaacgctcatggttagggatgtaataaatggcacggatattatctatttgtatttatatccgttcat

SEQ ID NO: 80451 - DNA, 3261 bp, Zea Mays
gtcgatcgagcactccacgcccctctagtaccctcctctgcacctccctctctctctcctctctactgcctttgtttttgctcgcaagaaaaacccgaaaaagaccttgcgcaaatccgtcgtcctgtccaccgacgaagcttctgagtcctcctcgccgcgcgcctctacgccttcatatacttgctgcaggtcttttcccctgaatggtgatgtggaggtcattctcttcaattcaaatggtccccccccgcagagcaagatgaggaaatgttcaaaatactcttaagccgtgtagcacgacaagtttgttgcagaggacaagcgacgactgggttttcttggcactttgtcaagtccgtgagtagaagtttggtgtaagcttgtcttcgaacaagatgatgcagaggccaccgctccgtccggaggagtactccttgaaggaaaccacacctcaccttggtggtgcagctgctggtgacaagctcacaaccacatatgacctggttgagcagatgcagtacctttatgtaagagtggtaaaagcaaaggaacttccgaacaaggacatcactgggagttgtgatccttatgttgaggtgaaactaggaaattataagggccaaactgggcatttcgagaagaagaacaacccggagtggaatcaggtctttgcctttgcaaaggagcgcatccagtcatcagttgtggagattctggtcaaggacaaggatcttgtcaaggatgacttcattggacgtgttatatttgatttgaatgaggtcccaaagagagtgccacctgatagcccattggctccacaatggtatcggttggaagaccgcaatgggcacaaggtgaagggggagttgatgctggctgtttggatgggtactcaagctgatgaagcgttccctgaagcatggcattctgatgcagcctccgtccctggtgatggccttgcaagcattaggtcgaaagtgtatctaactccaaagctttggtatctccgtgtaaatgtcattgaagcccaggatcttataccaaatgacaagactaggttccctgaagtttatgtcaaagcaatgctaggcaaccaagtccaaagaaccagggcattggcaagccggactttgaatccattgtggaatgaggacttgatgtttgttgcagctgagccatttgaagagcacctagttttgagtgtagaggacagggtggccccaggaaaggatgaagtaattggaaggacaatcattgcactgcagcatgtaccccggaggctggatcacaggttgctaaccagccagtggtataaccttgagaagcatgtgattattgatggtgagcagaagaaagagaccaagttttcaagccggatccacttgagaatatgtcttgaaggtggatatcatgtcttggatgagtcaacacattacagtagtgatttaaggccaactgcaaagcccctgtggaaacctagcattggcattcttgaactgggtatattgacagcacagggcctgttgccaatgaagaccaaggatgggcgtggcacaactgatgcatattgtgttgcaaagtacggacaaaaatgggtgcgtaccaggactataatcgacagtttcactcccaaatggaatgaacagtacacctgggaggtgtatgatccatgcactgtggtcacaattggtgtattcgacaattgccacctgaatggcggggaaaaggccaatggtgcgagggacaccagaattgggaaggtccgcatccgcctctcgacactcgaaactgatcgggtgtatacccactcataccctcttattgttctgacacctggtggtgttaagaagatgggtgaggtgcagctcgctgtccgtttcacgtgttcatcactgctgaacatgatgcatctgtactcacagcccttgctgcccaagatgcactatgtgcacccgctgtctgtgatacaggtggacaacctgaggcgccaagccacaagcattgtctccacaaggctgggccgtgcagagccaccgctgcggaaggaaatcgtggaatacatgcttgacgtggactcgcacatgtggagcatgagaaagagcaaggcaaatttcttccgtatcacgggtgtcctgagccccctgtttgccgtggcgaggtggttcgatcagatctgtcactggaagaacccgctgaccaccgtactgatccatgtggcggccgaggcagccaccgcacatggacacccgcctctcccacgcagagaccgcccacccggacgagcttgacgaggagttcgacaccttccccacctcccgcccaccggacttggtgcggatgcggtatgacaagctgcgcagcgtcgccgggaggatccagaccgtggtcggcgaccttgccacgcaaggcgagcggctgcagtcgctgctgagctggagggacccaagggcgaccgcgctgttcgtggtcttctgcttcgtcgccgccatcgtcctgtatgtcactccgttccgcgtcgtggtcttcctcgcaggcctgtacgtgctgaggcaccccaggttccgccacaagatgccatctgtcccgctcaacttcttcaggcgtctgccggcgaggaccgacagcatgctgtaggcgcggcaggtgcatggccccatcgctggcgggtggtttcgcctctcagttgcagctcacagatggttgttgctctctcttaagtaagtgtatcaaaaaaaaaaaggggctgctagctatcttcgtttactttttgagcttctctgtgttgcatggttggttatgtattcatatggttgtgaacctttcctgtaacaactggacgcatgatgcgtgactgtgtctaggtatgcatgcatgtgtgtgatgcttgaaaactccgagctttagtgtttattgctttacctacttgttcagcggcagtgctgtcagctaacaaggctctctactgctgcatgtgcatcgtgtttggtttgcagctcaatttaccgacttgccagttgtaattgggaaatactgatctgaattttgcctagccgagagcccgagagttctcttctacgcagactggaactatttgggtgccaatctgagcagaggcgagctgttgtacttgtgaacttaatagtgatgtcatggttgaatttccttccaaacggagctgatgcttgtcttcaaaacgctcatggttagggatgtaataaatggcacggatattatctatttgtatttatatccgttcat

SEQ ID NO: 80452 - DNA, 3239 bp, Zea Mays
gtcgatcgagcactccacgcccctctagtaccctcctctgcacctccctctctctctcctctctactgcctttgtttttgctcgcaagaaaaacccgaaaaagaccttgcgcaaatccgtcgtcctgtccaccgacgaagcttctgagtcctcctcgccgcgcgcctctacgcgtgatatcggtcttttcccctgaatggtgatgtggaggtcattctcttcaattcaaatggtccccccccgcagagcaagatgaggaaatgttcaaaatactcttaagccgtgtagcacgacaagtttgttgcagaggacaagcgacgactgggttttcttggcactttgtcaagtccgtgagtagaagtttggtgtaagcttgtcttcgaacaagatgatgcagaggccaccgctccgtccggaggagtactccttgaaggaaaccacacctcaccttggtggtgcagctgctggtgacaagctcacaaccacatatgacctggttgagcagatgcagtacctttatgtaagagtggtaaaagcaaaggaacttccgaacaaggacatcactgggagttgtgatccttatgttgaggtgaaactaggaaattataagggccaaactgggcatttcgagaagaagaacaacccggagtggaatcaggtctttgcctttgcaaaggagcgcatccagtcatcagttgtggagattctggtcaaggacaaggatcttgtcaaggatgacttcattggacgtgttatatttgatttgaatgaggtcccaaagagagtgccacctgatagcccattggctccacaatggtatcggttggaagaccgcaatgggcacaaggtgaagggggagttgatgctggctgtttggatgggtactcaagctgatgaagcgttccctgaagcatggcattctgatgcagcctccgtccctggtgatggccttgcaagcattaggtcgaaagtgtatctaactccaaagctttggtatctccgtgtaaatgtcattgaagcccaggatcttataccaaatgacaagactaggttccctgaagtttatgtcaaagcaatgctaggcaaccaagtccaaagaaccagggcattggcaagccggactttgaatccattgtggaatgaggacttgatgtttgttgcagctgagccatttgaagagcacctagttttgagtgtagaggacagggtggccccaggaaaggatgaagtaattggaaggacaatcattgcactgcagcatgtaccccggaggctggatcacaggttgctaaccagccagtggtataaccttgagaagcatgtgattattgatggtgagcagaagaaagagaccaagttttcaagccggatccacttgagaatatgtcttgaaggtggatatcatgtcttggatgagtcaacacattacagtagtgatttaaggccaactgcaaagcccctgtggaaacctagcattggcattcttgaactgggtatattgacagcacagggcctgttgccaatgaagaccaaggatgggcgtggcacaactgatgcatattgtgttgcaaagtacggacaaaaatgggtgcgtaccaggactataatcgacagtttcactcccaaatggaatgaacagtacacctgggaggtgtatgatccatgcactgtggtcacaattggtgtattcgacaattgccacctgaatggcggggaaaaggccaatggtgcgagggacaccagaattgggaaggtccgcatccgcctctcgacactcgaaactgatcgggtgtatacccactcataccctcttattgttctgacacctggtggtgttaagaagatgggtgaggtgcagctcgctgtccgtttcacgtgttcatcactgctgaacatgatgcatctgtactcacagcccttgctgcccaagatgcactatgtgcacccgctgtctgtgatacaggtggacaacctgaggcgccaagccacaagcattgtctccacaaggctgggccgtgcagagccaccgctgcggaaggaaatcgtggaatacatgcttgacgtggactcgcacatgtggagcatgagaaagagcaaggcaaatttcttccgtatcacgggtgtcctgagccccctgtttgccgtggcgaggtggttcgatcagatctgtcactggaagaacccgctgaccaccgtggcggccgaggcagccaccgcacatggacacccgcctctcccacgcagagaccgcccacccggacgagcttgacgaggagttcgacaccttccccacctcccgcccaccggacttggtgcggatgcggtatgacaagctgcgcagcgtcgccgggaggatccagaccgtggtcggcgaccttgccacgcaaggcgagcggctgcagtcgctgctgagctggagggacccaagggcgaccgcgctgttcgtggtcttctgcttcgtcgccgccatcgtcctgtatgtcactccgttccgcgtcgtggtcttcctcgcaggcctgtacgtgctgaggcaccccaggttccgccacaagatgccatctgtcccgctcaacttcttcaggcgtctgccggcgaggaccgacagcatgctgtaggcgcggcaggtgcatggccccatcgctggcgggtggtttcgcctctcagttgcagctcacagatggttgttgctctctcttaagtaagtgtatcaaaaaaaaaaaggggctgctagctatcttcgtttactttttgagcttctctgtgttgcatggttggttatgtattcatatggttgtgaacctttcctgtaacaactggacgcatgatgcgtgactgtgtctaggtatgcatgcatgtgtgtgatgcttgaaaactccgagctttagtgtttattgctttacctacttgttcagcggcagtgctgtcagctaacaaggctctctactgctgcatgtgcatcgtgtttggtttgcagctcaatttaccgacttgccagttgtaattgggaaatactgatctgaattttgcctagccgagagcccgagagttctcttctacgcagactggaactatttgggtgccaatctgagcagaggcgagctgttgtacttgtgaacttaatagtgatgtcatggttgaatttccttccaaacggagctgatgcttgtcttcaaaacgctcatggttagggatgtaataaatggcacggatattatctatttgtatttatatccgttcat

SEQ ID NO: 80453 - DNA, 3414 bp, Zea Mays
cctgtgtttttgccctcaggctttttcgtcccgcgtggttggttccattctactggtctcttcgagcctgtgaggggaaatggtaatgccggtggtcgcgaccgcggttccttggtccgaccctgttccccgagtagctgcaggaatttgcgtttgctcggccggcatagcgcggcgtggttcaaggggtcatcgttgatatgagggcggtagtgggaaaaagctgaaaaaaagaaggctagcgagtttgaaaaaggtcttttcccctgaatggtgatgtggaggtcattctcttcaattcaaatggtccccccccgcagagcaagatgaggaaatgttcaaaatactcttaagccgtgtagcacgacaagtttgttgcagaggacaagcgacgactgggttttcttggcactttgtcaagtccgtgagtagaagtttggtgtaagcttgtcttcgaacaagatgatgcagaggccaccgctccgtccggaggagtactccttgaaggaaaccacacctcaccttggtggtgcagctgctggtgacaagctcacaaccacatatgacctggttgagcagatgcagtacctttatgtaagagtggtaaaagcaaaggaacttccgaacaaggacatcactgggagttgtgatccttatgttgaggtgaaactaggaaattataagggccaaactgggcatttcgagaagaagaacaacccggagtggaatcaggtctttgcctttgcaaaggagcgcatccagtcatcagttgtggagattctggtcaaggacaaggatcttgtcaaggatgacttcattggacgtgttatatttgatttgaatgaggtcccaaagagagtgccacctgatagcccattggctccacaatggtatcggttggaagaccgcaatgggcacaaggtgaagggggagttgatgctggctgtttggatgggtactcaagctgatgaagcgttccctgaagcatggcattctgatgcagcctccgtccctggtgatggccttgcaagcattaggtcgaaagtgtatctaactccaaagctttggtatctccgtgtaaatgtcattgaagcccaggatcttataccaaatgacaagactaggttccctgaagtttatgtcaaagcaatgctaggcaaccaagtccaaagaaccagggcattggcaagccggactttgaatccattgtggaatgaggacttgatgtttgttgcagctgagccatttgaagagcacctagttttgagtgtagaggacagggtggccccaggaaaggatgaagtaattggaaggacaatcattgcactgcagcatgtaccccggaggctggatcacaggttgctaaccagccagtggtataaccttgagaagcatgtgattattgatggtgagcagaagaaagagaccaagttttcaagccggatccacttgagaatatgtcttgaaggtggatatcatgtcttggatgagtcaacacattacagtagtgatttaaggccaactgcaaagcccctgtggaaacctagcattggcattcttgaactgggtatattgacagcacagggcctgttgccaatgaagaccaaggatgggcgtggcacaactgatgcatattgtgttgcaaagtacggacaaaaatgggtgcgtaccaggactataatcgacagtttcactcccaaatggaatgaacagtacacctgggaggtgtatgatccatgcactgtggtcacaattggtgtattcgacaattgccacctgaatggcggggaaaaggccaatggtgcgagggacaccagaattgggaaggtccgcatccgcctctcgacactcgaaactgatcgggtgtatacccactcataccctcttattgttctgacacctggtggtgttaagaagatgggtgaggtgcagctcgctgtccgtttcacgtgttcatcactgctgaacatgatgcatctgtactcacagcccttgctgcccaagatgcactatgtgcacccgctgtctgtgatacaggtggacaacctgaggcgccaagccacaagcattgtctccacaaggctgggccgtgcagagccaccgctgcggaaggaaatcgtggaatacatgcttgacgtggactcgcacatgtggagcatgagaaagagcaaggcaaatttcttccgtatcacgggtgtcctgagccccctgtttgccgtggcgaggtggttcgatcagatctgtcactggaagaacccgctgaccaccgtactgatccatgtactctttatgatactggttctatacccagagctgatactgcccacaatcttcctctacctgttcctgatcggggtgtggtactacaggtggcggccgaggcagccaccgcacatggacacccgcctctcccacgcagagaccgcccacccggacgagcttgacgaggagttcgacaccttccccacctcccgcccaccggacttggtgcggatgcggtatgacaagctgcgcagcgtcgccgggaggatccagaccgtggtcggcgaccttgccacgcaaggcgagcggctgcagtcgctgctgagctggagggacccaagggcgaccgcgctgttcgtggtcttctgcttcgtcgccgccatcgtcctgtatgtcactccgttccgcgtcgtggtcttcctcgcaggcctgtacgtgctgaggcaccccaggttccgccacaagatgccatctgtcccgctcaacttcttcaggcgtctgccggcgaggaccgacagcatgctgtaggcgcggcaggtgcatggccccatcgctggcgggtggtttcgcctctcagttgcagctcacagatggttgttgctctctcttaagtaagtgtatcaaaaaaaaaaaggggctgctagctatcttcgtttactttttgagcttctctgtgttgcatggttggttatgtattcatatggttgtgaacctttcctgtaacaactggacgcatgatgcgtgactgtgtctaggtatgcatgcatgtgtgtgatgcttgaaaactccgagctttagtgtttattgctttacctacttgttcagcggcagtgctgtcagctaacaaggctctctactgctgcatgtgcatcgtgtttggtttgcagctcaatttaccgacttgccagttgtaattgggaaatactgatctgaattttgcctagccgagagcccgagagttctcttctacgcagactggaactatttgggtgccaatctgagcagaggcgagctgttgtacttgtgaacttaatagtgatgtcatggttgaatttccttccaaacggagctgatgcttgtcttcaaaacgctcatggttagggatgtaataaatggcacggatattatctatttgtatttatatccgttcat

SEQ ID NO: 80454 - DNA, 3201 bp, Zea Mays
atttgcgtttgctcggccggcatagcgcggcgtggttcaaggggtcttttcccctgaatggtgatgtggaggtcattctcttcaattcaaatggtccccccccgcagagcaagatgaggaaatgttcaaaatactcttaagccgtgtagcacgacaagtttgttgcagaggacaagcgacgactgggttttcttggcactttgtcaagtccgtgagtagaagtttggtgtaagcttgtcttcgaacaagatgatgcagaggccaccgctccgtccggaggagtactccttgaaggaaaccacacctcaccttggtggtgcagctgctggtgacaagctcacaaccacatatgacctggttgagcagatgcagtacctttatgtaagagtggtaaaagcaaaggaacttccgaacaaggacatcactgggagttgtgatccttatgttgaggtgaaactaggaaattataagggccaaactgggcatttcgagaagaagaacaacccggagtggaatcaggtctttgcctttgcaaaggagcgcatccagtcatcagttgtggagattctggtcaaggacaaggatcttgtcaaggatgacttcattggacgtgttatatttgatttgaatgaggtcccaaagagagtgccacctgatagcccattggctccacaatggtatcggttggaagaccgcaatgggcacaaggtgaagggggagttgatgctggctgtttggatgggtactcaagctgatgaagcgttccctgaagcatggcattctgatgcagcctccgtccctggtgatggccttgcaagcattaggtcgaaagtgtatctaactccaaagctttggtatctccgtgtaaatgtcattgaagcccaggatcttataccaaatgacaagactaggttccctgaagtttatgtcaaagcaatgctaggcaaccaagtccaaagaaccagggcattggcaagccggactttgaatccattgtggaatgaggacttgatgtttgttgcagctgagccatttgaagagcacctagttttgagtgtagaggacagggtggccccaggaaaggatgaagtaattggaaggacaatcattgcactgcagcatgtaccccggaggctggatcacaggttgctaaccagccagtggtataaccttgagaagcatgtgattattgatggtgagcagaagaaagagaccaagttttcaagccggatccacttgagaatatgtcttgaaggtggatatcatgtcttggatgagtcaacacattacagtagtgatttaaggccaactgcaaagcccctgtggaaacctagcattggcattcttgaactgggtatattgacagcacagggcctgttgccaatgaagaccaaggatgggcgtggcacaactgatgcatattgtgttgcaaagtacggacaaaaatgggtgcgtaccaggactataatcgacagtttcactcccaaatggaatgaacagtacacctgggaggtgtatgatccatgcactgtggtcacaattggtgtattcgacaattgccacctgaatggcggggaaaaggccaatggtgcgagggacaccagaattgggaaggtccgcatccgcctctcgacactcgaaactgatcgggtgtatacccactcataccctcttattgttctgacacctggtggtgttaagaagatgggtgaggtgcagctcgctgtccgtttcacgtgttcatcactgctgaacatgatgcatctgtactcacagcccttgctgcccaagatgcactatgtgcacccgctgtctgtgatacaggtggacaacctgaggcgccaagccacaagcattgtctccacaaggctgggccgtgcagagccaccgctgcggaaggaaatcgtggaatacatgcttgacgtggactcgcacatgtggagcatgagaaagagcaaggcaaatttcttccgtatcacgggtgtcctgagccccctgtttgccgtggcgaggtggttcgatcagatctgtcactggaagaacccgctgaccaccgtactgatccatgtactctttatgatactggttctatacccagagctgatactgcccacaatcttcctctacctgttcctgatcggggtgtggtactacaggtggcggccgaggcagccaccgcacatggacacccgcctctcccacgcagagaccgcccacccggacgagcttgacgaggagttcgacaccttccccacctcccgcccaccggacttggtgcggatgcggtatgacaagctgcgcagcgtcgccgggaggatccagaccgtggtcggcgaccttgccacgcaaggcgagcggctgcagtcgctgctgagctggagggacccaagggcgaccgcgctgttcgtggtcttctgcttcgtcgccgccatcgtcctgtatgtcactccgttccgcgtcgtggtcttcctcgcaggcctgtacgtgctgaggcaccccaggttccgccacaagatgccatctgtcccgctcaacttcttcaggcgtctgccggcgaggaccgacagcatgctgtaggcgcggcaggtgcatggccccatcgctggcgggtggtttcgcctctcagttgcagctcacagatggttgttgctctctcttaagtaagtgtatcaaaaaaaaaaaggggctgctagctatcttcgtttactttttgagcttctctgtgttgcatggttggttatgtattcatatggttgtgaacctttcctgtaacaactggacgcatgatgcgtgactgtgtctaggtatgcatgcatgtgtgtgatgcttgaaaactccgagctttagtgtttattgctttacctacttgttcagcggcagtgctgtcagctaacaaggctctctactgctgcatgtgcatcgtgtttggtttgcagctcaatttaccgacttgccagttgtaattgggaaatactgatctgaattttgcctagccgagagcccgagagttctcttctacgcagactggaactatttgggtgccaatctgagcagaggcgagctgttgtacttgtgaacttaatagtgatgtcatggttgaatttccttccaaacggagctgatgcttgtcttcaaaacgctcatggttagggatgtaataaatggcacggatattatctatttgtatttatatccgttcat

SEQ ID NO: 80455 - DNA, 1616 bp, Zea Mays
agcaggcgctttgaaaggtgccgggggcaaggctgcgtgcgtggaggactggaggtggctggataggcgccagttgggaggaatggccgatggttgtgctttcgttggcgtgtggagtttatggggaacggttggtgcgtgccattgctgccgcggtggtttgaccattagtttcattgcaaggacagcagcttttggtctggactctggagatgtcagtcactatggaacagtggtggtgtaggtcaattccctgtgaggtttcgtgttgccttcaacatacgtgcaggagttgccaacttgccacattccaactactgctgtagttgtagctgaaccggccggctacaaaacagtacagtaattcactgttatgaagcaatgttccgcagtgaagattggcactgctattcacttgaatgggtcttctttcttgataaatgaatcttgatattcgaaatggaactctaggcagctttatctttgaatttgctttctttaaaatatcaacatgagatcggtagaactgaggaaaaggaaccatttaactaatgtctgtttattttttggggcccttatcaggtatcaggaacagcattggtgctagatgagatcatcaatcatgttcagtctctccaaaggcaagttgagtacttgtcaatgaggctcgcagctgtaaacccaagggtcgattttggtgggctagacagctttctgaccacagagtgtggaaggatagcaggcttcaactgcaagaacggaatcgacttggagcaggtaacctggccagaaatgggtgttcatggagcaaggcagctgatgcaacttcaacagcagttctggcatggcgatttaacacatccacaccaagtggcttcacagtgggaaaagcgtggggatggccatcctcccgtctttagcaactccagtccctctctcttcggctatgatctaacaagctctggagcccagcaaaccccggcgagcaagctaaagacggagctttgagcgacgatggatggtagatagcattgtcaggagagcaggctgaacatatgcggtgggggcgcagcagcgacatgatttcagcaagttgaccaggtcaggctacaaacgggctgggaatgttgatgtgaagcgcatggagaccaacattttcagagacagagaggatgtacatatagcgatagagaatactattggtgttgagctgaagacgggaataccatagttgtattgtagagatgggcacgccctgctgctatcgctgaagagatgggagggcgagcgatactccggtctagttgctggtattcttggtgtatttcttactataatggcccaatcttaaggttatatgagcagcaatttttatgaaccaaaacccaaaaaaaaccatcatgggtcatcatatacccttctcgaatgcatttcaacaaaacatgaatgtagcacagtataactacatgtaacacacgtgcttgttacaatcctactgttccaagccattctaggttttctttaaggcatacggattttgttacatatttatatatggcttttgttatgtactttcagatacgcattgtattttttattgtgcacttggatatgca

SEQ ID NO: 80456 - DNA, 728 bp, Zea Mays
cggatctgggcaaaccggtctgttctactgccctggatccaagcagtgtgcgttgtggagacaggagctattggaggagcccagcaaaccccggcgagcaagctaaagacggagctttgagcgacgatggatggtagatagcattgtcaggagagcaggctgaacatatgcggtgggggcgcagcagcgacatgatttcagcaagttgaccaggtcaggctacaaacgggctgggaatgttgatgtgaagcgcatggagaccaacattttcagagacagagaggatgtacatatagcgatagagaatactattggtgttgagctgaagacgggaataccatagttgtattgtagagatgggcacgccctgctgctatcgctgaagagatgggagggcgagcgatactccggtctagttgctggtattcttggtgtatttcttactataatggcccaatcttaaggttatatgagcagcaatttttatgaaccaaaacccaaaaaaaaccatcatgggtcatcatatacccttctcgaatgcatttcaacaaaacatgaatgtagcacagtataactacatgtaacacacgtgcttgttacaatcctactgttccaagccattctaggttttctttaaggcatacggattttgttacatatttatatatggcttttgttatgtactttcagatacgcattgtattttttattgtgcacttggatatgca

SEQ ID NO: 80457 - DNA, 1591 bp, Zea Mays
gttgatgcattattgttatttccataggatgcgagcctaacgaattcactttggcatccgtccttacctcctgtactggctctcaaggcatacaccaacaccagattaagcaagtccatgcttttgccatcaagaaaaattttgagttacacatgtttgtagggagttcccttcttgacatgtatgccaggtcagagaatatccaagaagctcggagggtgtttgatatgcttcctgcaagagatgttgtttcctataccaccattttatctggctacacccgactgggccttgatgaggaagccctgaacttgttcaggcagctgtacaatgaagggatgcaatgcaatcaagttacgttctcagtccttctcaatgcattgtctgggctttcttctatggattatggaaagcaggtccatgggctaattcttcgtagagagttgccatttttcatggctttgcagaattctttgattgacatgtactctaaatgtggcaagctgttatactcacgaagggtgtttgacaatatgcctgagagatcagtggttagctggaatgctatgcttatgggatatggaaggcatggcatggcatatgaagttgttcagctcttcagatttatgtgtgataaagtgaagcctgacagtgttactctattggctgttttgttgggctatagtcatggtggtctggttgacgagggccttgatatgttcgatcatatagttaaagagcagagcacactcctcaatactcaacattatggatgtgttattgatcttcttggacgttctggacaacttgagaaggcactacttttgatacaaaagatgccatttcaaccaactcgagcaatttggggttcattgcttggtgcttgtagagttcatgctaatgttcatgtcggtgagtttgttgcgcagaagctttttgacattgaaccggaaaatgctggcaattatgtgatcctttctaacatttatgctgctgctcggatgtggaaagatgttttcagactgagaaagttaatgttaaagaagactgtgataaaagaacctgggcggagctggatgattcttgacaaggttattcataccttccactctagtgagcgtttccaccccaggaaggaagatataaatgttaagattaatgagatatatgctgctattaaagcggctggttttgttcctgatctgagctgtgtacttcatgatgttgatgatgagcagaaagaacgcatgcttcttgggcacagtgagaagctggccataacttttggactgatgagtactccttcagacttgaccatccaggttatgaagaatcttcgcatctgtgttgactgccacaattttgcaaagtttgtctcaaaagtttatggaagggagatatccctcagagacaaaaatcgctttcatctaattacagaaggagcttgcacctgtggagattactggtgaaagatacaatgctatactattcagattgctttgctgatagggggaatctgtccttatgttgtgattgtagtgcagataatgatatgcaatggtctcgcaaaaaaatgatatgtaatggtcca

SEQ ID NO: 80458 - DNA, 2871 bp, Zea Mays
cctaccctatgtcgcgagctcggccggcattagccatggcggcggaggcggaggcggcgctcctgctgctgctgctcctgtgcgcggcggcgttcgtggagcgcggcgcggcgctgcacctctgcacggaccggctgttcaacgacacgaaggggcggcacgacgacggcctgccgcacctgaccccgacggaggaggccacgtggatgtccctcctcccgcgcaggctccgcggcggcggccgggccgagttcgactggctggcgctgtaccgcagcctgacgcgcggcgacgggccggacggtggcgccggcaaggccgcgggccccgaggggctgctgtcgccggcgtccctgcacgacgtccgcctccacggcgacggcagcctctcctccatgtactggcgggcgcagcagaccaacctcgagtacctgctctacctcgaccccgaccgcctcacctggaccttccgccagcaggctggcctgcctaccgtcggggacccctacggcggctgggaggcgccggacgggcagctccgcggccatttcgtagggcactacctgagcgcgagcgcgcacgcgtgggcggccacgcacaacggcaccctgagggagaggatggcgagggtggtggacattctccacgcctgccagaagaagatgggcacggggtacctctcggcgtaccccgagaccatgttcgacctgtacgagcagctggacgaggcgtggtcgccatactacaccacccacaagggactcctcgaccagtacacgctggccagcaacgagaaaggccttgacgtggtgctgcggatggccgactacttcagcaaccgcgtgaagaacctggtgcagatccacactatccagaggcactgggaggcgatgaacgaggagaccggcggcttcaacgacgtcatgtatcagctgtacactataacgagagatcagaaacacctgacgatggctcatcttttcgacaagccatgcttcctcggaccacttggtctccataaagacgacatctcgggcttgcatgtgaacacgcatctccccgtcctcgttggtgcgcagaagagatacgaggtcgttggcgatcgtctctacaaggacatctcgacttacttgtttgatgtggtgaattcttctcacactttcgcaaccggaggcacatctaccatggaacactggcatgacccaaagaggctggtggacgagatcaagatcagctcgaacgaggagacctgcgccacctacaacttcctcaaggtgtcgcggaacctgttccggtggacgaaggaggccaagtacgcggaccactacgagaggctgctcatcaacgggatcatgggcaaccagagggggacgcagcccggggtcatgctctacttccttcccatggggcctgggcggtccaagagcgtcagtggccagtcaccgtctggcctcccgcccaagaacccaggggggtggggaggtcccaacgacacgttctggtgctgctatggcacggggatagagtcgttctcaaagctaggggactccatatacttcctggaggaaggtgacacccctgggctctacatcatccagtacataccgagcaccttcgactggaaagccacgggcctcactgtcaaccagcgggcgaaacctctgctgtcaacggaccccttcttcaaagtttcgctcaccatttctgcaaagagaggtgcccgacaagcgaaggtgagtgtccggatcccatcgtggacgacaaccgatggcgcaacggcgatcctgaacggccagaagctcaacctgacacccactggcaactcgactaatggtggtttcctgacgattaccaagctctgggccaatgacaccttgaccctccatttccccattacccttagaactgaggcaatcaaggatgaccggccggagtacgcgtccatccaagcggtgctgttcggaccgcacctcctcgccggcctgacacacggcaagctgccagtgacagacagcagccactccaacgacggcctgaccgcaggcatctgggaagtggacgccacaggcgccgcctccgtcgccggctgggtcaccccgctccactccgagacgctcaactcacagctcgtcaccctgaaacagagcattggcgggcgcaccctcgtcttgtcggtgtccatcgctgacgcgaagctggagatgcaggagcagcccgcccccgggaccgacgcgtgcgtgcacgccacgttccgcgcctacggccaggcgggcggcagcagccagctgctgcgagggcccaacgtgacgatcgagccgttcgacagaccgggcatggcggtcaccaacggcctcgccgtcggctgccgtggaggccgcgacacgctcttcaacgccgtgccggggctggacggcgcgccgggctccgtgtccctggagcttgccaccaggccggggtggttcgtggcgacggcccccacagcgatgcacgcgaacgccaccacgcaggtcgtctgccgagccaacaagggcggcgcggcgttccggcgagcggcgagcttcgcgcgcgcgccgccgctgaggcgttaccacccgctgagcttcgcggcgcgcgggacggcgcggaacttcctgctggagccgctgcggagcctgcaggatgagttctacaccgtctattttagcctcgtctccgacggcgagagctgattgatcggtgtgctcctgaacgaacgctccgctagtttcgctgtgcaatgagccattgacgctctgtatcccccatgaactatgtgcaatttggagtggagtaaaaatgtatggcgctagttccatgaatccatcaaaattcccttaccgttaatagcttaaa

SEQ ID NO: 80459 - DNA, 3791 bp, Zea Mays
tccccaccgagtctaagaatctccagcaaccgtccctctcgtgacgcccgcgatccccagcggcggcgtcgacaatgtatgcttgctcaggcgatcagagaggataaacacggaagcgccgccgtcctccgctatttccaggccagctagcctgggggcgcggcgctctccattctccagccgtcgtcacgggacgcaacgtgacaaaggaaactggccggcgttgcgacaaagcccagctcctgtcgtgtggcgacatgtgatcgaatcgagtgcgcgagagcctgggactgagagggccgggcagggttcttctgcgcgcgcggcgttaggccacttctcgtcgcagaaactatgtattgtagttgtaggtatagtttatataaattaatataatagaaatagaaaccatgtgtgtgtgtggttttcagcaccgtggctcttagcttctcgtgtcctggccgtaagcattccgtgcgatgcctccgctgtccggccgtcgtggtctcgtcacgcacgcacacgtacacacacctcgcttgatatgatgcccgtgtgctctcaggtctcaaacaacgctgtccgtctctccggcgcggaggggataaaagtctcggcgtgaactcctggccagtcttttgctgctgccatatccgcgcgcactgccggccggccagccagccagccagcgcgcgcgtgtcgcggcggagctagagggctaggtagcagagtggtggccagtgccgcgggttgcgttgggatggcggcgcttgtggcgctgacgctggcgctggcgctgacggcggcagtgacagcgacggcgaaggagtgcaccaacatcccgacggagctgtcgtcgcacacggtgcgggcgcggctgcaggcggcgccgggcggagcggcggagtggcggtggcgcgagctgttccacgagcacctcaaccccaccgacgaggccgcgtggatggacctcatgccgccgcctggcgccgcggctgcggcgcaacaccagcagcaccaccgccaggaggagctcgactgggtgatgctctaccggtcgctcaagggccagcagcagcagcagccggtggggggcggcaccgccgcagccgggagtacgccgttcctggaggaggtgtccctgcacgacgtgcgcctggaccccgacggcgacgtggcgtacgggcgcgcgcagcagacgaacctcgagtacctgctgctgctggacgtggaccgcctcgtctggagcttccgctcccaggcggggctgccggcgcccggaaccccctacggcggctgggagaagcctgacagcgagctcaggggccacttcgtcggtcactacctgagcgcgacggccaagatgtgggcgagcacgcacaacggcacgctcgccggcaggatgtcggcggtggtggacgcgctcgacgagtgccagcgcgccggcggcacgggctacctctccgccttccccgccgagttcttcgaccgcttcgaggccatcaagcccgtctgggcgccctactacaccatccacaagatcatgcagggcctcctcgaccagcacgtggtggccggcaacggcaaggcgctgcggatgttggtcgccatggccgactacttcgccggccgggtcaggaacgtcatccagaggtacagcatcgagcgccactggacgtcgctcaacgaggagaccggagggatgaacgacgtgctctaccagctctacaccatcacgcacgaccagaggcatctggtgctggcccatctattcgacaagccatgcttcctgggtttgcttgcggtgcaggctgacagcctttcgaatttccatgccaacacccatattccggttgtaattggcgggcagatgagatatgaagttacaggtgatcctctttataaggaaattgcgacgttcttcatggacacagtgaactcctctcacgcatacgcgactggtggtacatctgtcagtgaattctggtccaatccaaagcgattagctgaagctctgaccactgagactgaggagtcctgcacaacttacaatatgctcaaggtttcgcgccatctgttcagatggacgaaggagatcgcgtacgcggactactacgagcgagcgctgatcaacggcgtgctgagcatccagaggggcagggaccccggagtgatgatctacatgctgccccagggccccgggagatccaaggcgaagagctaccatggctggggaactcagtacgaatcgttctggtgctgctatggcactgggatagaatcgttctccaagctgggagattccatttacttcgaggagagagctgatgcccctcagctcgtcggatcagtaccttcaggtctcgttctccgtatctgccaagacgacaaacggtcagtttgcgacgttgaacgtgagaataccatcgtggacatctttgaatggcgcaaaggcaacactgaatggcaagcatctggaattagcatctccagggacatttctcactatcagcaagcagtggggcagcggtgatcagttgtcactccagttacctatccacctaaggactgaagcaataaaagatgaccggccggagtacgcgtctatacaagcagtcctgttcgggccgttcctcctcgccggcctcaccaccggagactgggacgccaagaccggcgccgccgacgccgcagcctccgactggatcacccccgtccctgtggagtccaactcccagctggtgacgctggcgcaggagtccggcggcgaggccttcgtcctctccgccctgaacgggtccttgacgatgctgcagcggcccaaagacggcggcggcaccgaggccgccgtgcacgcgacgttcaggctcgtcccgcagggaggcgccggcgcgggcgccgccgcgatgctcgagccgctggacatgccggggatggtggtcacggacaggctcacggtggccgcggagaagagctcgggcgccgcgttcaacgtcgtgccggggctcgccggtgcgcccggctcggtgtcgctcgagctcgcgtccaggccggggtgcttcttggtcggcggcggcgagaaggtgcaggtgggctgtgccggtggtgcccagcagaagcgcggcgacggcgcctggttccggcggtcggccagcttcgcgcggggcgagccgctgcggcggtaccaccccatgagcttcgctgccaggggcgtgaggaggagcttcctcctggagccattgttcaccttgagggacgagttctacaccgtctacttcaaccttgtagcgtgacagacgggagatgacgacgagacctgcaggtcgaggactcgaggttgatgttgcttcggcctctggtaaccaaggggggaaaatgttgagttggaggtggagtgtcggacagttatgtttagagaaaagagaatgattttcccatattcaccgaatgatccgcggccgcctatttctgcttcaaccattcatcatcgtcgccataattctaaccacttcttgggtccctcctccagcttgctgcgtccaagcacagtttatttgccagtttctaaatctatactatatttaaagcaccagtttcaacggtcgtcatgcgtcatttttttacaaataactcatcacagttatttcaaattaatctgttgcacgtctatagatatcaaacgatgcccgacacgggctagatgcacgcgggccataactatggcacagacacgtcatgccggcctgctaactgtgtcgggtcagcccgttagcccgttgatccatttaatt

SEQ ID NO: 80460 - DNA, 3636 bp, Zea Mays
caggccagctagcctgggggcgcggcgctctccattctccagccgtcgtcacgggacgcaacgtgacaaaggaaactggccggcgttgcgacaaagcccagctcctgtcgtgtggcgacatgtgatcgaatcgagtgcgcgagagcctgggactgagagggccgggcagggttcttctgcgcgcgcggcgttaggccacttctcgtcgcagaaactatgtattgtagttgtaggtatagtttatataaattaatataatagaaatagaaaccatgtgtgtgtgtggttttcagcaccgtggctcttagcttctcgtgtcctggccgtaagcattccgtgcgatgcctccgctgtccggccgtcgtggtctcgtcacgcacgcacacgtacacacacctcgcttgatatgatgcccgtgtgctctcaggtctcaaacaacgctgtccgtctctccggcgcggaggggataaaagtctcggcgtgaactcctggccagtcttttgctgctgccatatccgcgcgcactgccggccggccagccagccagccagcgcgcgcgtgtcgcggcggagctagagggctaggtagcagagtggtggccagtgccgcgggttgcgttgggatggcggcgcttgtggcgctgacgctggcgctggcgctgacggcggcagtgacagcgacggcgaaggagtgcaccaacatcccgacggagctgtcgtcgcacacggtgcgggcgcggctgcaggcggcgccgggcggagcggcggagtggcggtggcgcgagctgttccacgagcacctcaaccccaccgacgaggccgcgtggatggacctcatgccgccgcctggcgccgcggctgcggcgcaacaccagcagcaccaccgccaggaggagctcgactgggtgatgctctaccggtcgctcaagggccagcagcagcagcagccggtggggggcggcaccgccgcagccgggagtacgccgttcctggaggaggtgtccctgcacgacgtgcgcctggaccccgacggcgacgtggcgtacgggcgcgcgcagcagacgaacctcgagtacctgctgctgctggacgtggaccgcctcgtctggagcttccgctcccaggcggggctgccggcgcccggaaccccctacggcggctgggagaagcctgacagcgagctcaggggccacttcgtcggtcactacctgagcgcgacggccaagatgtgggcgagcacgcacaacggcacgctcgccggcaggatgtcggcggtggtggacgcgctcgacgagtgccagcgcgccggcggcacgggctacctctccgccttccccgccgagttcttcgaccgcttcgaggccatcaagcccgtctgggcgccctactacaccatccacaagatcatgcagggcctcctcgaccagcacgtggtggccggcaacggcaaggcgctgcggatgttggtcgccatggccgactacttcgccggccgggtcaggaacgtcatccagaggtacagcatcgagcgccactggacgtcgctcaacgaggagaccggagggatgaacgacgtgctctaccagctctacaccatcacgcacgaccagaggcatctggtgctggcccatctattcgacaagccatgcttcctgggtttgcttgcggtgcaggctgacagcctttcgaatttccatgccaacacccatattccggttgtaattggcgggcagatgagatatgaagttacaggaaattgcgacgttcttcatggacacagtgaactcctctcacgcatacgcgactggtggtacatctgtcagtgaattctggtccaatccaaagcgattagctgaagctctgaccactgagactgaggagtcctgcacaacttacaatatgctcaaggtttcgcgccatctgttcagatggacgaaggagatcgcgtacgcggactactacgagcgagcgctgatcaacggcgtgctgagcatccagaggggcagggaccccggagtgatgatctacatgctgccccagggccccgggagatccaaggcgaagagctaccatggctggggaactcagtacgaatcgttctggtgctgctatggcactgggatagaatcgttctccaagctgggagattccatttacttcgaggagagagctgatgcccctcagctcgtcggatcagtaccttcaggtctcgttctccgtatctgccaagacgacaaacggtcagtttgcgacgttgaacgtgagaataccatcgtggacatctttgaatggcgcaaaggcaacactgaatggcaagcatctggaattagcatctccagggacatttctcactatcagcaagcagtggggcagcggtgatcagttgtcactccagttacctatccacctaaggactgaagcaataaaagatgaccggccggagtacgcgtctatacaagcagtcctgttcgggccgttcctcctcgccggcctcaccaccggagactgggacgccaagaccggcgccgccgacgccgcagcctccgactggatcacccccgtccctgtggagtccaactcccagctggtgacgctggcgcaggagtccggcggcgaggccttcgtcctctccgccctgaacgggtccttgacgatgctgcagcggcccaaagacggcggcggcaccgaggccgccgtgcacgcgacgttcaggctcgtcccgcagggaggcgccggcgcgggcgccgccgcgatgctcgagccgctggacatgccggggatggtggtcacggacaggctcacggtggccgcggagaagagctcgggcgccgcgttcaacgtcgtgccggggctcgccggtgcgcccggctcggtgtcgctcgagctcgcgtccaggccggggtgcttcttggtcggcggcggcgagaaggtgcaggtgggctgtgccggtggtgcccagcagaagcgcggcgacggcgcctggttccggcggtcggccagcttcgcgcggggcgagccgctgcggcggtaccaccccatgagcttcgctgccaggggcgtgaggaggagcttcctcctggagccattgttcaccttgagggacgagttctacaccgtctacttcaaccttgtagcgtgacagacgggagatgacgacgagacctgcaggtcgaggactcgaggttgatgttgcttcggcctctggtaaccaaggggggaaaatgttgagttggaggtggagtgtcggacagttatgtttagagaaaagagaatgattttcccatattcaccgaatgatccgcggccgcctatttctgcttcaaccattcatcatcgtcgccataattctaaccacttcttgggtccctcctccagcttgctgcgtccaagcacagtttatttgccagtttctaaatctatactatatttaaagcaccagtttcaacggtcgtcatgcgtcatttttttacaaataactcatcacagttatttcaaattaatctgttgcacgtctatagatatcaaacgatgcccgacacgggctagatgcacgcgggccataactatggcacagacacgtcatgccggcctgctaactgtgtcgggtcagcccgttagcccgttgatccatttaatt

SEQ ID NO: 80461 - DNA, 3757 bp, Zea Mays
caggccagctagcctgggggcgcggcgctctccattctccagccgtcgtcacgggacgcaacgtgacaaaggaaactggccggcgttgcgacaaagcccagctcctgtcgtgtggcgacatgtgatcgaatcgagtgcgcgagagcctgggactgagagggccgggcagggttcttctgcgcgcgcggcgttaggccacttctcgtcgcagaaactatgtattgtagttgtaggtatagtttatataaattaatataatagaaatagaaaccatgtgtgtgtgtggttttcagcaccgtggctcttagcttctcgtgtcctggccgtaagcattccgtgcgatgcctccgctgtccggccgtcgtggtctcgtcacgcacgcacacgtacacacacctcgcttgatatgatgcccgtgtgctctcaggtctcaaacaacgctgtccgtctctccggcgcggaggggataaaagtctcggcgtgaactcctggccagtcttttgctgctgccatatccgcgcgcactgccggccggccagccagccagccagcgcgcgcgtgtcgcggcggagctagagggctaggtagcagagtggtggccagtgccgcgggttgcgttgggatggcggcgcttgtggcgctgacgctggcgctggcgctgacggcggcagtgacagcgacggcgaaggagtgcaccaacatcccgacggagctgtcgtcgcacacggtgcgggcgcggctgcaggcggcgccgggcggagcggcggagtggcggtggcgcgagctgttccacgagcacctcaaccccaccgacgaggccgcgtggatggacctcatgccgccgcctggcgccgcggctgcggcgcaacaccagcagcaccaccgccaggaggagctcgactgggtgatgctctaccggtcgctcaagggccagcagcagcagcagccggtggggggcggcaccgccgcagccgggagtacgccgttcctggaggaggtgtccctgcacgacgtgcgcctggaccccgacggcgacgtggcgtacgggcgcgcgcagcagacgaacctcgagtacctgctgctgctggacgtggaccgcctcgtctggagcttccgctcccaggcggggctgccggcgcccggaaccccctacggcggctgggagaagcctgacagcgagctcaggggccacttcgtcggtcactacctgagcgcgacggccaagatgtgggcgagcacgcacaacggcacgctcgccggcaggatgtcggcggtggtggacgcgctcgacgagtgccagcgcgccggcggcacgggctacctctccgccttccccgccgagttcttcgaccgcttcgaggccatcaagcccgtctgggcgccctactacaccatccacaagatcatgcagggcctcctcgaccagcacgtggtggccggcaacggcaaggcgctgcggatgttggtcgccatggccgactacttcgccggccgggtcaggaacgtcatccagaggtacagcatcgagcgccactggacgtcgctcaacgaggagaccggagggatgaacgacgtgctctaccagctctacaccatcacgcacgaccagaggcatctggtgctggcccatctattcgacaagccatgcttcctgggtttgcttgcggtgcaggctgacagcctttcgaatttccatgccaacacccatattccggttgtaattggcgggcagatgagatatgaagttacaggtgatcctctttataaggaaattgcgacgttcttcatggacacagtgaactcctctcacgcatacgcgactggtggtacatctgtcagtgaattctggtccaatccaaagcgattagctgaagctctgaccactgagactgaggagtcctgcacaacttacaatatgctcaaggtttcgcgccatctgttcagatggacgaaggagatcgcgtacgcggactactacgagcgagcgctgatcaacggcgtgctgagcatccagaggggcagggaccccggagtgatgatctacatgctgccccagggccccgggagatccaaggcgaagagctaccatggctggggaactcagtacgaatcgttctggtgctgctatggcactgggatagaatcgttctccaagctgggagattccatttacttcgaggagagaggtgagaggccggcactgtatgttgttcagttcataccgagcacgttcagctggagaactgcaggccttactgtcgcacagcagctgatgcccctcagctcgtcggatcagtaccttcaggtctcgttctccgtatctgccaagacgacaaacggtcagtttgcgacgttgaacgtgagaataccatcgtggacatctttgaatggcgcaaaggcaacactgaatggcaagcatctggaattagcatctccagggacatttctcactatcagcaagcagtggggcagcggtgatcagttgtcactccagttacctatccacctaaggactgaagcaataaaagtgtaactgaaaccaccttcagatgaccggccggagtacgcgtctatacaagcagtcctgttcgggccgttcctcctcgccggcctcaccaccggagactgggacgccaagaccggcgccgccgacgccgcagcctccgactggatcacccccgtccctgtggagtccaactcccagctggtgacgctggcgcaggagtccggcggcgaggccttcgtcctctccgccctgaacgggtccttgacgatgctgcagcggcccaaagacggcggcggcaccgaggccgccgtgcacgcgacgttcaggctcgtcccgcagggaggcgccggcgcgggcgccgccgcgatgctcgagccgctggacatgccggggatggtggtcacggacaggctcacggtggccgcggagaagagctcgggcgccgcgttcaacgtcgtgccggggctcgccggtgcgcccggctcggtgtcgctcgagctcgcgtccaggccggggtgcttcttggtcggcggcggcgagaaggtgcaggtgggctgtgccggtggtgcccagcagaagcgcggcgacggcgcctggttccggcggtcggccagcttcgcgcggggcgagccgctgcggcggtaccaccccatgagcttcgctgccaggggcgtgaggaggagcttcctcctggagccattgttcaccttgagggacgagttctacaccgtctacttcaaccttgtagcgtgacagacgggagatgacgacgagacctgcaggtcgaggactcgaggttgatgttgcttcggcctctggtaaccaaggggggaaaatgttgagttggaggtggagtgtcggacagttatgtttagagaaaagagaatgattttcccatattcaccgaatgatccgcggccgcctatttctgcttcaaccattcatcatcgtcgccataattctaaccacttcttgggtccctcctccagcttgctgcgtccaagcacagtttatttgccagtttctaaatctatactatatttaaagcaccagtttcaacggtcgtcatgcgtcatttttttacaaataactcatcacagttatttcaaattaatctgttgcacgtctatagatatcaaacgatgcccgacacgggctagatgcacgcgggccataactatggcacagacacgtcatgccggcctgctaactgtgtcgggtcagcccgttagcccgttgatccatttaatt

SEQ ID NO: 80462 - DNA, 103 bp, Zea Mays
aagagatctagaaaaggcatcggcactatttggcaagcaggatgagagtgtactgcaggtttacaaagcggacacaagaaatcctaatgatttggatccacaa

SEQ ID NO: 80463 - DNA, 2025 bp, Zea Mays
ctgacacatgggggagcgcacggatccaccaatcagacgccgtgcgcttttgcgccaaagcacatctcgcaaagcaaagcgttccgccttggattttagccgtttcgcccgtcccgtggggcggttggcctgttgctaccttgctataaggggaagccagccagggcggtgtgcaggacggggtgcacgggcgcggccctcatccagcagggtggtactggactgtacactgtactgtggagtgagtgcatcagcggtctcgagccacactgtgagccactgattatataccaggccactgattgttacgctgacacgcatgcatcccgcatccctgctccaagagagatgggtctcgccggcggcattgtccggagggtcttctccaagagcccttgctcgtccgccggcagccgtggccacagtactgacgcttgcatgagcacggccgattcgcaggagaaggggtctgctgaacacaggaggagatggggctcgctacggctgtacctctgcggcgaggagatgaacgcggccgcagaggaggaggaggacggggacggcgacacggtgtccgtcaagagcttcgagacctgctgcgtgatgccggaggaggcgcacgtcgtcgtcccggtgcatcatcgtctgatgagcgccgcacacgatggcaacgaccagagcagggtccctggtggtgccgatgaagagggagcggcgacgctcatccagtccgcgttcagagggttcatgtcgaggaggcagctgcaggaggcgagggcgaggacgaggacgaggacgcgcggccgagagccagaaccggacggcgccaaggaccaagagcccagcagccccacctgggggccgtccgtcgcgacgtcggtgctggtccagcagcggtccagcagccagaggtcgtcgtcgcgcccgccgccagcgttccgagtcaaggaggagtgggacgacagcacggtgagctccaacgtgtccaggatgaggatccagaacaggatcgaggccaccacgcggcgcgagcgagcgctcgcctacgcgttctcgcagcagcttcggagctgcggcggcggcaccagcaagaagcggtcgtcggcgcgcgcggaggggcagggggagttcaacgtggggtggagctggctggagcggtggatggcgacgcggcaggcggagcccgcggacgactgcgcgagccgcaacgcggacacgggctccgccacggggcggcgggtggtggtcgtcaggaggcggagcgacctcgccgtcgaggagaaggagagctgcgcctccaacgacgtctcggtcgtcagcttcgacgcctcctccggcctcgcctgccataggcccacgggcaacaagagccggctcaagggcggccggagcttgccgcgccggaagcaggtggcggcgtcggcgtcggcgtcggaccaccgcttccaggaaagatcacacaaggtgagcaagaagggacaccagcgagtggagcaggagccgcacaaggaccgattcgacgccgtcgccgccctggacgacgacgcttgccagcctcccacggattactgagacgacctgctctgtacatagatttggaaggatttgcagcgctagctgacgatttgtttcggcttgcactagtctgaaagactgcacggttactgtctgctgagtgactgtacgtgtcgtgtcggtcatgtaaaagttcctcgctacacgtacgtcgtatcaaacgtcactcactgtaaaacgtcacggccacatacacgatgacgagttccggttccctagacacggcaaggagaagcaatcagtgacagtatttgtgatatcatatccatccaggcatccagctccgtttgttttgcgttagcacctaaagtacgactgcactgtaccgccacaacagtttacttatggtgtgtttcgttttaagtcaatgtatgatgagacaggaggacaccgttctctcgattttttgtatcacgtcgctatcaaaagttacttcgttgttcacctcgt

SEQ ID NO: 80464 - DNA, 934 bp, Zea Mays
gccaaagcacatctcgcaaagcaaagcgttccgccttggattttagccgtttcgcccgtcccgtggggcggttggcctgttgctaccttgctataaggggaagccagccagggcggtgtgcaggacggggtgcacgggcgcggccctcatccagcagggtggtactggactgtacactgtactgtggagtgagtgcatcagcggtctcgagccacactgtgagccactgattatataccaggccactgattgttacgctgacacgcatgcatcccgcatccctgctccaagagagatgggtctcgccggcggcattgtccggagggtcttctccaagagcccttgctcgtccgccggcagccgtggccacagtgtgagcaagaagggacaccagcgagtggagcaggagccgcacaaggaccgattcgacgccgtcgccgccctggacgacgacgcttgccagcctcccacggattactgagacgacctgctctgtacatagatttggaaggatttgcagcgctagctgacgatttgtttcggcttgcactagtctgaaagactgcacggttactgtctgctgagtgactgtacgtgtcgtgtcggtcatgtaaaagttcctcgctacacgtacgtcgtatcaaacgtcactcactgtaaaacgtcacggccacatacacgatgacgagttccggttccctagacacggcaaggagaagcaatcagtgacagtatttgtgatatcatatccatccaggcatccagctccgtttgttttgcgttagcacctaaagtacgactgcactgtaccgccacaacagtttacttatggtgtgtttcgttttaagtcaatgtatgatgagacaggaggacaccgttctctcgattttttgtatcacgtcgctatcaaaagttacttcgttgttcacctcgt

SEQ ID NO: 80465 - DNA, 2244 bp, Zea Mays
gcgaattccgaactgcaagcccactctgtccgcccgacgcgcagaccacgcctgggccgtcaagcctccagatgagatgaccgccctccaacctcgcgtgggcttgggcatgccgacgaggccacctccagacctcctgaatcctgaattcatgatgcctcacgcggcgccagcactgggaggtagccgttgccatgacatcggtcgccatcaggcatcaggggaggaggccggtggccgaagcaaagcaactccgatgtggccggggaggtagcctactgccccctacccccgtagaggcgtagacccgtacccactccgcgagcgagggatggaatctgacgggtggccgcacgcgggaggcaaccgagaggcgcgcagggcacgccgattccttccttgccgccgcggtcgctcggcaatcgcgtgcgcccgctgctttaacctctcggctttgtcttcgctagccgaccaattgttgggccgccgctagcaggagccaggtcgcgccgacagcagcagttggaagaggatccatggggaaggaggcgacgcttgcgttcacgcccacctgggtggtggccatcgtatgcctcgtcatcgtctctatctccctcgccgctgagcgctcactccattacctcggcaagtatctggagtgtaagaagcagaaagcgcttttttcagctctacagagactaaaagaagagctaatgcttctcggattcatttcattcgtcctgagtctctcccaagtacagcaagaaaagaatgaaggacaagggtcatcattgagtattgttgtgctacatcgggagcaccaggatgaatttgtccacaagcggacaaagggattttggatgaagctcgctgttgcaagctggataactgcattcttgaagcaatttcaagattcagtgagtaaatcagattatgaagcacttagatcagcttttgtcgtggaacactatcccgagaaaccagatattgatttccacaaatacatgactcgcgctgttgaatatgagtttaaaagagttgttggtatcagctggtatctgtggctttttgtaatcttattcctgctgctgaatataaatggatggcacacatacttctggttggctttcttgcctctatttctgttacttattgttggtgccaaactagagcacattatcactcggttggctcaagaggcagcgatatcattatcaaataatacagaggaagttccgaaaataaagccatgcaaggaccatttctggtttcacaagcctgagctagtccttcatttgatccatttcatcctgttccagaattcgttcgagattagttttttcttctggattctggtatcagaaggtttcggttcgtgtatgatggaacggaagccttatgtcatttccagacttgttatcggggtgatcatcgaagtcatctgcagctatatcacgctgccactatacgccatcgtgacccatatgaccggacagatcaagctgcatggttttggctcccgcgtgcacgagagtgtccatggctggatcggcttgaggaagaaacccttctcgttctggaagattcccggcggtgaccctaacgctgattccggcagggaggccgacgtaacccgcagggtggccaaggagcggtcggggagctcgcgcagcatgccgatggcgccggctgacgagatcgtcaccgtcgacgacgtcgcggtggctgcagctgccgttggccaaggaccataaaattcctagctagcaaacaccagcagggaaggcaggcaggctgccgaggtaccgtgcgcagcgggttgatgggtcggacgctgcggaaaattcctcgtgtcgggagcaggctgggcggccgcgcccgcgcccgcgcgctgtagctctgatcgcgtgttgtaacgtcaacgtcatctcgtgtaacggtacgggcaggacgggacgcgtcgtccccatgcctgctcccgtgctagggccggccgccaggcgttgtggcatgtcacgtgcgacgttgcagcgcgacgctacaacgttgtatgtgggctgtggcacagccagccggcgcgtcattggccctggcccagcatggcctgctgctgctgccttgtgccggccgtaccttgctgtaaaggaaagctgggcgtacataacccattatccatggctcactgcgatctattgcaatgtagcaggcaggtgagcgttctcaagagtgtgatggaaggaaaag

SEQ ID NO: 80466 - DNA, 1487 bp, Zea Mays
acgttctcgtcgaactacacggctgaggcagtaggcagcaggcaggatacgcactaagcgacggccgccatgtacgcggcggctccgagcagcagcagggtggccgccgccgccgccgccttcttcatcgtcatctccctctcgccgcagctgctcgtccgccccttcggcgcatcgacgacggtccactgggcagcggcgcaggagctcggtaggcgtttccggcccccgtttacacgcgcgcgcgcaggggcagcgccgtgagtgaccgaccgatcgagtcggctttattatttgaatgcattgttaccggtaggaggtcgttgtgtcatgcatgcatgcgctcgttcgtccttgggacacgctccccgtgctgctgttgtctcgtctgtgcatggttttgctcgatgcgttgcgcgctggatggctggggtcggtggatgaagacgaggaggacttcagctaccggcggaacgccgggaacgggccggcgcggtggggcttgatccggagggagtgggcaacgtgcaacgtgggcctcctgcagtcgcccatcggcctctccgacaccttggcggggctagccgaccggtccggccgcctgggccgctcctaccgccccgccgccgcgtccctcgtcaaccgcggccacagcattatggtaaggttcaacagcaaccccggcggcgtggtgatcgacggcgtggcgtaccggctccggcagatgcactggcacgcgccgagcgagcacgccatcaacgggcgcagctctacaggatctcgcggcggcgtcctgacaggaccattcacaggctggagcggtacatccggaggatcgcgaggaggaagaaccacgaggagctcatcgacgaggaggtggacccgcggcggccggtgagccggagcacggcctactacaagtacacgggctccttcacgacaccgccctgcacggagggcgtgacgtgggtagtggcgcaccagggcaccaggagcaacaggaggccactccaggaagccaacggcagggccatcaccttctactacacctcgccggcgcacggccgaggggcgaacggggactagcacgcattgcaaggagacggccggcggaatcttggcgtccccgtgctccttttctgtccaggcgacacaggccatggccaagcaaactcttgcatgtgatcgatgtccgacagtgttaggtcagagtgcagaccaattttttttttctctccagcgatcatcaattcgttgcggagtaatgctgtagtgcgattgcatatttgcattggcaagtgagtttgtgccaaaaaaaaggacatcaaattagtagaacgtttgcggtttacactccttgttccgtgactgagtgagcgaattgcaatctcgaaaatcatgtgattctaaggatagcacgtctgccacatgtaagggtgaaaacgatcggtaacggtcggaaaaaatctctcaccgtttttactcgt

SEQ ID NO: 80467 - DNA, 1252 bp, Zea Mays
acgttctcgtcgaactacacggctgaggcagtaggcagcaggcaggatacgcactaagcgacggccgccatgtacgcggcggctccgagcagcagcagggtggccgccgccgccgccgccttcttcatcgtcatctccctctcgccgcagctgctcgtccgccccttcggcgcatcgacgacggtccactgggcagcggcgcaggagctcgacgaggaggacttcagctaccggcggaacgccgggaacgggccggcgcggtggggcttgatccggagggagtgggcaacgtgcaacgtgggcctcctgcagtcgcccatcggcctctccgacaccttggcggggctagccgaccggtccggccgcctgggccgctcctaccgccccgccgccgcgtccctcgtcaaccgcggccacagcattatggtaaggttcaacagcaaccccggcggcgtggtgatcgacggcgtggcgtaccggctccggcagatgcactggcacgcgccgagcgagcacgccatcaacgggcgcagctctacaggatctcgcggcggcgtcctgacaggaccattcacaggctggagcggtacatccggaggatcgcgaggaggaagaaccacgaggagctcatcgacgaggaggtggacccgcggcggccggtgagccggagcacggcctactacaagtacacgggctccttcacgacaccgccctgcacggagggcgtgacgtgggtagtggcgcaccagggcaccaggagcaacaggaggccactccaggaagccaacggcagggccatcaccttctactacacctcgccggcgcacggccgaggggcgaacggggactagcacgcattgcaaggagacggccggcggaatcttggcgtccccgtgctccttttctgtccaggcgacacaggccatggccaagcaaactcttgcatgtgatcgatgtccgacagtgttaggtcagagtgcagaccaattttttttttctctccagcgatcatcaattcgttgcggagtaatgctgtagtgcgattgcatatttgcattggcaagtgagtttgtgccaaaaaaaaggacatcaaattagtagaacgtttgcggtttacactccttgttccgtgactgagtgagcgaattgcaatctcgaaaatcatgtgattctaaggatagcacgtctgccacatgtaagggtgaaaacgatcggtaacggtcggaaaaaatctctcaccgtttttactcgt

SEQ ID NO: 80468 - DNA, 2227 bp, Zea Mays
agagcgcacggcccagttgggcccaatactcgacacgactcattgaccggcccattacggctgaagggagtcgctcgccgccgcgttcgaggcgttccctcgtcgcgctcgcgccgtcgaccttcaccgctcgctgtcaggtctgcccgccacgacctcgccggccacactcgcagctcgccctcgctcctacgcctcgccggcgaggccttctgccttttcgcgccctctatctgctgcgatctttggagcatcgttctcttctctcacttgagatccagacccctaaaccctagagctcgccgcttccgctcgctcgctccgcgctggcggcgacaatggaggacgaggagatggagaagaaggtgcagcagtacttgcagcgcaagggtttccgcctcactgagcttgcgctccaggaggagcgcaaccgcctctccacctccgccatctccgacgttgcgcttgcacggtctgacaatgatccagcgagatactacgatggatatagcagattaagaacatgggcatacagttctcttgatcaatataagatattttttgtagcacgaattacttcgcgtcctttatccagttttcatccatagcttcatggatctagtggcagaaggacatatgcaggaagctcggtcatttttccatacatttcgggaagatcatgaggtgatgcattcaagggatcttcagaagctggaaggcgtcctgtctccttcacacttggaggaaatggaattggcccggtcttttaggaaaaataaatttaaaattaaattatgtgagtattcgtatgaattgcttctccagtatctccagaaaacacaagcccttgtggtgcttggagtaatcaatgagcacataacttttgaagtatctcctggtcagccctcattaatctctgatgacgctgatgttgttgctctgattgggacaagtaaggacttggcaaaacagataaatcagaaggaagtacattgggggttgcttgaagattctgttgaagagcgaatggagaaggcactagcagaatctgataaaatagaagctgaaagcaaggatgctgatgcagaagataacaagaaaagaaatgcagaaggtggaaagcaaggtgcttctcttaagaaagccaaaaaggacaagcttgttggtgcgactggaaaaagcgtcagaactgaaacaagcatggtttctgtggcacctcgagtgaaaccggagctaactcttccagcaacgcctgttgaagttgaacaatcaattcttgaggacctacgaaaccgtgcacaactgaatagtgtggcattgccatctgttagcttctacacattccttaatacacataatggattaaactgttcctcaatatcacatgatggatcactggttgttggtgggttttctgattcgtcagtgaaggtctgggatatgtcaaagatgggccagccagcaaaaatatcaagatcacagggtgagaatgggccttcccagggtgagcgcatatcaacattagatgaggggaaacgaacctatacactatttcaaggccattctggaccagtttattctgcggcctttagcccgtttggggatttcctcttgtcatcatcttcagactcgacaattagactatggagcaccaagctgaatgctaatcttgtctgttacaaaggacacaactacccggtttgggatgtccaatccagttggccattactttgctagtgcttcgcacgacaggactgctagaatttggtcaatggataaaatccagcctttgcgaataatggctgggcatctttctgatgttgattgtgtccagtggcatgtaaactgtaactacattgccactggctctagcgacaaaactgtaaggctatgggatgttcagacgggtgaatgcatacggatgtttattggtcataggagtatggttttatcactggcaatgtcacctgatggacgatacatggcctccggagatgaagatggaacaatcatgatatgggatctctcgactggccgttgtgtttcaccactactaggacacagctcttgtgtgtggacacttgctttcagatttgaagatcatgtaatttgatctcatgaaatgatgtcttaaaactggtggtatcacagattctgatgtgtactagaatacatgagtctgagcattaggtaaaagggcaacgttgctatgtccttgcgtgcttta

SEQ ID NO: 80469 - DNA, 1788 bp, Zea Mays
agagcgcacggcccagttgggcccaatactcgacacgactcattgaccggcccattacggctgaagggagtcgctcgccgccgcgttcgaggcgttccctcgtcgcgctcgcgccgtcgaccttcaccgctcgctgtcaggtctgacaatgatccagcgagatactacgatggatatagcagattaagaacatgggcatacagttctcttgatcaatataagcacgaattacttcgcgtcctttatccagttttcatccatagcttcatggatctagtggcagaaggacatatgcaggaagctcggtcatttttccatacatttcgggaagatcatgaggtgatgcattcaagggatcttcagaagctggaaggcgtcctgtctccttcacacttggaggaaatggaattggcccggtcttttaggaaaaataaatttaaaattaaattatgtgagtattcgtatgaattgcttctccagtatctccagaaaacacaagcccttgtggtgcttggagtaatcaatgagcacataacttttgaagtatctcctggtcagccctcattaatctctgatgacgctgatgttgttgctctgattgggacaagtaaggacttggcaaaacagataaatcagaaggaagtacattgggggttgcttgaagattctgttgaagagcgaatggagaaggcactagcagaatctgataaaatagaagctgaaagcaaggatgctgatgcagaagataacaagaaaagaaatgcagaaggtggaaagcaaggtgcttctcttaagaaagccaaaaaggacaagcttgttggtgcgactggaaaaagcgtcagaactgaaacaagcatggtttctgtggcacctcgagtgaaaccggagctaactcttccagcaacgcctgttgaagttgaacaatcaattcttgaggacctacgaaaccgtgcacaactgaatagtgtggcattgccatctgttagcttctacacattccttaatacacataatggattaaactgttcctcaatatcacatgatggatcactggttgttggtgggttttctgattcgtcagtgaaggtctgggatatgtcaaagatgggccagccagcaaaaatatcaagatcacagggtgagaatgggccttcccagggtgagcgcatatcaacattagatgaggggaaacgaacctatacactatttcaaggccattctggaccagtttattctgcggcctttagcccgtttggggatttcctcttgtcatcatcttcagactcgacaattagactatggagcaccaagctgaatgctaatcttgtctgttacaaaggacacaactacccggtttgggatgtccaattcagtccagttggccattactttgctagtgcttcgcacgacaggactgctagaatttggtcaatggataaaatccagcctttgcgaataatggctgggcatctttctgatgttgattgtgtccagtggcatgtaaactgtaactacattgccactggctctagcgacaaaactgtaaggctatgggatgttcagacgggtgaatgcatacggatgtttattggtcataggagtatggttttatcactggcaatgtcacctgatggacgatacatggcctccggagatgaagatggaacaatcatgatatgggatctctcgactggccgttgtgtttcaccactactaggacacagctcttgtgtgtggacacttgctttcagggtcgcaatctgattcgattatctgtagccaaactta

SEQ ID NO: 80470 - DNA, 2571 bp, Zea Mays
agagcgcacggcccagttgggcccaatactcgacacgactcattgaccggcccattacggctgaagggagtcgctcgccgccgcgttcgaggcgttccctcgtcgcgctcgcgccgtcgaccttcaccgctcgctgtcaggtctgcccgccacgacctcgccggccacactcgcagctcgccctcgctcctacgcctcgccggcgaggccttctgccttttcgcgccctctatctgctgcgatctttggagcatcgttctcttctctcacttgagatccagacccctaaaccctagagctcgccgcttccgctcgctcgctccgcgctggcggcgacaatggaggacgaggagatggagaagaaggtgcagcagtacttgcagcgcaagggtttccgcctcactgagcttgcgctccaggaggagcgcaaccgcctctccacctccgccatctccgacgttgcgcttgcacggtctgacaatgatccagcgagatactacgatggatatagcagattaagaacatgggcatacagttctcttgatcaatataagcacgaattacttcgcgtcctttatccagttttcatccatagcttcatggatctagtggcagaaggacatatgcaggaagctcggtcatttttccatacatttcgggaagatcatgaggtgatgcattcaagggatcttcagaagctggaaggcgtcctgtctccttcacacttggaggaaatggaattggcccggtcttttaggaaaaataaatttaaaattaaattatgtgagtattcgtatgaattgcttctccagtatctccagaaaacacaagcccttgtggtgcttggagtaatcaatgagcacataacttttgaagtatctcctggtcagccctcattaatctctgatgacgctgatgttgttgctctgattgggacaagtaaggacttggcaaaacagataaatcagaaggaagtacattgggggttgcttgaagattctgttgaagagcgaatggagaaggcactagcagaatctgataaaatagaagctgaaagcaaggatgctgatgcagaagataacaagaaaagaaatgcagaaggtggaaagcaaggtgcttctcttaagaaagccaaaaaggacaagcttgttggtgcgactggaaaaagcgtcagaactgaaacaagcatggtttctgtggcacctcgagtgaaaccggagctaactcttccagcaacgcctgttgaagttgaacaatcaattcttgaggacctacgaaaccgtgcacaactgaatagtgtggcattgccatctgttagcttctacacattccttaatacacataatggattaaactgttcctcaatatcacatgatggatcactggttgttggtgggttttctgattcgtcagtgaaggtctgggatatgtcaaagatgggccagccagcaaaaatatcaagatcacagggtgagaatgggccttcccagggtgagcgcatatcaacattagatgaggggaaacgaacctatacactatttcaaggccattctggaccagtttattctgcggcctttagcccgtttggggatttcctcttgtcatcatcttcagactcgacaattagactatggagcaccaagctgaatgctaatcttgtctgttacaaaggacacaactacccggtttgggatgtccaatccagttggccattactttgctagtgcttcgcacgacaggactgctagaatttggtcaatggataaaatccagcctttgcgaataatggctgggcatctttctgatgttgattgtgtccagtggcatgtaaactgtaactacattgccactggctctagcgacaaaactgtaaggctatgggatgttcagacgggtgaatgcatacggatgtttattggtcataggagtatggttttatcactggcaatgtcacctgatggacgatacatggcctccggagatgaagatggaacaatcatgatatgggatctctcgactggccgttgtgtttcaccactactaggacacagctcttgtgtgtggacacttgctttcagctgtgaaggagcattgcttgcatcgggatcggctgactgtactgtaaagctctgggatgtcgcttctagcacaaaaaccctgaagacagaggataccaaaggcagctcagctaaccgactgagactgcttaaagctctccctacaaaatcaactcctgtttatagcctgcggttttctcggaggaaccttctatttgcctctggtgctctctcgctaagctcgtcgtaagctgtgttttttttttgcagaaaactagaactggtcctgttttgacattgagtagtgaagctggcatttcagagactgcctattgtacagctaatattttcattagcaattccaacgaactcagcatgtactgccgaattgagcaccgcagattcgttgtagcgggttgtgatattgtaacaatattattaggttgtgaccttatgaacgcaactaaatgtacaagtgctgacaggcgatagcgtgaatgcaatggtctatcag

SEQ ID NO: 80471 - DNA, 2568 bp, Zea Mays
agagcgcacggcccagttgggcccaatactcgacacgactcattgaccggcccattacggctgaagggagtcgctcgccgccgcgttcgaggcgttccctcgtcgcgctcgcgccgtcgaccttcaccgctcgctgtcaggtctgcccgccacgacctcgccggccacactcgcagctcgccctcgctcctacgcctcgccggcgaggccttctgccttttcgcgccctctatctgctgcgatctttggagcatcgttctcttctctcacttgagatccagacccctaaaccctagagctcgccgcttccgctcgctcgctccgcgctggcggcgacaatggaggacgaggagatggagaagaaggtgcagcagtacttgcagcgcaagggtttccgcctcactgagcttgcgctccaggaggagcgcaaccgcctctccacctccgccatctccgacgttgcgcttgcacggtctgacaatgatccagcgagatactacgatggatatagcagattaagaacatgggcatacagttctcttgatcaatataagcacgaattacttcgcgtcctttatccagttttcatccatagcttcatggatctagtggcagaaggacatatgcaggaagctcggtcatttttccatacatttcgggaagatcatgaggtgatgcattcaagggatcttcagaagctggaaggcgtcctgtctccttcacacttggaggaaatggaattggcccggtcttttaggaaaaataaatttaaaattaaattatgtgagtattcgtatgaattgcttctccagtatctccagaaaacacaagcccttgtggtgcttggagtaatcaatgagcacataacttttgaagtatctcctggtcagccctcattaatctctgatgacgctgatgttgttgctctgattgggacaagtaaggacttggcaaaacagataaatcagaaggaagtacattgggggttgcttgaagattctgttgaagagcgaatggagaaggcactagcagaatctgataaaatagaagctgaaagcaaggatgctgatgcagaagataacaagaaaagaaatgcagaaggtggaaagcaaggtgcttctcttaagaaagccaaaaaggacaagcttgttggtgcgactggaaaaagcgtcagaactgaaacaagcatggtttctgtggcacctcgagtgaaaccggagctaactcttccagcaacgcctgttgaagttgaacaatcaattcttgaggacctacgaaaccgtgcacaactgaatagtgtggcattgccatctgttagcttctacacattccttaatacacataatggattaaactgttcctcaatatcacatgatggatcactggttgttggtgggttttctgattcgtcagtgaaggtctgggatatgtcaaagatgggccagccagcaaaaatatcaagatcacagggtgagaatgggccttcccagggtgagcgcatatcaacattagatgaggggaaacgaacctatacactatttcaaggccattctggaccagtttattctgcggcctttagcccgtttggggatttcctcttgtcatcatcttcagactcgacaattagactatggagcaccaagctgaatgctaatcttgtctgttacaaaggacacaactacccggtttgggatgtccaattcagtccagttggccattactttgctagtgcttcgcacgacaggactgctagaatttggtcaatggataaaatccagcctttgcgaataatggctgggcatctttctgatgttgattgtgtccagtggcatgtaaactgtaactacattgccactggctctagcgacaaaactgtaaggctatgggatgttcagacgggtgaatgcatacggatgtttattggtcataggagtatggttttatcactggcaatgtcacctgatggacgatacatggcctccggagatgaagatggaacaatcatgatatgggatctctcgactggccgttgtgtttcaccactactaggacacagctcttgtgtgtggacacttgctttcaggagcattgcttgcatcgggatcggctgactgtactgtaaagctctgggatgtcgcttctagcacaaaaaccctgaagacagaggataccaaaggcagctcagctaaccgactgagactgcttaaagctctccctacaaaatcaactcctgtttatagcctgcggttttctcggaggaaccttctatttgcctctggtgctctctcgctaagctcgtcgtaagctgtgttttttttttgcagaaaactagaactggtcctgttttgacattgagtagtgaagctggcatttcagagactgcctattgtacagctaatattttcattagcaattccaacgaactcagcatgtactgccgaattgagcaccgcagattcgttgtagcgggttgtgatattgtaacaatattattaggttgtgaccttatgaacgcaactaaatgtacaagtgctgacaggcgatagcgtgaatgcaatggtctatcag

SEQ ID NO: 80472 - DNA, 2167 bp, Zea Mays
agagcgcacggcccagttgggcccaatactcgacacgactcattgaccggcccattacggctgaagggagtcgctcgccgccgcgttcgaggcgttccctcgtcgcgctcgcgccgtcgaccttcaccgctcgctgtcaggtctgacaatgatccagcgagatactacgatggatatagcagattaagaacatgggcatacagttctcttgatcaatataagcacgaattacttcgcgtcctttatccagttttcatccatagcttcatggatctagtggcagaaggacatatgcaggaagctcggtcatttttccatacatttcgggaagatcatgaggtgatgcattcaagggatcttcagaagctggaaggcgtcctgtctccttcacacttggaggaaatggaattggcccggtcttttaggaaaaataaatttaaaattaaattatgtgagtattcgtatgaattgcttctccagtatctccagaaaacacaagcccttgtggtgcttggagtaatcaatgagcacataacttttgaagtatctcctggtcagccctcattaatctctgatgacgctgatgttgttgctctgattgggacaagtaaggacttggcaaaacagataaatcagaaggaagtacattgggggttgcttgaagattctgttgaagagcgaatggagaaggcactagcagaatctgataaaatagaagctgaaagcaaggatgctgatgcagaagataacaagaaaagaaatgcagaaggtggaaagcaaggtgcttctcttaagaaagccaaaaaggacaagcttgttggtgcgactggaaaaagcgtcagaactgaaacaagcatggtttctgtggcacctcgagtgaaaccggagctaactcttccagcaacgcctgttgaagttgaacaatcaattcttgaggacctacgaaaccgtgcacaactgaatagtgtggcattgccatctgttagcttctacacattccttaatacacataatggattaaactgttcctcaatatcacatgatggatcactggttgttggtgggttttctgattcgtcagtgaaggtctgggatatgtcaaagatgggccagccagcaaaaatatcaagatcacagggtgagaatgggccttcccagggtgagcgcatatcaacattagatgaggggaaacgaacctatacactatttcaaggccattctggaccagtttattctgcggcctttagcccgtttggggatttcctcttgtcatcatcttcagactcgacaattagactatggagcaccaagctgaatgctaatcttgtctgttacaaaggacacaactacccggtttgggatgtccaattcagtccagttggccattactttgctagtgcttcgcacgacaggactgctagaatttggtcaatggataaaatccagcctttgcgaataatggctgggcatctttctgatgttgattgtgtccagtggcatgtaaactgtaactacattgccactggctctagcgacaaaactgtaaggctatgggatgttcagacgggtgaatgcatacggatgtttattggtcataggagtatggttttatcactggcaatgtcacctgatggacgatacatggcctccggagatgaagatggaacaatcatgatatgggatctctcgactggccgttgtgtttcaccactactaggacacagctcttgtgtgtggacacttgctttcagctgtgaaggagcattgcttgcatcgggatcggctgactgtactgtaaagctctgggatgtcgcttctagcacaaaaaccctgaagacagaggataccaaaggcagctcagctaaccgactgagactgcttaaagctctccctacaaaatcaactcctgtttatagcctgcggaaaactagaactggtcctgttttgacattgagtagtgaagctggcatttcagagactgcctattgtacagctaatattttcattagcaattccaacgaactcagcatgtactgccgaattgagcaccgcagattcgttgtagcgggttgtgatattgtaacaatattattaggttgtgaccttatgaacgcaactaaatgtacaagtgctgacaggcgatagcgtgaatgcaatggtctatcag

SEQ ID NO: 80473 - DNA, 2576 bp, Zea Mays
agagcgcacggcccagttgggcccaatactcgacacgactcattgaccggcccattacggctgaagggagtcgctcgccgccgcgttcgaggcgttccctcgtcgcgctcgcgccgtcgaccttcaccgctcgctgtcaggtctgcccgccacgacctcgccggccacactcgcagctcgccctcgctcctacgcctcgccggcgaggccttctgccttttcgcgccctctatctgctgcgatctttggagcatcgttctcttctctcacttgagatccagacccctaaaccctagagctcgccgcttccgctcgctcgctccgcgctggcggcgacaatggaggacgaggagatggagaagaaggtgcagcagtacttgcagcgcaagggtttccgcctcactgagcttgcgctccaggaggagcgcaaccgcctctccacctccgccatctccgacgttgcgcttgcacggtctgacaatgatccagcgagatactacgatggatatagcagattaagaacatgggcatacagttctcttgatcaatataagcacgaattacttcgcgtcctttatccagttttcatccatagcttcatggatctagtggcagaaggacatatgcaggaagctcggtcatttttccatacatttcgggaagatcatgaggtgatgcattcaagggatcttcagaagctggaaggcgtcctgtctccttcacacttggaggaaatggaattggcccggtcttttaggaaaaataaatttaaaattaaattatgtgagtattcgtatgaattgcttctccagtatctccagaaaacacaagcccttgtggtgcttggagtaatcaatgagcacataacttttgaagtatctcctggtcagccctcattaatctctgatgacgctgatgttgttgctctgattgggacaagtaaggacttggcaaaacagataaatcagaaggaagtacattgggggttgcttgaagattctgttgaagagcgaatggagaaggcactagcagaatctgataaaatagaagctgaaagcaaggatgctgatgcagaagataacaagaaaagaaatgcagaaggtggaaagcaaggtgcttctcttaagaaagccaaaaaggacaagcttgttggtgcgactggaaaaagcgtcagaactgaaacaagcatggtttctgtggcacctcgagtgaaaccggagctaactcttccagcaacgcctgttgaagttgaacaatcaattcttgaggacctacgaaaccgtgcacaactgaatagtgtggcattgccatctgttagcttctacacattccttaatacacataatggattaaactgttcctcaatatcacatgatggatcactggttgttggtgggttttctgattcgtcagtgaaggtctgggatatgtcaaagatgggccagccagcaaaaatatcaagatcacagggtgagaatgggccttcccagggtgagcgcatatcaacattagatgaggggaaacgaacctatacactatttcaaggccattctggaccagtttattctgcggcctttagcccgtttggggatttcctcttgtcatcatcttcagactcgacaattagactatggagcaccaagctgaatgctaatcttgtctgttacaaaggacacaactacccggtttgggatgtccaattcagtccagttggccattactttgctagtgcttcgcacgacaggactgctagaatttggtcaatggataaaatccagcctttgcgaataatggctgggcatctttctgatgttgattgtgtccagtggcatgtaaactgtaactacattgccactggctctagcgacaaaactgtaaggctatgggatgttcagacgggtgaatgcatacggatgtttattggtcataggagtatggttttatcactggcaatgtcacctgatggacgatacatggcctccggagatgaagatggaacaatcatgatatgggatctctcgactggccgttgtgtttcaccactactaggacacagctcttgtgtgtggacacttgctttcagctgtgaaggagcattgcttgcatcgggatcggctgactgtactgtaaagctctgggatgtcgcttctagcacaaaaaccctgaagacagaggataccaaaggcagctcagctaaccgactgagactgcttaaagctctccctacaaaatcaactcctgtttatagcctgcggttttctcggaggaaccttctatttgcctctggtgctctctcgctaagctcgtcgtaagctgtgttttttttttgcagaaaactagaactggtcctgttttgacattgagtagtgaagctggcatttcagagactgcctattgtacagctaatattttcattagcaattccaacgaactcagcatgtactgccgaattgagcaccgcagattcgttgtagcgggttgtgatattgtaacaatattattaggttgtgaccttatgaacgcaactaaatgtacaagtgctgacaggcgatagcgtgaatgcaatggtctatcag

SEQ ID NO: 80474 - DNA, 2494 bp, Zea Mays
agagcgcacggcccagttgggcccaatactcgacacgactcattgaccggcccattacggctgaagggagtcgctcgccgccgcgttcgaggcgttccctcgtcgcgctcgcgccgtcgaccttcaccgctcgctgtcaggtctgcccgccacgacctcgccggccacactcgcagctcgccctcgctcctacgcctcgccggcgaggccttctgccttttcgcgccctctatctgctgcgatctttggagcatcgttctcttctctcacttgagatccagacccctaaaccctagagctcgccgcttccgctcgctcgctccgcgctggcggcgacaatggaggacgaggagatggagaagaaggtgcagcagtacttgcagcgcaagggtttccgcctcactgagcttgcgctccaggaggagcgcaaccgcctctccacctccgccatctccgacgttgcgcttgcacggtctgacaatgatccagcgagatactacgatggatatagcagattaagaacatgggcatacagttctcttgatcaatataagcacgaattacttcgcgtcctttatccagttttcatccatagcttcatggatctagtggcagaaggacatatgcaggaagctcggtcatttttccatacatttcgggaagatcatgaggtgatgcattcaagggatcttcagaagctggaaggcgtcctgtctccttcacacttggaggaaatggaattggcccggtcttttaggaaaaataaatttaaaattaaattatgtgagtattcgtatgaattgcttctccagtatctccagaaaacacaagcccttgtggtgcttggagtaatcaatgagcacataacttttgaagtatctcctggtcagccctcattaatctctgatgacgctgatgttgttgctctgattgggacaagtaaggacttggcaaaacagataaatcagaaggaagtacattgggggttgcttgaagattctgttgaagagcgaatggagaaggcactagcagaatctgataaaatagaagctgaaagcaaggatgctgatgcagaagataacaagaaaagaaatgcagaaggtggaaagcaaggtgcttctcttaagaaagccaaaaaggacaagcttgttggtgcgactggaaaaagcgtcagaactgaaacaagcatggtttctgtggcacctcgagtgaaaccggagctaactcttccagcaacgcctgttgaagttgaacaatcaattcttgaggacctacgaaaccgtgcacaactgaatagtgtggcattgccatctgttagcttctacacattccttaatacacataatggattaaactgttcctcaatatcacatgatggatcactggttgttggtgggttttctgattcgtcagtgaaggtctgggatatgtcaaagatgggccagccagcaaaaatatcaagatcacagggtgagaatgggccttcccagggtgagcgcatatcaacattagatgaggggaaacgaacctatacactatttcaaggccattctggaccagtttattctgcggcctttagcccgtttggggatttcctcttgtcatcatcttcagactcgacaattagactatggagcaccaagctgaatgctaatcttgtctgttacaaaggacacaactacccggtttgggatgtccaatccagttggccattactttgctagtgcttcgcacgacaggactgctagaatttggtcaatggataaaatccagcctttgcgaataatggctgggcatctttctgatgttgattgtgtccagtggcatgtaaactgtaactacattgccactggctctagcgacaaaactgtaaggctatgggatgttcagacgggtgaatgcatacggatgtttattggtcataggagtatggttttatcactggcaatgtcacctgatggacgatacatggcctccggagatgaagatggaacaatcatgatatgggatctctcgactggccgttgtgtttcaccactactaggacacagctcttgtgtgtggacacttgctttcagctgtgaaggagcattgcttgcatcgggatcggctgactgtactgtaaagctctgggatgtcgcttctagcacaaaaaccctgaagacagaggataccaaaggcagctcagctaaccgactgagactgcttaaagctctccctacaaaatcaactcctgtttatagcctgcggaaaactagaactggtcctgttttgacattgagtagtgaagctggcatttcagagactgcctattgtacagctaatattttcattagcaattccaacgaactcagcatgtactgccgaattgagcaccgcagattcgttgtagcgggttgtgatattgtaacaatattattaggttgtgaccttatgaacgcaactaaatgtacaagtgctgacaggcgatagcgtgaatgcaatggtctatcag

SEQ ID NO: 80475 - DNA, 2491 bp, Zea Mays
agagcgcacggcccagttgggcccaatactcgacacgactcattgaccggcccattacggctgaagggagtcgctcgccgccgcgttcgaggcgttccctcgtcgcgctcgcgccgtcgaccttcaccgctcgctgtcaggtctgcccgccacgacctcgccggccacactcgcagctcgccctcgctcctacgcctcgccggcgaggccttctgccttttcgcgccctctatctgctgcgatctttggagcatcgttctcttctctcacttgagatccagacccctaaaccctagagctcgccgcttccgctcgctcgctccgcgctggcggcgacaatggaggacgaggagatggagaagaaggtgcagcagtacttgcagcgcaagggtttccgcctcactgagcttgcgctccaggaggagcgcaaccgcctctccacctccgccatctccgacgttgcgcttgcacggtctgacaatgatccagcgagatactacgatggatatagcagattaagaacatgggcatacagttctcttgatcaatataagcacgaattacttcgcgtcctttatccagttttcatccatagcttcatggatctagtggcagaaggacatatgcaggaagctcggtcatttttccatacatttcgggaagatcatgaggtgatgcattcaagggatcttcagaagctggaaggcgtcctgtctccttcacacttggaggaaatggaattggcccggtcttttaggaaaaataaatttaaaattaaattatgtgagtattcgtatgaattgcttctccagtatctccagaaaacacaagcccttgtggtgcttggagtaatcaatgagcacataacttttgaagtatctcctggtcagccctcattaatctctgatgacgctgatgttgttgctctgattgggacaagtaaggacttggcaaaacagataaatcagaaggaagtacattgggggttgcttgaagattctgttgaagagcgaatggagaaggcactagcagaatctgataaaatagaagctgaaagcaaggatgctgatgcagaagataacaagaaaagaaatgcagaaggtggaaagcaaggtgcttctcttaagaaagccaaaaaggacaagcttgttggtgcgactggaaaaagcgtcagaactgaaacaagcatggtttctgtggcacctcgagtgaaaccggagctaactcttccagcaacgcctgttgaagttgaacaatcaattcttgaggacctacgaaaccgtgcacaactgaatagtgtggcattgccatctgttagcttctacacattccttaatacacataatggattaaactgttcctcaatatcacatgatggatcactggttgttggtgggttttctgattcgtcagtgaaggtctgggatatgtcaaagatgggccagccagcaaaaatatcaagatcacagggtgagaatgggccttcccagggtgagcgcatatcaacattagatgaggggaaacgaacctatacactatttcaaggccattctggaccagtttattctgcggcctttagcccgtttggggatttcctcttgtcatcatcttcagactcgacaattagactatggagcaccaagctgaatgctaatcttgtctgttacaaaggacacaactacccggtttgggatgtccaattcagtccagttggccattactttgctagtgcttcgcacgacaggactgctagaatttggtcaatggataaaatccagcctttgcgaataatggctgggcatctttctgatgttgattgtgtccagtggcatgtaaactgtaactacattgccactggctctagcgacaaaactgtaaggctatgggatgttcagacgggtgaatgcatacggatgtttattggtcataggagtatggttttatcactggcaatgtcacctgatggacgatacatggcctccggagatgaagatggaacaatcatgatatgggatctctcgactggccgttgtgtttcaccactactaggacacagctcttgtgtgtggacacttgctttcaggagcattgcttgcatcgggatcggctgactgtactgtaaagctctgggatgtcgcttctagcacaaaaaccctgaagacagaggataccaaaggcagctcagctaaccgactgagactgcttaaagctctccctacaaaatcaactcctgtttatagcctgcggaaaactagaactggtcctgttttgacattgagtagtgaagctggcatttcagagactgcctattgtacagctaatattttcattagcaattccaacgaactcagcatgtactgccgaattgagcaccgcagattcgttgtagcgggttgtgatattgtaacaatattattaggttgtgaccttatgaacgcaactaaatgtacaagtgctgacaggcgatagcgtgaatgcaatggtctatcag

SEQ ID NO: 80476 - DNA, 2499 bp, Zea Mays
agagcgcacggcccagttgggcccaatactcgacacgactcattgaccggcccattacggctgaagggagtcgctcgccgccgcgttcgaggcgttccctcgtcgcgctcgcgccgtcgaccttcaccgctcgctgtcaggtctgcccgccacgacctcgccggccacactcgcagctcgccctcgctcctacgcctcgccggcgaggccttctgccttttcgcgccctctatctgctgcgatctttggagcatcgttctcttctctcacttgagatccagacccctaaaccctagagctcgccgcttccgctcgctcgctccgcgctggcggcgacaatggaggacgaggagatggagaagaaggtgcagcagtacttgcagcgcaagggtttccgcctcactgagcttgcgctccaggaggagcgcaaccgcctctccacctccgccatctccgacgttgcgcttgcacggtctgacaatgatccagcgagatactacgatggatatagcagattaagaacatgggcatacagttctcttgatcaatataagcacgaattacttcgcgtcctttatccagttttcatccatagcttcatggatctagtggcagaaggacatatgcaggaagctcggtcatttttccatacatttcgggaagatcatgaggtgatgcattcaagggatcttcagaagctggaaggcgtcctgtctccttcacacttggaggaaatggaattggcccggtcttttaggaaaaataaatttaaaattaaattatgtgagtattcgtatgaattgcttctccagtatctccagaaaacacaagcccttgtggtgcttggagtaatcaatgagcacataacttttgaagtatctcctggtcagccctcattaatctctgatgacgctgatgttgttgctctgattgggacaagtaaggacttggcaaaacagataaatcagaaggaagtacattgggggttgcttgaagattctgttgaagagcgaatggagaaggcactagcagaatctgataaaatagaagctgaaagcaaggatgctgatgcagaagataacaagaaaagaaatgcagaaggtggaaagcaaggtgcttctcttaagaaagccaaaaaggacaagcttgttggtgcgactggaaaaagcgtcagaactgaaacaagcatggtttctgtggcacctcgagtgaaaccggagctaactcttccagcaacgcctgttgaagttgaacaatcaattcttgaggacctacgaaaccgtgcacaactgaatagtgtggcattgccatctgttagcttctacacattccttaatacacataatggattaaactgttcctcaatatcacatgatggatcactggttgttggtgggttttctgattcgtcagtgaaggtctgggatatgtcaaagatgggccagccagcaaaaatatcaagatcacagggtgagaatgggccttcccagggtgagcgcatatcaacattagatgaggggaaacgaacctatacactatttcaaggccattctggaccagtttattctgcggcctttagcccgtttggggatttcctcttgtcatcatcttcagactcgacaattagactatggagcaccaagctgaatgctaatcttgtctgttacaaaggacacaactacccggtttgggatgtccaattcagtccagttggccattactttgctagtgcttcgcacgacaggactgctagaatttggtcaatggataaaatccagcctttgcgaataatggctgggcatctttctgatgttgattgtgtccagtggcatgtaaactgtaactacattgccactggctctagcgacaaaactgtaaggctatgggatgttcagacgggtgaatgcatacggatgtttattggtcataggagtatggttttatcactggcaatgtcacctgatggacgatacatggcctccggagatgaagatggaacaatcatgatatgggatctctcgactggccgttgtgtttcaccactactaggacacagctcttgtgtgtggacacttgctttcagctgtgaaggagcattgcttgcatcgggatcggctgactgtactgtaaagctctgggatgtcgcttctagcacaaaaaccctgaagacagaggataccaaaggcagctcagctaaccgactgagactgcttaaagctctccctacaaaatcaactcctgtttatagcctgcggaaaactagaactggtcctgttttgacattgagtagtgaagctggcatttcagagactgcctattgtacagctaatattttcattagcaattccaacgaactcagcatgtactgccgaattgagcaccgcagattcgttgtagcgggttgtgatattgtaacaatattattaggttgtgaccttatgaacgcaactaaatgtacaagtgctgacaggcgatagcgtgaatgcaatggtctatcag

SEQ ID NO: 80477 - DNA, 2239 bp, Zea Mays
agagcgcacggcccagttgggcccaatactcgacacgactcattgaccggcccattacggctgaagggagtcgctcgccgccgcgttcgaggcgttccctcgtcgcgctcgcgccgtcgaccttcaccgctcgctgtcaggtctgacaatgatccagcgagatactacgatggatatagcagattaagaacatgggcatacagttctcttgatcaatataagcacgaattacttcgcgtcctttatccagttttcatccatagcttcatggatctagtggcagaaggacatatgcaggaagctcggtcatttttccatacatttcgggaagatcatgaggtgatgcattcaagggatcttcagaagctggaaggcgtcctgtctccttcacacttggaggaaatggaattggcccggtcttttaggaaaaataaatttaaaattaaattatgtgagtattcgtatgaattgcttctccagtatctccagaaaacacaagcccttgtggtgcttggagtaatcaatgagcacataacttttgaagtatctcctggtcagccctcattaatctctgatgacgctgatgttgttgctctgattgggacaagtaaggacttggcaaaacagataaatcagaaggaagtacattgggggttgcttgaagattctgttgaagagcgaatggagaaggcactagcagaatctgataaaatagaagctgaaagcaaggatgctgatgcagaagataacaagaaaagaaatgcagaaggtggaaagcaaggtgcttctcttaagaaagccaaaaaggacaagcttgttggtgcgactggaaaaagcgtcagaactgaaacaagcatggtttctgtggcacctcgagtgaaaccggagctaactcttccagcaacgcctgttgaagttgaacaatcaattcttgaggacctacgaaaccgtgcacaactgaatagtgtggcattgccatctgttagcttctacacattccttaatacacataatggattaaactgttcctcaatatcacatgatggatcactggttgttggtgggttttctgattcgtcagtgaaggtctgggatatgtcaaagatgggccagccagcaaaaatatcaagatcacagggtgagaatgggccttcccagggtgagcgcatatcaacattagatgaggggaaacgaacctatacactatttcaaggccattctggaccagtttattctgcggcctttagcccgtttggggatttcctcttgtcatcatcttcagactcgacaattagactatggagcaccaagctgaatgctaatcttgtctgttacaaaggacacaactacccggtttgggatgtccaatccagttggccattactttgctagtgcttcgcacgacaggactgctagaatttggtcaatggataaaatccagcctttgcgaataatggctgggcatctttctgatgttgattgtgtccagtggcatgtaaactgtaactacattgccactggctctagcgacaaaactgtaaggctatgggatgttcagacgggtgaatgcatacggatgtttattggtcataggagtatggttttatcactggcaatgtcacctgatggacgatacatggcctccggagatgaagatggaacaatcatgatatgggatctctcgactggccgttgtgtttcaccactactaggacacagctcttgtgtgtggacacttgctttcagctgtgaaggagcattgcttgcatcgggatcggctgactgtactgtaaagctctgggatgtcgcttctagcacaaaaaccctgaagacagaggataccaaaggcagctcagctaaccgactgagactgcttaaagctctccctacaaaatcaactcctgtttatagcctgcggttttctcggaggaaccttctatttgcctctggtgctctctcgctaagctcgtcgtaagctgtgttttttttttgcagaaaactagaactggtcctgttttgacattgagtagtgaagctggcatttcagagactgcctattgtacagctaatattttcattagcaattccaacgaactcagcatgtactgccgaattgagcaccgcagattcgttgtagcgggttgtgatattgtaacaatattattaggttgtgaccttatgaacgcaactaaatgtacaagtgctgacaggcgatagcgtgaatgcaatggtctatcag

SEQ ID NO: 80478 - DNA, 2236 bp, Zea Mays
agagcgcacggcccagttgggcccaatactcgacacgactcattgaccggcccattacggctgaagggagtcgctcgccgccgcgttcgaggcgttccctcgtcgcgctcgcgccgtcgaccttcaccgctcgctgtcaggtctgacaatgatccagcgagatactacgatggatatagcagattaagaacatgggcatacagttctcttgatcaatataagcacgaattacttcgcgtcctttatccagttttcatccatagcttcatggatctagtggcagaaggacatatgcaggaagctcggtcatttttccatacatttcgggaagatcatgaggtgatgcattcaagggatcttcagaagctggaaggcgtcctgtctccttcacacttggaggaaatggaattggcccggtcttttaggaaaaataaatttaaaattaaattatgtgagtattcgtatgaattgcttctccagtatctccagaaaacacaagcccttgtggtgcttggagtaatcaatgagcacataacttttgaagtatctcctggtcagccctcattaatctctgatgacgctgatgttgttgctctgattgggacaagtaaggacttggcaaaacagataaatcagaaggaagtacattgggggttgcttgaagattctgttgaagagcgaatggagaaggcactagcagaatctgataaaatagaagctgaaagcaaggatgctgatgcagaagataacaagaaaagaaatgcagaaggtggaaagcaaggtgcttctcttaagaaagccaaaaaggacaagcttgttggtgcgactggaaaaagcgtcagaactgaaacaagcatggtttctgtggcacctcgagtgaaaccggagctaactcttccagcaacgcctgttgaagttgaacaatcaattcttgaggacctacgaaaccgtgcacaactgaatagtgtggcattgccatctgttagcttctacacattccttaatacacataatggattaaactgttcctcaatatcacatgatggatcactggttgttggtgggttttctgattcgtcagtgaaggtctgggatatgtcaaagatgggccagccagcaaaaatatcaagatcacagggtgagaatgggccttcccagggtgagcgcatatcaacattagatgaggggaaacgaacctatacactatttcaaggccattctggaccagtttattctgcggcctttagcccgtttggggatttcctcttgtcatcatcttcagactcgacaattagactatggagcaccaagctgaatgctaatcttgtctgttacaaaggacacaactacccggtttgggatgtccaattcagtccagttggccattactttgctagtgcttcgcacgacaggactgctagaatttggtcaatggataaaatccagcctttgcgaataatggctgggcatctttctgatgttgattgtgtccagtggcatgtaaactgtaactacattgccactggctctagcgacaaaactgtaaggctatgggatgttcagacgggtgaatgcatacggatgtttattggtcataggagtatggttttatcactggcaatgtcacctgatggacgatacatggcctccggagatgaagatggaacaatcatgatatgggatctctcgactggccgttgtgtttcaccactactaggacacagctcttgtgtgtggacacttgctttcaggagcattgcttgcatcgggatcggctgactgtactgtaaagctctgggatgtcgcttctagcacaaaaaccctgaagacagaggataccaaaggcagctcagctaaccgactgagactgcttaaagctctccctacaaaatcaactcctgtttatagcctgcggttttctcggaggaaccttctatttgcctctggtgctctctcgctaagctcgtcgtaagctgtgttttttttttgcagaaaactagaactggtcctgttttgacattgagtagtgaagctggcatttcagagactgcctattgtacagctaatattttcattagcaattccaacgaactcagcatgtactgccgaattgagcaccgcagattcgttgtagcgggttgtgatattgtaacaatattattaggttgtgaccttatgaacgcaactaaatgtacaagtgctgacaggcgatagcgtgaatgcaatggtctatcag

SEQ ID NO: 80479 - DNA, 2244 bp, Zea Mays
agagcgcacggcccagttgggcccaatactcgacacgactcattgaccggcccattacggctgaagggagtcgctcgccgccgcgttcgaggcgttccctcgtcgcgctcgcgccgtcgaccttcaccgctcgctgtcaggtctgacaatgatccagcgagatactacgatggatatagcagattaagaacatgggcatacagttctcttgatcaatataagcacgaattacttcgcgtcctttatccagttttcatccatagcttcatggatctagtggcagaaggacatatgcaggaagctcggtcatttttccatacatttcgggaagatcatgaggtgatgcattcaagggatcttcagaagctggaaggcgtcctgtctccttcacacttggaggaaatggaattggcccggtcttttaggaaaaataaatttaaaattaaattatgtgagtattcgtatgaattgcttctccagtatctccagaaaacacaagcccttgtggtgcttggagtaatcaatgagcacataacttttgaagtatctcctggtcagccctcattaatctctgatgacgctgatgttgttgctctgattgggacaagtaaggacttggcaaaacagataaatcagaaggaagtacattgggggttgcttgaagattctgttgaagagcgaatggagaaggcactagcagaatctgataaaatagaagctgaaagcaaggatgctgatgcagaagataacaagaaaagaaatgcagaaggtggaaagcaaggtgcttctcttaagaaagccaaaaaggacaagcttgttggtgcgactggaaaaagcgtcagaactgaaacaagcatggtttctgtggcacctcgagtgaaaccggagctaactcttccagcaacgcctgttgaagttgaacaatcaattcttgaggacctacgaaaccgtgcacaactgaatagtgtggcattgccatctgttagcttctacacattccttaatacacataatggattaaactgttcctcaatatcacatgatggatcactggttgttggtgggttttctgattcgtcagtgaaggtctgggatatgtcaaagatgggccagccagcaaaaatatcaagatcacagggtgagaatgggccttcccagggtgagcgcatatcaacattagatgaggggaaacgaacctatacactatttcaaggccattctggaccagtttattctgcggcctttagcccgtttggggatttcctcttgtcatcatcttcagactcgacaattagactatggagcaccaagctgaatgctaatcttgtctgttacaaaggacacaactacccggtttgggatgtccaattcagtccagttggccattactttgctagtgcttcgcacgacaggactgctagaatttggtcaatggataaaatccagcctttgcgaataatggctgggcatctttctgatgttgattgtgtccagtggcatgtaaactgtaactacattgccactggctctagcgacaaaactgtaaggctatgggatgttcagacgggtgaatgcatacggatgtttattggtcataggagtatggttttatcactggcaatgtcacctgatggacgatacatggcctccggagatgaagatggaacaatcatgatatgggatctctcgactggccgttgtgtttcaccactactaggacacagctcttgtgtgtggacacttgctttcagctgtgaaggagcattgcttgcatcgggatcggctgactgtactgtaaagctctgggatgtcgcttctagcacaaaaaccctgaagacagaggataccaaaggcagctcagctaaccgactgagactgcttaaagctctccctacaaaatcaactcctgtttatagcctgcggttttctcggaggaaccttctatttgcctctggtgctctctcgctaagctcgtcgtaagctgtgttttttttttgcagaaaactagaactggtcctgttttgacattgagtagtgaagctggcatttcagagactgcctattgtacagctaatattttcattagcaattccaacgaactcagcatgtactgccgaattgagcaccgcagattcgttgtagcgggttgtgatattgtaacaatattattaggttgtgaccttatgaacgcaactaaatgtacaagtgctgacaggcgatagcgtgaatgcaatggtctatcag

SEQ ID NO: 80480 - DNA, 2088 bp, Zea Mays
agagcgcacggcccagttgggcccaatactcgacacgactcattgaccggcccattacggctgaagggagtcgctcgccgccgcgttcgaggcgttccctcgtcgcgctcgcgccgtcgaccttcaccgctcgctgtcaggtctgacaatgatccagcgagatactacgatggatatagcagattaagaacatgggcatacagttctcttgatcaatataagcacgaattacttcgcgtcctttatccagttttcatccatagcttcatggatctagtggcagaaggacatatgcaggaagctcggtcatttttccatacatttcgggaagatcatgaggtgatgcattcaagggatcttcagaagctggaaggcgtcctgtctccttcacacttggaggaaatggaattggcccggtcttttaggaaaaataaatttaaaattaaattatgtgagtattcgtatgaattgcttctccagtatctccagaaaacacaagcccttgtggtgcttggagtaatcaatgagcacataacttttgaaggacttggcaaaacagataaatcagaaggaagtacattgggggttgcttgaagattctgttgaagagcgaatggagaaggcactagcagaatctgataaaatagaagctgaaagcaaggatgctgatgcagaagataacaagaaaagaaatgcagaaggtggaaagcaaggtgcttctcttaagaaagccaaaaaggacaagcttgttggtgcgactggaaaaagcgtcagaactgaaacaagcatggtttctgtggcacctcgagtgaaaccggagctaactcttccagcaacgcctgttgaagttgaacaatcaattcttgaggacctacgaaaccgtgcacaactgaatagtgtggcattgccatctgttagcttctacacattccttaatacacataatggattaaactgttcctcaatatcacatgatggatcactggttgttggtgggttttctgattcgtcagtgaaggtctgggatatgtcaaagatgggccagccagcaaaaatatggtgagaatgggccttcccagggtgagcgcatatcaacattagatgaggggaaacgaacctatacactatttcaaggccattctggaccagtttattctgcggcctttagcccgtttggggatttcctcttgtcatcatcttcagactcgacaattagactatggagcaccaagctgaatgctaatcttgtctgttacaaaggacacaactacccggtttgggatgtccaattcagtccagttggccattactttgctagtgcttcgcacgacaggactgctagaatttggtcaatggataaaatccagcctttgcgaataatggctgggcatctttctgatgttgattgtgtccagtggcatgtaaactgtaactacattgccactggctctagcgacaaaactgtaaggctatgggatgttcagacgggtgaatgcatacggatgtttattggtcataggagtatggttttatcactggcaatgtcacctgatggacgatacatggcctccggagatgaagatggaacaatcatgatatgggatctctcgactggccgttgtgtttcaccactactaggacacagctcttgtgtgtggacacttgctttcagctgtgaaggagcattgcttgcatcgggatcggctgactgtactgtaaagctctgggatgtcgcttctagcacaaaaaccctgaagacagaggataccaaaggcagctcagctaaccgactgagactgcttaaagctctccctacaaaatcaactcctgtttatagcctgcggaaaactagaactggtcctgttttgacattgagtagtgaagctggcatttcagagactgcctattgtacagctaatattttcattagcaattccaacgaactcagcatgtactgccgaattgagcaccgcagattcgttgtagcgggttgtgatattgtaacaatattattaggttgtgaccttatgaacgcaactaaatgtacaagtgctgacaggcgatagcgtgaatgcaatggtctatcag

SEQ ID NO: 80481 - DNA, 1769 bp, Zea Mays
atcttggggagggaagggataggtctgacaatgatccagcgagatactacgatggatatagcagattaagaacatgggcatacagttctcttgatcaatataagcacgaattacttcgcgtcctttatccagttttcatccatagcttcatggatctagtggcagaaggacatatgcaggaagctcggtcatttttccatacatttcgggaagatcatgaggtgatgcattcaagggatcttcagaagctggaaggcgtcctgtctccttcacacttggaggaaatggaattggcccggtcttttaggaaaaataaatttaaaattaaattatgtgagtattcgtatgaattgcttctccagtatctccagaaaacacaagcccttgtggtgcttggagtaatcaatgagcacataacttttgaagtatctcctggtcagccctcattaatctctgatgacgctgatgttgttgctctgattgggacaagtaaggacttggcaaaacagataaatcagaaggaagtacattgggggttgcttgaagattctgttgaagagcgaatggagaaggcactagcagaatctgataaaatagaagctgaaagcaaggatgctgatgcagaagataacaagaaaagaaatgcagaaggtggaaagcaaggtgcttctcttaagaaagccaaaaaggacaagcttgttggtgcgactggaaaaagcgtcagaactgaaacaagcatggtttctgtggcacctcgagtgaaaccggagctaactcttccagcaacgcctgttgaagttgaacaatcaattcttgaggacctacgaaaccgtgcacaactgaatagtgtggcattgccatctgttagcttctacacattccttaatacacataatggattaaactgttcctcaatatcacatgatggatcactggttgttggtgggttttctgattcgtcagtgaaggtctgggatatgtcaaagatgggccagccagcaaaaatatcaagatcacagggtgagaatgggccttcccagggtgagcgcatatcaacattagatgaggggaaacgaacctatacactatttcaaggccattctggaccagtttattctgcggcctttagcccgtttggggatttcctcttgtcatcatcttcagactcgacaattagactatggagcaccaagctgaatgctaatcttgtctgttacaaaggacacaactacccggtttgggatgtccaattcagtccagttggccattactttgctagtgcttcgcacgacaggactgctagaatttggtcaatggataaaatccagcctttgcgaataatggctgggcatctttctgatgttgattgtgtccagtggcatgtaaactgtaactacattgccactggctctagcgacaaaactgtaaggctatgggatgttcagacgggtgaatgcatacggatgtttattggtcataggagtatggttttatcactggcaatgtcacctgatggacgatacatggcctccggagatgaagatggaacaatcatgatatgggatctctcgactggccgttgtgtttcaccactactaggacacagctcttgtgtgtggacacttgctttcagatttgaagatcatgtaatttgatctcatgaaatgatgtcttaaaactggtggtatcacagattctgatgtgtactagaatacatgagtctgagcattaggtaaaagggcaacgttgctatgtccttgcgtgcttta

SEQ ID NO: 80482 - DNA, 856 bp, Zea Mays
gccgaagttcacatgagaagaggcagtaaaagaagacttgaaataatgaaatatctctaaagatttagccttgggagcgaattggaaacaactatcaagatcacagggtgagaatgggccttcccagggtgagcgcatatcaacattagatgaggggaaacgaacctatacactatttcaaggccattctggaccagtttattctgcggcctttagcccgtttggggatttcctcttgtcatcatcttcagactcgacaattagactatggagcaccaagctgaatgctaatcttgtctgttacaaaggacacaactacccggtttgggatgtccaattcagtccagttggccattactttgctagtgcttcgcacgacaggactgctagaatttggtcaatggataaaatccagcctttgcgaataatggctgggcatctttctgatgttgattgtgtccagtggcatgtaaactgtaactacattgccactggctctagcgacaaaactgtaaggctatgggatgttcagacgggtgaatgcatacggatgtttattggtcataggagtatggttttatcactggcaatgtcacctgatggacgatacatggcctccggagatgaagatggaacaatcatgatatgggatctctcgactggccgttgtgtttcaccactactaggacacagctcttgtgtgtggacacttgctttcagatttgaagatcatgtaatttgatctcatgaaatgatgtcttaaaactggtggtatcacagattctgatgtgtactagaatacatgagtctgagcattaggtaaaagggcaacgttgctatgtccttgcgtgcttta

SEQ ID NO: 80483 - DNA, 615 bp, Zea Mays
atggacttccaatttccaaacgtcgacgcagccacaggagtgttgtgttacacggggcatggagaagctgggttttggctgggaaacccgcgggtttcgagagtcccaaacgagttcgtaatctgtgaaggagcattgcttgcatcgggatcggctgactgtactgtaaagctctgggatgtcgcttctagcacaaaaaccctgaagacagaggataccaaaggcagctcagctaaccgactgagactgcttaaagctctccctacaaaatcaactcctgtttatagcctgcggttttctcggaggaaccttctatttgcctctggtgctctctcgctaagctcgtcgtaagctgtgttttttttttgcagaaaactagaactggtcctgttttgacattgagtagtgaagctggcatttcagagactgcctattgtacagctaatattttcattagcaattccaacgaactcagcatgtactgccgaattgagcaccgcagattcgttgtagcgggttgtgatattgtaacaatattattaggttgtgaccttatgaacgcaactaaatgtacaagtgctgacaggcgatagcgtgaatgcaatggtctatcag

SEQ ID NO: 80484 - DNA, 572 bp, Zea Mays
atggacttccaatttccaaacgtcgacgcagccacaggagtgttgtgttacacggggcatggagaagctgggttttggctgggaaacccgcgggtttcgagagtcccaaacgagttcgtaatctgtgaaggagcattgcttgcatcgggatcggctgactgtactgtaaagctctgggatgtcgcttctagcacaaaaaccctgaagacagaggataccaaaggcagctcagctaaccgactgagactgcttaaagctctccctacaaaatcaactcctgtttatagcctgcggttttctcggaggaaccttctatttgcctctggtgctctctcgctaagctcgtcgtaagctgtgttttttttttgcagaaaactagaactggtcctgttttgacattgagtagtgaagctggcatttcagagactgcctattgtacagctaatattttcattagcaattccaacgaactcagcatgtactgccgaattgagcaccgcagattcgttgtagcgggttgtgatattgtaacaatattattaggcgatagcgtgaatgcaatggtctatcag

SEQ ID NO: 80485 - DNA, 1264 bp, Zea Mays
tgtagaaattagaaacgaagtaacttatattctctaggtctcgcgcatcgcctagtgccctagtccatcgagtagcaacgaagcttgacagcaacggagaagaccatgaacagcagtagcagtgaagtgcaggtgtgcgtcaccggtggcgccgggttcatcggctcctacctcgtcaagaagctcctcgagaagggctacaccgtccacgccacgctgcggaacaccggagaagaccgggctgctgcggcggctggtccccggcgcggcggagcgtctgcggttgttccgttgttcgaggccgacctcttcgacgccgccaccttcgcgccggcgatcgctgggtgccagttcgtcttcctcgtcgccacgccatacgggctcgaagccgccggatccaagtacaagagcacggcggaagctgcagtggccgcggtgcgcgtgatcctccggcagtgcgaggagtccaagacggtgaagcgcgtcatccacaccgcctccatatcgaccgcttcgccgctcaaggacaaggaggcggagggttccggcgatgggtacaaagatttcatcagcgaatcgtgttggacgccgctcaacgttgactaccaccttcgcagcgcacacttcgacaagtacatactggcaaagctgcggtcggagcaggagctcctgagctacaacggcggcgagagcccggcgttcgaggtggtgacgctgcccctgggcctcgtcgcgggagacacggtcctcggccacgcgccggagacgctggagcacgccgtgtcgccggtgtcacgggaagagctctccttcaagttcctccggctgctgcagagcttgctcggctccgagccgctggtgcacgtcgacgacgcctgcgaggcgctcctcttctgcatggagcgcccgtccatcgccggccgcttcttctgcgccgccgcgtacccgagcatccacgacatcacggaccactacgccagcaagttccctcacctcgacgtcctcagagcgacggaggcggtggctgtggcggtgcaacctgaggtggacaggttgggagagctggggttcaggtacaagtacgggatggaggagatacttgatagcagcgttgcctgcgcagcgagactgggctcccttgacgcagccaagctcaacgttccagatactgtcagtagcaaataaacttgaattgtgtactgaacctgactctactttcatggatgttattagctcaatctacatatataaggatatggtgggg

SEQ ID NO: 80486 - DNA, 1078 bp, Zea Mays
aaaacaacaacagagccttctaggtttctagtcccaagcaagttatggctgcggaattggagattgaagcatatccattactggatgaactgacatccaaaatcagtactctcaatttggaacgtgcccggcgattaaaaagtagactagttgcattgaccagaagagttcaaaaagtcagagatgaaatagaacaactaatggatgatgatggtgatatggctgagatgtatctcaccgaaaaaaagatgaggatggaatcatctgtctttggtgaccagtctttgttgggctacaattcagcaggcgctgttggggcttcagtttcagctcctgtatctccagtctcatcgcctacagaatcacgaaaactggagaaatctttcagtttgtgtagaagtaggcatgacagtacgaagggctcagataacacaatgacagagcatatccaggagctggagatgttactggaagcttattttgttgttatcgacagcactctgaacaagctgacatcgcttaaagagtacatcgatgacactgaagacttcatcaacattcagctggacaatgtgcggaaccagctgatccagtttgaattgctgctaacgaccgcaacatttgttgtggccattttcggagtggttgctgggatattcgggatgaactttgagacatcagttttcgaaatagagaatgcattccagtgggtccttgtaattacttcagtgaccggcgttttcatcttctgctcctttctttggttcttcaagtacaagagattgatgcctttgtagagaatgtatatgccctcctcccataggaccgatgaatcaatttcaaccctgttaagaggcacttgatcagaagcctgaacctctgccgatgtaaattaccattcttttagaggtttacggcatgagtaccgagaatccgggtgaaaattgtaaccttcttgacatgatccctgtgctgtataagagaaaatcatattacagtttatacaaataataccgaccaattctacatccaggtggctcgataggatataagatgatttcgtcaaaacatgttcctg

SEQ ID NO: 80487 - DNA, 3800 bp, Zea Mays
acggatacctagctagtgatattgatgaaccctgtggcctgacccagtgccagctcgttgacatgaaggcttaccgtccgatacgagcactccaaggcgatccaacggccgcgatctggaggaacggtctcctaacctccgatatttcctttctcccttatcgccttcgcctccgcggctccgcctcgctctccaaggttctgccgaggtttctcgcctccccgctcccccctctccgagtctccgtccttgccactcctctctcccctcttccacctcaatccaatccgaccctcaccattgtagccggaactcgcagcgggacactaggcgcgcatgccgctcctcctctaccccttctccgcgtgcgtgccgccgccgcgggcgctgctccgccgcctgtcgccgccgccgcccatggcggtcgtcgctccgctgccttccgccgtccgtataatcccctcggtgggaacgctcgaccttccggcgctcccgcccccgcccacggacgacttccactggctcgacctattcgcgttcctcaactcccctgccgacacctaccaccagatccccgcgcagggcgaagaggagctggaggcggggctggaactggaactggagctggagctggagaagcacgccgaggtggagaggcagcgggggcgggcgcgaagagcgcaactccggcggctgcggcagcggcaggtcaaggcggagacggaggcctgggcgcgggccgccgaggagtaccgcgagatcgagcgggagatgctcgaccgcaggctcgcgcccgcgctgccctacgtaaaggcgctcttcgtcggctggttcgagccgctgcgggacgccatcgccagggaccaggacgtgcagcgaaggaagcgggtcaagcacgtctacgctaagtacctgcttctgctcccagccgacaaggtggccgtaatcgtcatgcacaagatgatgggcctgctcatgtccagcaaggacggcactggcagtgtccgcgttgtccaggccgcgcactgcattggtgaggctgttgagcgcgagttcaaagtccagtcattctttcagaaaagtaggaagaagaaaatccaaggtgaaaatgatccagcattggagaaggagcaagctaaatgccgtaagcgtgttaagagtttagttaagaggcggaagatgagtgaagcacagaggctagttcaacaggagttggaattggaggaatggggcacagaagcccaagtgaagttgggaagtcgcctgattgaattattactagattcagcatttgtgcagccaccagctgatcaaacaccagatagttctccagatattcgacctgcatttaagcatgtgctacgtcagcctataatagaaaatgggaggctaaagaagaagcattgggtgatagagtgtgaccatcttgtgcatgaggggtttgaaagcactgctcggcatgttgatataccctacctccctatgctggtacctccgaagaaatggaaaggttatgataaaggtggtcacctttttctgccctcatacattatgaggacacatggtgtgaaggaccaaaaggatgcaattaatagtgttcctagaaaacagctgcgaaaagtatttgaggcattagatatccttgggagtactaaatggagggtgaatagaagagttcatgatgttgttgagactatctggagtcaaggtggaggcattgcagggctggtggacaaggcaaatattcctttgcctgaacgaccagaatcagaggatcctgatgaaatgcagaaatggaagtggagtttaaagaaggcaaagaaaactaaccgtgaactgcatgctgagagatgtgacactgagctcaaactctcggttgctcgtaaaatgagagaggaggatggattttattaccctcacaatttagatttccgtgggcgtgcataccctatgcatcctcatttgagtcacctaggttcagatctttgtcggggtgttctagagtatgctgaagggcggccactaggaaagtcagggttgtgctggttgaagatacacttggctaacaaatatggtggtggcattgaaaagctttctcacgagggcaagctagcttttgtggagaaccaactgtttgatatatttgattcagcagcaaatcctgttgatgggaactgctggtggacgaatgctgaggatccctttcagtgtttagctgcatgcatggacctttctgatgccttaagaagtccatcaccttaccatgctgtctctcacctgcctattcatcaggatggttcatgcaatggtttacaacattatgccgctcttggaagggactatatgggcgcggttgctgtcaaccttgttcccggagagaaacctgcagatatctactcagaaatagcttctagggtactgaatgttgtatgtgaagactcgatgaaggatcctgctactaacccaactgcttcattagcaagagttttagttgatcagattacaaagagactgcaagagaaagggcttatcacagatgataaattgctgtatgatgtatcctgttacgctactcgggtaactttggatgcactgggacaaatgttccaatctgcccgtggtataatggcctggcttggtgactgtgcgaagatgattgcttcaaaaaatcaaccagtcaagtggacaagtcctgttggtctcccagttgttcagccctacaagaaatataagaattatatgatacgaacttctttgcaatgtctggctttacggcgggagggtgatgcaattgcaatccaaaggcaaaaggcagcttttccaccaaattttgtgcactcactggatagttcacatatgatgatgacagcgattgcttgcaaggagtctggccttcattttgcaggagttcatgactcattttgggtgcatgcgtgtgatgttgatcaaatgaaccagatattgagacaacaatttgtggagctttacagcatgccgattcttgaaaatctgctggaggagttccaaacgtcattccccacactagaatttccaccctgcccaccgcaaggtaactttgacgtgagggaagttctgacttcaacatacttcttcaactaagcttaacaggggaagttctgcacatgaaacatggtgagaagttgtgtccttggatgtttggagtaaccagatcgtgaaatcattctatgcttgagccatatataggagttgatactgaactaattctcgcatggcttttagcataagcaagaaacaggagtcaatcaattatctgcactccagaccaagccaagtggttccaaggaatttgaaatgaacaaacctaaagtagttcctgctgagtttttaggttgatgcagaatctgcttggatgttcaggtcactcattggttgccatgacaactcatggtatactccaccctggagtgcaaaggtaaattatgagatgccagagcagaatactgactgacagttgatcgtgctgacctcattgatcatagacgacagcggaacacaaagttcgctgaatatacgtgtacgttgtaccatcaatttttttgctgtcttaggacttgtagatcgcataatgccgtggcatcaccctgtaataaatgtgtaagatatgatagccaaatagatgtatacgagactagttgctgttgacagcaagttttgaaaagagagacatgaatcaggcagacttcaccggttcactgatgttctgatctcttcctgaaataatcgtagtaccttcattttggtcttgctaattgttaaaa

SEQ ID NO: 80488 - DNA, 3827 bp, Zea Mays
acggatacctagctagtgatattgatgaaccctgtggcctgacccagtgccagctcgttgacatgaaggcttaccgtccgatacgagcactccaaggcgatccaacggccgcgatctggaggaacggtctcctaacctccgatatttcctttctcccttatcgccttcgcctccgcggctccgcctcgctctccaaggttctgccgaggtttctcgcctccccgctcccccctctccgagtctccgtccttgccactcctctctcccctcttccacctcaatccaatccgaccctcaccattgtagccggaactcgcagcgggacactaggcgcgcatgccgctcctcctctaccccttctccgcgtgcgtgccgccgccgcgggcgctgctccgccgcctgtcgccgccgccgcccatggcggtcgtcgctccgctgccttccgccgtccgtataatcccctcggtgggaacgctcgaccttccggcgctcccgcccccgcccacggacgacttccactggctcgacctattcgcgttcctcaactcccctgccgacacctaccaccagatccccgcgcagggcgaagaggagctggaggcggggctggaactggaactggagctggagctggagaagcacgccgaggtggagaggcagcgggggcgggcgcgaagagcgcaactccggcggctgcggcagcggcaggtcaaggcggagacggaggcctgggcgcgggccgccgaggagtaccgcgagatcgagcgggagatgctcgaccgcaggctcgcgcccgcgctgccctacgtaaaggcgctcttcgtcggctggttcgagccgctgcgggacgccatcgccagggaccaggacgtgcagcgaaggaagcgggtcaagcacgtctacgctaagtacctgcttctgctcccagccgacaaggtggccgtaatcgtcatgcacaagatgatgggcctgctcatgtccagcaaggacggcactggcagtgtccgcgttgtccaggccgcgcactgcattggtgaggctgttgagcgcgagttcaaagtccagtcattctttcagaaaagtaggaagaagaaaatccaaggtgaaaatgatccagcattggagaaggagcaagctaaatgccgtaagcgtgttaagagtttagttaagaggcggaagatgagtgaagcacagaggctagttcaacaggagttggaattggaggaatggggcacagaagcccaagtgaagccaccagctgatcaaacaccagatagttctccagatattcgacctgcatttaagcatgtgctacgtcagcctataatagaaaatgggaggctaaagaagaagcattgggtgatagagtgtgaccatcttgtgcatgaggggtttgaaagcactgctcggcatgttgatataccctacctccctatgctggtacctccgaagaaatggaaaggttatgataaaggtggtcacctttttctgccctcatacattatgaggacacatggtgtgaaggaccaaaaggatgcaattaatagtgttcctagaaaacagctgcgaaaagtatttgaggcattagatatccttgggagtactaaatggagggtgaatagaagagttcatgatgttgttgagactatctggagtcaaggtggaggcattgcagggctggtggacaaggcaaatattcctttgcctgaacgaccagaatcagaggatcctgatgaaatgcagaaatggaagtggagtttaaagaaggcaaagaaaactaaccgtgaactgcatgctgagagatgtgacactgagctcaaactctcggttgctcgtaaaatgagagaggaggatggattttattaccctcacaatttagatttccgtgggcgtgcataccctatgcatcctcatttgagtcacctaggttcagatctttgtcggggtgttctagagtatgctgaagggcggccactaggaaagtcagggttgtgctggttgaagatacacttggctaacaaatatggtggtggcattgaaaagctttctcacgagggcaagctagcttttgtggagaaccaactgtttgatatatttgattcagcagcaaatcctgttgatgggaactgctggtggacgaatgctgaggatccctttcagtgtttagctgcatgcatggacctttctgatgccttaagaagtccatcaccttaccatgctgtctctcacctgcctattcatcaggatggttcatgcaatggtttacaacattatgccgctcttggaagggactatatgggcgcggttgctgtcaaccttgttcccggagagaaacctgcagatatctactcagaaatagcttctagggtactgaatgttgtatgtgaagactcgatgaaggatcctgctactaacccaactgcttcattagcaagagttttagttgatcaggtggataggaagcttgtcaagcagacagtcatgacatcagtctatggtgttacatacattggtgctcgtcagcagattacaaagagactgcaagagaaagggcttatcacagatgataaattgctgtatgatgtatcctgttacgctactcgggtaactttggatgcactgggacaaatgttccaatctgcccgtggtataatggcctggcttggtgactgtgcgaagatgattgcttcaaaaaatcaaccagtcaagtggacaagtcctgttggtctcccagttgttcagccctacaagaaatataagaattatatgatacgaacttctttgcaatgtctggctttacggcgggagggtgatgcaattgcaatccaaaggcaaaaggcagcttttccaccaaattttgtgcactcactggatagttcacatatgatgatgacagcgattgcttgcaaggagtctggccttcattttgcaggagttcatgactcattttgggtgcatgcgtgtgatgttgatcaaatgaaccagatattgagacaacaatttgtggagctttacagcatgccgattcttgaaaatctgctggaggagttccaaacgtcattccccacactagaatttccaccctgcccaccgcaaggtaactttgacgtgagggaagttctgacttcaacatacttcttcaactaagcttaacaggggaagttctgcacatgaaacatggtgagaagttgtgtccttggatgtttggagtaaccagatcgtgaaatcattctatgcttgagccatatataggagttgatactgaactaattctcgcatggcttttagcataagcaagaaacaggagtcaatcaattatctgcactccagaccaagccaagtggttccaaggaatttgaaatgaacaaacctaaagtagttcctgctgagtttttaggttgatgcagaatctgcttggatgttcaggtcactcattggttgccatgacaactcatggtatactccaccctggagtgcaaaggtaaattatgagatgccagagcagaatactgactgacagttgatcgtgctgacctcattgatcatagacgacagcggaacacaaagttcgctgaatatacgtgtacgttgtaccatcaatttttttgctgtcttaggacttgtagatcgcataatgccgtggcatcaccctgtaataaatgtgtaagatatgatagccaaatagatgtatacgagactagttgctgttgacagcaagttttgaaaagagagacatgaatcaggcagacttcaccggttcactgatgttctgatctcttcctgaaataatcgtagtaccttcattttggtcttgctaattgttaaaa

SEQ ID NO: 80489 - DNA, 3774 bp, Zea Mays
acggatacctagctagtgatattgatgaaccctgtggcctgacccagtgccagctcgttgacatgaaggcttaccgtccgatacgagcactccaaggcgatccaacggccgcgatctggaggaacggtctcctaacctccgatatttcctttctcccttatcgccttcgcctccgcggctccgcctcgctctccaaggttctgccgaggtttctcgcctccccgctcccccctctccgagtctccgtccttgccactcctctctcccctcttccacctcaatccaatccgaccctcaccattgtagccggaactcgcagcgggacactaggcgcgcatgccgctcctcctctaccccttctccgcgtgcgtgccgccgccgcgggcgctgctccgccgcctgtcgccgccgccgcccatggcggtcgtcgctccgctgccttccgccgtccgtataatcccctcggtgggaacgctcgaccttccggcgctcccgcccccgcccacggacgacttccactggctcgacctattcgcgttcctcaactcccctgccgacacctaccaccagatccccgcgcagggcgaagaggagctggaggcggggctggaactggaactggagctggagctggagaagcacgccgaggtggagaggcagcgggggcgggcgcgaagagcgcaactccggcggctgcggcagcggcaggtcaaggcggagacggaggcctgggcgcgggccgccgaggagtaccgcgagatcgagcgggagatgctcgaccgcaggctcgcgcccgcgctgccctacgtaaaggcgctcttcgtcggctggttcgagccgctgcgggacgccatcgccagggaccaggacgtgcagcgaaggaagcgggtcaagcacgtctacgctaagtacctgcttctgctcccagccgacaaggtggccgtaatcgtcatgcacaagatgatgggcctgctcatgtccagcaaggacggcactggcagtgtccgcgttgtccaggccgcgcactgcattggtgaggctgttgagcgcgagttcaaagtccagtcattctttcagaaaagtaggaagaagaaaatccaaggtgaaaatgatccagcattggagaaggagcaagctaaatgccgtaagcgtgttaagagtttagttaagaggcggaagatgagtgaagcacagaggctagttcaacaggagttggaattggaggaatggggcacagaagcccaagtgaagttgggaagtcgcctgattgaattattactagattcagcatttgtgcagccaccagctgatcaaacaccagatagttctccagatattcgacctgcatttaagcatgtgctacgtcagcctataatagaaaatgggaggctaaagaagaagcattgggtgatagagtgtgaccatcttgtgcatgaggggtttgaaagcactgctcggcatgttgatataccctacctccctatgctggtacctccgaagaaatggaaaggttatgataaaggtggtcacctttttctgccctcatacattatgaggacacatggtgtgaaggaccaaaaggatgcaattaatagtgttcctagaaaacagctgcgaaaagtatttgaggcattagatatccttgggagtactaaatggagggtgaatagaagagttcatgatgttgttgagactatctggagtcaaggtggaggcattgcagggctggtggacaaggcaaatattcctttgcctgaacgaccagaatcagaggatcctgatgaaatgcagaaatggaagtggagtttaaagaaggcaaagaaaactaaccgtgaactgcatgctgagagatgtgacactgagctcaaactctcggttgctcgtaaaatgagagaggaggatggattttattaccctcacaatttagatttccgtgggcgtgcataccctatgcatcctcatttgagtcacctaggttcagatctttgtcggggtgttctagagtatgctgaagggcggccactaggaaagtcagggttgtgctggttgaagatacacttggctaacaaatatggtggtggcattgaaaagctttctcacgagggcaagctagcttttgtggagaaccaactgtttgatatatttgattcagcagcaaatcctgttgatgggaactgctggtggacgaatgctgaggatccctttcagtgtttagctgcatgcatggacctttctgatgccttaagaagtccatcaccttaccatgctgtctctcacctgcctattcatcaggatggttcatgcaatggtttacaacattatgccgctcttggaagggactatatgggcgcggttgctgtcaaccttgttcccggagagaaacctgcagatatctactcagaaatagcttctagggtactgaatgttgtatgtgaagactcgatgaaggatcctgctactaacccaactgcttcattagcaagagttttagttgatcagcttacaggtggataggaagcttgtcaagcagacagtcatgacatcagtctatggtgttacatacattggtgctcgtcagcagattacaaagagactgcaagagaaagggcttatcacagatgataaattgctgtatgatgtatcctgttacgctactcgggtaactttggatgcactgggacaaatgttccaatctgcccgtggtataatggcctggcttggtgactgtgcgaagatgattgcttcaaaaaatcaaccagtcaagtggacaagtcctgttggtctcccagttgttcagccctacaagaaatataagaattatatgatacgaacttctttgcaatgtctggctttacggcgggagggtgatgcaattgcaatccaaaggcaaaaggcagcttttccaccaaattttgtgcactcactggatagttcacatatgatgatgacagcgattgcttgcaaggagtctggccttcattttgcaggagttcatgactcattttgggtgcatgcgtgtgatgttgatcaaatgaaccagatattgagacaacaatttgtggagctttacagcatgccgattcttgaaaatctgctggaggagttccaaacgtcattccccacactagaatttccaccctgcccaccgcaaggtaactttgacgtgagggaagttctgacttcaacatacttcttcaactaagcttaacaggggaagttctgcacatgaaacatgcataagcaagaaacaggagtcaatcaattatctgcactccagaccaagccaagtggttccaaggaatttgaaatgaacaaacctaaagtagttcctgctgagtttttaggttgatgcagaatctgcttggatgttcaggtcactcattggttgccatgacaactcatggtatactccaccctggagtgcaaaggtaaattatgagatgccagagcagaatactgactgacagttgatcgtgctgacctcattgatcatagacgacagcggaacacaaagttcgctgaatatacgtgtacgttgtaccatcaatttttttgctgtcttaggacttgtagatcgcataatgccgtggcatcaccctgtaataaatgtgtaagatatgatagccaaatagatgtatacgagactagttgctgttgacagcaagttttgaaaagagagacatgaatcaggcagacttcaccggttcactgatgttctgatctcttcctgaaataatcgtagtaccttcattttggtcttgctaattgttaaaa

SEQ ID NO: 80490 - DNA, 4183 bp, Zea Mays
acggatacctagctagtgatattgatgaaccctgtggcctgacccagtgccagctcgttgacatgaaggcttaccgtccgatacgagcactccaaggcgatccaacggccgcgatctggaggaacggtctcctaacctccgatatttcctttctcccttatcgccttcgcctccgcggctccgcctcgctctccaaggttctgccgaggtttctcgcctccccgctcccccctctccgagtctccgtccttgccactcctctctcccctcttccacctcaatccaatccgaccctcaccattgtagccggaactcgcagcgggacactaggcgcgcatgccgctcctcctctaccccttctccgcgtgcgtgccgccgccgcgggcgctgctccgccgcctgtcgccgccgccgcccatggcggtcgtcgctccgctgccttccgccgtccgtataatcccctcggtgggaacgctcgaccttccggcgctcccgcccccgcccacggacgacttccactggctcgacctattcgcgttcctcaactcccctgccgacacctaccaccagatccccgcgcagggcgaagaggagctggaggcggggctggaactggaactggagctggagctggagaagcacgccgaggtggagaggcagcgggggcgggcgcgaagagcgcaactccggcggctgcggcagcggcaggtcaaggcggagacggaggcctgggcgcgggccgccgaggagtaccgcgagatcgagcgggagatgctcgaccgcaggctcgcgcccgcgctgccctacgtaaaggcgctcttcgtcggctggttcgagccgctgcgggacgccatcgccagggaccaggacgtgcagcgaaggaagcgggtcaagcacgtctacgctaagtacctgcttctgctcccagccgacaaggtggccgtaatcgtcatgcacaagatgatgggcctgctcatgtccagcaaggacggcactggcagtgtccgcgttgtccaggccgcgcactgcattggtgaggctgttgagcgcgagttcaaagtccagtcattctttcagaaaagtaggaagaagaaaatccaaggtgaaaatgatccagcattggagaaggagcaagctaaatgccgtaagcgtgttaagagtttagttaagaggcggaagatgagtgaagcacagaggctagttcaacaggagttggaattggaggaatggggcacagaagcccaagtgaagttgggaagtcgcctgattgaattattactagattcagcatttgtgcagccaccagctgatcaaacaccagatagttctccagatattcgacctgcatttaagcatgtgctacgtcagcctataatagaaaatgggaggctaaagaagaagcattgggtgatagagtgtgaccatcttgtgcatgaggggtttgaaagcactgctcggcatgttgatataccctacctccctatgctggtacctccgaagaaatggaaaggttatgataaaggtggtcacctttttctgccctcatacattatgaggacacatggtgtgaaggaccaaaaggatgcaattaatagtgttcctagaaaacagctgcgaaaagtatttgaggtttacttcccatctgtcacaatgtacatttatatttattattgacttattgttgtcgtctgcataaaaagtacttcacatgggttctctgttgctctaccgaacataagcctggctacatgaggtgttctaaaccacgataaccatcgttatctttaccaaattccttttcattttgttcaaaagataaaaccatcaggactatggatgcactccacgcttcacaagttcacatgatgtttaacatgatcatatccctttgaccattattttttttcatgcttgcttaagtattagcatgttgccaggcattagatatccttgggagtactaaatggagggtgaatagaagagttcatgatgttgttgagactatctggagtcaaggtggaggcattgcagggctggtggacaaggcaaatattcctttgcctgaacgaccagaatcagaggatcctgatgaaatgcagaaatggaagtggagtttaaagaaggcaaagaaaactaaccgtgaactgcatgctgagagatgtgacactgagctcaaactctcggttgctcgtaaaatgagagaggaggatggattttattaccctcacaatttagatttccgtgggcgtgcataccctatgcatcctcatttgagtcacctaggttcagatctttgtcggggtgttctagagtatgctgaagggcggccactaggaaagtcagggttgtgctggttgaagatacacttggctaacaaatatggtggtggcattgaaaagctttctcacgagggcaagctagcttttgtggagaaccaactgtttgatatatttgattcagcagcaaatcctgttgatgggaactgctggtggacgaatgctgaggatccctttcagtgtttagctgcatgcatggacctttctgatgccttaagaagtccatcaccttaccatgctgtctctcacctgcctattcatcaggatggttcatgcaatggtttacaacattatgccgctcttggaagggactatatgggcgcggttgctgtcaaccttgttcccggagagaaacctgcagatatctactcagaaatagcttctagggtactgaatgttgtatgtgaagactcgatgaaggatcctgctactaacccaactgcttcattagcaagagttttagttgatcaggtggataggaagcttgtcaagcagacagtcatgacatcagtctatggtgttacatacattggtgctcgtcagcagattacaaagagactgcaagagaaagggcttatcacagatgataaattgctgtatgatgtatcctgttacgctactcgggtaactttggatgcactgggacaaatgttccaatctgcccgtggtataatggcctggcttggtgactgtgcgaagatgattgcttcaaaaaatcaaccagtcaagtggacaagtcctgttggtctcccagttgttcagccctacaagaaatataagaattatatgatacgaacttctttgcaatgtctggctttacggcgggagggtgatgcaattgcaatccaaaggcaaaaggcagcttttccaccaaattttgtgcactcactggatagttcacatatgatgatgacagcgattgcttgcaaggagtctggccttcattttgcaggagttcatgactcattttgggtgcatgcgtgtgatgttgatcaaatgaaccagatattgagacaacaatttgtggagctttacagcatgccgattcttgaaaatctgctggaggagttccaaacgtcattccccacactagaatttccaccctgcccaccgcaaggtaactttgacgtgagggaagttctgacttcaacatacttcttcaactaagcttaacaggggaagttctgcacatgaaacatggtgagaagttgtgtccttggatgtttggagtaaccagatcgtgaaatcattctatgcttgagccatatataggagttgatactgaactaattctcgcatggcttttagcataagcaagaaacaggagtcaatcaattatctgcactccagaccaagccaagtggttccaaggaatttgaaatgaacaaacctaaagtagttcctgctgagtttttaggttgatgcagaatctgcttggatgttcaggtcactcattggttgccatgacaactcatggtatactccaccctggagtgcaaaggtaaattatgagatgccagagcagaatactgactgacagttgatcgtgctgacctcattgatcatagacgacagcggaacacaaagttcgctgaatatacgtgtacgttgtaccatcaatttttttgctgtcttaggacttgtagatcgcataatgccgtggcatcaccctgtaataaatgtgtaagatatgatagccaaatagatgtatacgagactagttgctgttgacagcaagttttgaaaagagagacatgaatcaggcagacttcaccggttcactgatgttctgatctcttcctgaaataatcgtagtaccttcattttggtcttgctaattgttaaaa

SEQ ID NO: 80491 - DNA, 3712 bp, Zea Mays
acggatacctagctagtgatattgatgaaccctgtggcctgacccagtgccagctcgttgacatgaaggcttaccgtccgatacgagcactccaaggcgatccaacggccgcgatctggaggaacggtctcctaacctccgatatttcctttctcccttatcgccttcgcctccgcggctccgcctcgctctccaaggttctgccgaggtttctcgcctccccgctcccccctctccgagtctccgtccttgccactcctctctcccctcttccacctcaatccaatccgaccctcaccattgtagccggaactcgcagcgggacactaggcgcgcatgccgctcctcctctaccccttctccgcgtgcgtgccgccgccgcgggcgctgctccgccgcctgtcgccgccgccgcccatggcggtcgtcgctccgctgccttccgccgtccgtataatcccctcggtgggaacgctcgaccttccggcgctcccgcccccgcccacggacgacttccactggctcgacctattcgcgttcctcaactcccctgccgacacctaccaccagatccccgcgcagggcgaagaggagctggaggcggggctggaactggaactggagctggagctggagaagcacgccgaggtggagaggcagcgggggcgggcgcgaagagcgcaactccggcggctgcggcagcggcaggtcaaggcggagacggaggcctgggcgcgggccgccgaggagtaccgcgagatcgagcgggagatgctcgaccgcaggctcgcgcccgcgctgccctacgtaaaggcgctcttcgtcggctggttcgagccgctgcgggacgccatcgccagggaccaggacgtgcagcgaaggaagcgggtcaagcacgtctacgctaagtacctgcttctgctcccagccgacaaggtggccgtaatcgtcatgcacaagatgatgggcctgctcatgtccagcaaggacggcactggcagtgtccgcgttgtccaggccgcgcactgcattggtgaggctgttgagcgcgagttcaaagtccagtcattctttcagaaaagtaggaagaagaaaatccaaggtgaaaatgatccagcattggagaaggagcaagctaaatgccgtaagcgtgttaagagtttagttaagaggcggaagatgagtgaagcacagaggctagttcaacaggagttggaattggaggaatggggcacagaagcccaagtgaagttgggaagtcgcctgattgaattattactagattcagcatttgtgcagccaccagctgatcaaacaccagatagttctccagatattcgacctgcatttaagcatgtgctacgtcagcctataatagaaaatgggaggctaaagaagaagcattgggtgatagagtgtgaccatcttgtgcatgaggggtttgaaagcactgctcggcatgttgatataccctacctccctatgctggtacctccgaagaaatggaaaggttatgataaaggtggtcacctttttctgccctcatacattatgaggacacatggtgtgaaggaccaaaaggatgcaattaatagtgttcctagaaaacagctgcgaaaagtatttgaggcattagatatccttgggagtactaaatggagggtgaatagaagagttcatgatgttgttgagactatctggagtcaaggtggaggcattgcagggctggtggacaaggcaaatattcctttgcctgaacgaccagaatcagaggatcctgatgaaatgcagaaatggaagtggagtttaaagaaggcaaagaaaactaaccgtgaactgcatgctgagagatgtgacactgagctcaaactctcggttgctcgtaaaatgagagaggaggatggattttattaccctcacaatttagatttccgtgggcgtgcataccctatgcatcctcatttgagtcacctaggttcagatctttgtcggggtgttctagagtatgctgaagggcggccactaggaaagtcagggttgtgctggttgaagatacacttggctaacaaatatggtggtggcattgaaaagctttctcacgagggcaagctagcttttgtggagaaccaactgtttgatatatttgattcagcagcaaatcctgttgatgggaactgctggtggacgaatgctgaggatccctttcagtgtttagctgcatgcatggacctttctgatgccttaagaagtccatcaccttaccatgctgtctctcacctgcctattcatcaggatggttcatgcaatggtttacaacattatgccgctcttggaagggactatatgggcgcggttgctgtcaaccttgttcccggagagaaacctgcagatatctactcagaaatagcttctagggtactgaatgttgtatgtgaagactcgatgaaggatcctgctactaacccaactgcttcattagcaagagttttagttgatcaggtggataggaagcttgtcaagcagacagtcatgacatcagtctatggtgttacatacattggtgctcgtcagcagattacaaagagactgcaagagaaagggcttatcacagatgataaattgctgtatgatgtatcctgttacgctactcgggtaactttggatgcactgggacaaatgttccaatctgcccgtggtataatggcctggcttggtgactgtgcgaagatgattgcttcaaaaaatcaaccagtcaagtggacaagtcctgttggtctcccagttgttcagccctacaagaaatataagaattatatggagttcatgactcattttgggtgcatgcgtgtgatgttgatcaaatgaaccagatattgagacaacaatttgtggagctttacagcatgccgattcttgaaaatctgctggaggagttccaaacgtcattccccacactagaatttccaccctgcccaccgcaaggtaactttgacgtgagggaagttctgacttcaacatacttcttcaactaagcttaacaggggaagttctgcacatgaaacatggtgagaagttgtgtccttggatgtttggagtaaccagatcgtgaaatcattctatgcttgagccatatataggagttgatactgaactaattctcgcatggcttttagcataagcaagaaacaggagtcaatcaattatctgcactccagaccaagccaagtggttccaaggaatttgaaatgaacaaacctaaagtagttcctgctgagtttttaggttgatgcagaatctgcttggatgttcaggtcactcattggttgccatgacaactcatggtatactccaccctggagtgcaaaggtaaattatgagatgccagagcagaatactgactgacagttgatcgtgctgacctcattgatcatagacgacagcggaacacaaagttcgctgaatatacgtgtacgttgtaccatcaatttttttgctgtcttaggacttgtagatcgcataatgccgtggcatcaccctgtaataaatgtgtaagatatgatagccaaatagatgtatacgagactagttgctgttgacagcaagttttgaaaagagagacatgaatcaggcagacttcaccggttcactgatgttctgatctcttcctgaaataatcgtagtaccttcattttggtcttgctaattgttaaaa

SEQ ID NO: 80492 - DNA, 3633 bp, Zea Mays
acggatacctagctagtgatattgatgaaccctgtggcctgacccagtgccagctcgttgacatgaaggcttaccgtccgatacgagcactccaaggcgatccaacggccgcgatctggaggaacggtctcctaacctccgatatttcctttctcccttatcgccttcgcctccgcggctccgcctcgctctccaaggttctgccgaggtttctcgcctccccgctcccccctctccgagtctccgtccttgccactcctctctcccctcttccacctcaatccaatccgaccctcaccattgtagccggaactcgcagcgggacactaggcgcgcatgccgctcctcctctaccccttctccgcgtgcgtgccgccgccgcgggcgctgctccgccgcctgtcgccgccgccgcccatggcggtcgtcgctccgctgccttccgccgtccgtataatcccctcggtgggaacgctcgaccttccggcgctcccgcccccgcccacggacgacttccactggctcgacctattcgcgttcctcaactcccctgccgacacctaccaccagatccccgcgcagggcgaagaggagctggaggcggggctggaactggaactggagctggagctggagaagcacgccgaggtggagaggcagcgggggcgggcgcgaagagcgcaactccggcggctgcggcagcggcaggtcaaggcggagacggaggcctgggcgcgggccgccgaggagtaccgcgagatcgagcgggagatgctcgaccgcaggctcgcgcccgcgctgccctacgtaaaggcgctcttcgtcggctggttcgagccgctgcgggacgccatcgccagggaccaggacgtgcagcgaaggaagcgggtcaagcacgtctacgctaagtacctgcttctgctcccagccgacaaggtggccgtaatcgtcatgcacaagatgatgggcctgctcatgtccagcaaggacggcactggcagtgtccgcgttgtccaggccgcgcactgcattggtgaggctgttgagcgcgagttcaaagtccagtcattctttcagaaaagtaggaagaagaaaatccaaggtgaaaatgatccagcattggagaaggagcaagctaaatgccgtaagcgtgttaagagtttagttaagaggcggaagatgagtgaagcacagaggctagttcaacaggagttggaattggaggaatggggcacagaagcccaagtgaaggaggctaaagaagaagcattgggtgatagagtgtgaccatcttgtgcatgaggggtttgaaagcactgctcggcatgttgatataccctacctccctatgctggtacctccgaagaaatggaaaggttatgataaaggtggtcacctttttctgccctcatacattatgaggacacatggtgtgaaggaccaaaaggatgcaattaatagtgttcctagaaaacagctgcgaaaagtatttgaggcattagatatccttgggagtactaaatggagggtgaatagaagagttcatgatgttgttgagactatctggagtcaaggtggaggcattgcagggctggtggacaaggcaaatattcctttgcctgaacgaccagaatcagaggatcctgatgaaatgcagaaatggaagtggagtttaaagaaggcaaagaaaactaaccgtgaactgcatgctgagagatgtgacactgagctcaaactctcggttgctcgtaaaatgagagaggaggatggattttattaccctcacaatttagatttccgtgggcgtgcataccctatgcatcctcatttgagtcacctaggttcagatctttgtcggggtgttctagagtatgctgaagggcggccactaggaaagtcagggttgtgctggttgaagatacacttggctaacaaatatggtggtggcattgaaaagctttctcacgagggcaagctagcttttgtggagaaccaactgtttgatatatttgattcagcagcaaatcctgttgatgggaactgctggtggacgaatgctgaggatccctttcagtgtttagctgcatgcatggacctttctgatgccttaagaagtccatcaccttaccatgctgtctctcacctgcctattcatcaggatggttcatgcaatggtttacaacattatgccgctcttggaagggactatatgggcgcggttgctgtcaaccttgttcccggagagaaacctgcagatatctactcagaaatagcttctagggtactgaatgttgtatgtgaagactcgatgaaggatcctgctactaacccaactgcttcattagcaagagttttagttgatcaggtggataggaagcttgtcaagcagacagtcatgacatcagtctatggtgttacatacattggtgctcgtcagcagattacaaagagactgcaagagaaagggcttatcacagatgataaattgctgtatgatgtatcctgttacgctactcgggtaactttggatgcactgggacaaatgttccaatctgcccgtggtataatggcctggcttggtgactgtgcgaagatgattgcttcaaaaaatcaaccagtcaagtggacaagtcctgttggtctcccagttgttcagccctacaagaaatataagaattatatgatacgaacttctttgcaatgtctggctttacggcgggagggtgatgcaattgcaatccaaaggcaaaaggcagcttttccaccaaattttgtgcactcactggatagttcacatatgatgatgacagcgattgcttgcaaggagtctggccttcattttgcaggagttcatgactcattttgggtgcatgcgtgtgatgttgatcaaatgaaccagatattgagacaacaatttgtggagctttacagcatgccgattcttgaaaatctgctggaggagttccaaacgtcattccccacactagaatttccaccctgcccaccgcaaggtaactttgacgtgagggaagttctgacttcaacatacttcttcaactaagcttaacaggggaagttctgcacatgaaacatgcataagcaagaaacaggagtcaatcaattatctgcactccagaccaagccaagtggttccaaggaatttgaaatgaacaaacctaaagtagttcctgctgagtttttaggttgatgcagaatctgcttggatgttcaggtcactcattggttgccatgacaactcatggtatactccaccctggagtgcaaaggtaaattatgagatgccagagcagaatactgactgacagttgatcgtgctgacctcattgatcatagacgacagcggaacacaaagttcgctgaatatacgtgtacgttgtaccatcaatttttttgctgtcttaggacttgtagatcgcataatgccgtggcatcaccctgtaataaatgtgtaagatatgatagccaaatagatgtatacgagactagttgctgttgacagcaagttttgaaaagagagacatgaatcaggcagacttcaccggttcactgatgttctgatctcttcctgaaataatcgtagtaccttcattttggtcttgctaattgttaaaa

SEQ ID NO: 80493 - DNA, 1449 bp, Zea Mays
tatcctttaagaattcttgaaagcaatgggcgcggttgctgtcaaccttgttcccggagagaaacctgcagatatctactcagaaatagcttctagggtactgaatgttgtatgtgaagactcgatgaaggatcctgctactaacccaactgcttcattagcaagagttttagttgatcaggtggataggaagcttgtcaagcagacagtcatgacatcagtctatggtgttacatacattggtgctcgtcagcagattacaaagagactgcaagagaaagggcttatcacagatgataaattgctgtatgatgtatcctgttacgctactcgggtaactttggatgcactgggacaaatgttccaatctgcccgtggtataatggcctggcttggtgactgtgcgaagatgattgcttcaaaaaatcaaccagtcaagtggacaagtcctgttggtctcccagttgttcagccctacaagaaatataagaattatatgatacgaacttctttgcaatgtctggctttacggcgggagggtgatgcaattgcaatccaaaggcaaaaggcagcttttccaccaaattttgtgcactcactggatagttcacatatgatgatgacagcgattgcttgcaaggagtctggccttcattttgcaggagttcatgactcattttgggtgcatgcgtgtgatgttgatcaaatgaaccagatattgagacaacaatttgtggagctttacagcatgccgattcttgaaaatctgctggaggagttccaaacgtcattccccacactagaatttccaccctgcccaccgcaaggtaactttgacgtgagggaagttctgacttcaacatacttcttcaactaagcttaacaggggaagttctgcacatgaaacatgcataagcaagaaacaggagtcaatcaattatctgcactccagaccaagccaagtggttccaaggaatttgaaatgaacaaacctaaagtagttcctgctgagtttttaggttgatgcagaatctgcttggatgttcaggtcactcattggttgccatgacaactcatggtatactccaccctggagtgcaaaggtaaattatgagatgccagagcagaatactgactgacagttgatcgtgctgacctcattgatcatagacgacagcggaacacaaagttcgctgaatatacgtgtacgttgtaccatcaatttttttgctgtcttaggacttgtagatcgcataatgccgtggcatcaccctgtaataaatgtgtaagatatgatagccaaatagatgtatacgagactagttgctgttgacagcaagttttgaaaagagagacatgaatcaggcagacttcaccggttcactgatgttctgatctcttcctgaaataatcgtagtaccttcattttggtcttgctaattgttaaaa

SEQ ID NO: 80494 - DNA, 1183 bp, Zea Mays
cttcatttccctaccccgtttgctagagctactgctgctgcggcggctgtttggtagattcgtccgaatgacaagaaggcagagtaccaaatccagaagctcaccaatgccgctgacaatgcaactgctcgagagaaggcaggaaatgcagaggtgaaggggaaggacgggcattcggatgaggaagacctcctgatgtataggccaaacccagagatgatggacacaaagcctggtcctgatgggcaggacactgatggtgtttaccgtcctccaaaatttatgcctactagcatggatgatgaagagaaacgtcataaaaaagattcaaggagagataaagcgatagcccgagtggcaacagaaaatccttatattaaagagataattgatgatgctgcagatagacctgaagagtggaaggaaacagtgggcgatgaaagcagggaatttgggaggtacatgagacagagagaggagcaagagaagcaggaagaggagttgttcactcgggctcctgttactaaacgtgataagcagatggagaagcgcataaggagacaacttcatgggctaggaggcttaactgacggtttcgacccttgggatgaacatgctgttgggaggagacaaggaagatgatggcggttcaagcaaaccgcacggcaagagcggaaaccgaaagaagcatctgaagagcagcaagaagaggaagaggcattagcctggacccacagtcccacactgctgtaagcctgtaacacttcaacatactgataaagcctagaagacggttcaagcaagccacacagaagctgaagaaaataccaagaaaccaagtagagaagaggctttggttcctcaaaagtgtaggaaaatatgatctgagcgactgatcctgagccattggaacagtataaattagggcttgttcgttttgctctcaatccatatggattgaccgtgattgagtggatttcaaacccgaataagtcaaaatccttcataatttttccaataccatccaatccacatgtatttgaaataatcgaacaagaccttatatggcttgaacgtggtagggtagcaaattttgttcattgtagagtatcccagatgtgataattgtttccccgagtctcctgtttttgtttgcatcggagccaaatgaccaagtatccag

SEQ ID NO: 80495 - DNA, 987 bp, Zea Mays
aaaattctcattaatacctgtcattcaaactcaccatttcctgaagtagtgaggacactgatggtgtttaccgtcctccaaaatttatgcctactagcatggatgatgaagagaaacgtcataaaaaagattcaaggagagataaagcgatagcccgagtggcaacagaaaatccttatattaaagagataattgatgatgctgcagatagacctgaagagtggaaggaaacagtgggcgatgaaagcagggaatttgggaggtacatgagacagagagaggagcaagagaagcaggaagaggagttgttcactcgggctcctgttactaaacgtgataagcagatggagaagcgcataaggagacaacttcatgggctaggaggcttaactgacggtttcgacccttgggatgaacatgctgttgggaggagacaaggaagatgatggcggttcaagcaaaccgcacggcaagagcggaaaccgaaagaagcatctgaagagcagcaagaagaggaagaggcattagcctggacccacagtcccacactgctgtaagcctgtaacacttcaacatactgataaagcctagaagacggttcaagcaagccacacagaagctgaagaaaataccaagaaaccaagtagagaagaggctttggttcctcaaaagtgtaggaaaatatgatctgagcgactgatcctgagccattggaacagtataaattagggcttgttcgttttgctctcaatccatatggattgaccgtgattgagtggatttcaaacccgaataagtcaaaatccttcataatttttccaataccatccaatccacatgtatttgaaataatcgaacaagaccttatatggcttgaacgtggtagggtagcaaattttgttcattgtagagtatcccagatgtgataattgtttccccgagtctcctgtttttgtttgcatcggagccaaatgaccaagtatccag

SEQ ID NO: 80496 - DNA, 3272 bp, Zea Mays
ctctcattctctgagttctctctcctctccccaccttctctctcctctccccacgaaccgcgccaccttttctgacgccgcatcatcggcgacttcatcgccgtcgacaagacgcatcaaggcagtgcctgctactcccgcctccgcattcttgccccacggagcgtgctcctgctctcggccgccgtcctggtgctgaacagctgacacagccggagagatccgcccggcctcggatccgtttcttctcctgctggtgccttggtgatgctgatgcggactcgggactcctacggagagctgaggtgaccttgttgagtgtgcccttacccagcgccgcctgcctccgagccgagatctcctccgcgcaccccggcattctctctctctgtctctggtgccgacgaccgcgcggccgaccccgccctacgccaggtgctcaggtctccatcttcgggaccttcgccggcgacgagcacccgcccaggtcaacatcatgatggctactttggggaggaagaagcggcaagccgcaacaaccttcatcgtgctttgcatcttgtcatccttctacatctgcaaagcgcagttcacgcctgcggacagctaccttgttgactgtgggtcctccaagagcacaatggttggccagaggaccttcacagcggatggcgcatctccggtgaaggtgtccacctcccaggatatacttgcgggcacctcagcaaacggggtggcctcttttgataactcggcgctgtaccagactgcccggatcttcaccgggccatcatcctacactttccctatccagaagcagggccggcatttcgtccggttttacttcttccccttcacctaccagagctatgatctttcacttgccaaatttactgtgtccacccaagatgttctcctgcttagtgacttccagcaaccagacaagaccgcacccttgttcaaggaatactcactgaatatcacccgcgacacgctcgtgatttccttcaagccgtcaaatggaattgcatttgtcaacgcaattgaggtggtctctgtcccagatgatctcatcaccgatgatgcacaaatggtcaaccctgtccagcagtacagtggtttgtctacacagccactggagacagtatatcgggttaacatgggtggtccgaaggtcactcctgacaatgataccctctcgaggacctgggtgactgatctaaagtacttgttgaacccatctgtgaccaaacaggttaattatggcaagcgtgtcaactataagaagggtggaggtggagctactcagctgtcagcccctgatattgtctatggcacagctacagagttggcagcgacaaatacatccaatgctcttttcaacatgacatggcagtttgatgtggatgctggcttcagctatttggtaaggtttcacttctgtgatattgtcagcaaggcacttaaccagctctacttcaatgcatatgttggaggcttttatgcacagaataatcttgatctgtcagcaatgtctgatagtcagttagctacacctatatatatagatgtggttctttcatctaatgatgcatccagcaaacttagcatcagcattggcccatcggtcttgaacaatgtattgcccgacgggattctgaatgggcttgaggttatgaagataagtaccggaggttctgctttcactgtcgggtctggcagtggaaacaaaaaatggggtgtgattcttggcgcagccctcggaggtgttggactgtttataattgttgttgttcttgtacttctttgccggaggaaaaagaccctggaaaagcagcattcaaagacctggatgcctttctctatcaatgggctcacctctctcagcacaggaagcagaacgtcttatggtactactctcacatcagggctgaatggaagctatggataccgttttgccttcagtgtgctccaagaagcaacaaacaatttcgacgagaactgggtcattggagttggaggctttggaaaggtctacaagggggtgatgagggatgagagcaaggttgcagtgaagcgtggaaacccaaagtctcagcaaggtctcaacgagttccgtacagagattgagctcctctcacgtctgcgccaccgccatttggtgtctctgattgggtactgtgatgaaaggaacgaaatgatcctggtctacgagtacatggagaaaggcactctcaagagccatctctatggctccgataacccctcgctcaattggaagcagaggctggaggtttgcatcggagcagcaagggggttgcactaccttcacactggatctgcgaaggccatcatccatcgtgatgtcaagtccgcaaacatcttgctcgacgagaacctcctcgccaaggtcgctgactttgggctatccaagactgggcctgagctcgaccaaactcatgtcagcactgcagtgaagggcagcttcgggtacctcgatcctgaatatttccggaggcagcagctgaccgagaagtcggatgtctactctttcggtgttgttttgcttgaggttctttgtgcaaggccagtgatcgaccccacgctgccgagggagatggtgaacctggccgagtgggggatgaagtggcagaagagaggagagctgcaccagatcatcgatcagaggatctcgggcacaatcaggccggactctctgaggaagtttggcgagaccgtggagaagtgcctggcagactacggcgtggagcggccgtcgatgggagacgtcctctggaacctggagtacgttctgcagcttcaggacgccgattcgacggtctcggatgtgaacagcatgaaccgtatcgtggaactcccgtcacaggtccagaacgtcggggccctcgagagcatcagcgtgacgatggcagaagccggagcgtcaaacgagcctgaccacgacctctccgatgtgtccatgagccgcgtcttctctcagctgatcaaggccgaggggaggggtaagcgtgtgcagcgacagcaaggcgcacctggacgtcggactcggcgacggcgacggcggcagcatgtgcagcgagcggctcgggccggaggacaggacagcagcgtgttctggcagctttcggttgtagcatgtgcatgtccattccccccaactcatcatcttctcgaatataatggttacaggtaactgttggtgcatctttttttttggtttccctatcacaaaaattgacattggaatgctc

SEQ ID NO: 80497 - DNA, 3032 bp, Zea Mays
ctgagttctctctcctctccccaccttctctctcctctccccacgaaccgcgccaccttttctgacgccgcatcatcggcgacttcatcgccgtcgacaagacgcatcaaggcagtgcctgctactcccgcctccgcattcttgccccacggagcgtgctcctgctctcggccgccgtcctggtgctgaacagctgacacagccggagagatccgcccggcctcggatccgtttcttctcctgctggtgccttggtggtcaacatcatgatggctactttggggaggaagaagcggcaagccgcaacaaccttcatcgtgctttgcatcttgtcatccttctacatctgcaaagcgcagttcacgcctgcggacagctaccttgttgactgtgggtcctccaagagcacaatggttggccagaggaccttcacagcggatggcgcatctccggtgaaggtgtccacctcccaggatatacttgcgggcacctcagcaaacggggtggcctcttttgataactcggcgctgtaccagactgcccggatcttcaccgggccatcatcctacactttccctatccagaagcagggccggcatttcgtccggttttacttcttccccttcacctaccagagctatgatctttcacttgccaaatttactgtgtccacccaagatgttctcctgcttagtgacttccagcaaccagacaagaccgcacccttgttcaaggaatactcactgaatatcacccgcgacacgctcgtgatttccttcaagccgtcaaatggaattgcatttgtcaacgcaattgaggtggtctctgtcccagatgatctcatcaccgatgatgcacaaatggtcaaccctgtccagcagtacagtggtttgtctacacagccactggagacagtatatcgggttaacatgggtggtccgaaggtcactcctgacaatgataccctctcgaggacctgggtgactgatctaaagtacttgttgaacccatctgtgaccaaacaggttaattatggcaagcgtgtcaactataagaagggtggaggtggagctactcagctgtcagcccctgatattgtctatggcacagctacagagttggcagcgacaaatacatccaatgctcttttcaacatgacatggcagtttgatgtggatgctggcttcagctatttggtaaggtttcacttctgtgatattgtcagcaaggcacttaaccagctctacttcaatgcatatgttggaggcttttatgcacagaataatcttgatctgtcagcaatgtctgatagtcagttagctacacctatatatatagatgtggttctttcatctaatgatgcatccagcaaacttagcatcagcattggcccatcggtcttgaacaatgtattgcccgacgggattctgaatgggcttgaggttatgaagataagtaccggaggttctgctttcactgtcgggtctggcagtggaaacaaaaaatggggtgtgattcttggcgcagccctcggaggtgttggactgtttataattgttgttgttcttgtacttctttgccggaggaaaaagaccctggaaaagcagcattcaaagacctggatgcctttctctatcaatgggctcacctctctcagcacaggaagcagaacgtcttatggtactactctcacatcagggctgaatggaagctatggataccgttttgccttcagtgtgctccaagaagcaacaaacaatttcgacgagaactgggtcattggagttggaggctttggaaaggtctacaagggggtgatgagggatgagagcaaggttgcagtgaagcgtggaaacccaaagtctcagcaaggtctcaacgagttccgtacagagattgagctcctctcacgtctgcgccaccgccatttggtgtctctgattgggtactgtgatgaaaggaacgaaatgatcctggtctacgagtacatggagaaaggcactctcaagagccatctctatggctccgataacccctcgctcaattggaagcagaggctggaggtttgcatcggagcagcaagggggttgcactaccttcacactggatctgcgaaggccatcatccatcgtgatgtcaagtccgcaaacatcttgctcgacgagaacctcctcgccaaggtcgctgactttgggctatccaagactgggcctgagctcgaccaaactcatgtcagcactgcagtgaagggcagcttcgggtacctcgatcctgaatatttccggaggcagcagctgaccgagaagtcggatgtctactctttcggtgttgttttgcttgaggttctttgtgcaaggccagtgatcgaccccacgctgccgagggagatggtgaacctggccgagtgggggatgaagtggcagaagagaggagagctgcaccagatcatcgatcagaggatctcgggcacaatcaggccggactctctgaggaagtttggcgagaccgtggagaagtgcctggcagactacggcgtggagcggccgtcgatgggagacgtcctctggaacctggagtacgttctgcagcttcaggacgccgattcgacggtctcggatgtgaacagcatgaaccgtatcgtggaactcccgtcacaggtccagaacgtcggggccctcgagagcatcagcgtgacgatggcagaagccggagcgtcaaacgagcctgaccacgacctctccgatgtgtccatgagccgcgtcttctctcagctgatcaaggccgaggggaggtaaatgtgcgtgacgcagcctgtagggtgtgggtggtggggaggaagccttcaaagtcatctcttgctgaagtttacgtgagagagatcatgtgtgattttttttcttcttttcgtctacaaatgtactactgaagtgaactatggtttcgagttacagttttagccattgtgagcctgtgcggctacaaatttcgtagatagcacatttcgagtttgaatttgttactgggcgttgaat

SEQ ID NO: 80498 - DNA, 485 bp, Zea Mays
ccactgggccatggcttctttccccgggataattgcttctaatctcccgaggctgcataacctaattcagaggcagagcaagggggcgtgagggagatgagggagatcatcagcatccatatcgcgtaggcaggcatccaggtagggaattcttgctgggagctctactgcctcgagcatggtatccagcctgatggcctcatgcccaatgacacctctgtcgggatcgcgagggatgcgttcaacacgttcttcagtgaaacgggcgcagggaagcacgttccaagggccctgtttgtcgacttggagcccactgtgattgatgaggtgaagaccggggcgtaccgccggcttttccatcctgagcagctcatctcacacaaggaagatgatgcgaacaacttcgcccgtggacattacacaggtgtgacatcttgtcactgttatgcaggctcaaaatgttcttggaaacaaggggactgaaa

SEQ ID NO: 80499 - DNA, 403 bp, Zea Mays
aataacttatacaatgtgcattaaccacctatcatcttatttgccaattactgcacaatgctgataaatttcaattactatacttctagaaaataaacaaggtccaacgttgtttgctttccatttcccttctactctgatattatgtgatttggtttattcatattactgtccatagcatatttgttgtgcacacagttataaattcgttttctcgacactgcacaggcaagggggaaatcttcttatagatctgttccgtcactgtgacaatcatttgggagagaaacaagtaaacaacccttttttccataaaactccatctggaagtgcacgacagccactacagttgactaacgatgtaaccaagatgatgcaaaagcatcagctggaaacaccacag

SEQ ID NO: 80500 - DNA, 1405 bp, Zea Mays
cggctggctacaagccgacactgttgcagctgtttggactgctgcagctgcaatccatagagagaaaaatactgtagaagccgcagccgcagccggattgcagccgcagcaagccgcagcgaacaagctgtaagcgaacagtcttggtagactgctgctgcagctgtctattctcagcagaacactgtcttttccaattttctgaaaactataaaattgttggtgtagtggaagaaatcttgcgttcaagagagcccccaaccatacacaagctttgcatccaatagcccacccaccagctgcgaaatctcctccaaacaacaactgaaccggacaaagaaagaaggccaaaaagggagtctcctttccaagttcaaaattcgaaacgtcccaagagaaaccgaaaccaccataaaaaccagcaaccaaccgtcatcgccgcacaagcgcacgcactcctcgccgtggaccaactccgaagccccatcccgtcccaactcccaagagccgaacgcgagcggcggccgccatggcgcggtgcagcaacggcctcctgggtctcctcaacgcgggcgtgctggtcctcgccatcgtcgcgctggggggcggcgcctggctcagccaccgcgcgtccaccaccgactgcgagcggttcctcgagcggcccgtcatcgcgctgggcgtgctcctcctcgcgctctccctcgcgggcctggccggcgcgctctgccgtgcctcctgcctcctctggctctacctcctcgcgctcttcctcctcatcctgctcctcttcgcattcaccgtcttcgcgttcgtcgtcaccaaccgcggcgccgggtgggtcgtctccggcagggggtacaaggagtaccgcctcggggactactccacctggctgcaaaggagggtggagaactcgcagaactgggccaagatccgcagctgcctccaggacggcaaggtctgccagaagcttgcgtccagaaaggagacggccgcccagttcgtcaacagcaacctctccccgatccagtctggatgctgcaagccaccaacgggttgcaacttcacctaccagagcgaaactgtctggaccaagcccgctggtttcaacaccacaactgacgaccctgactgcaccacatggtcgaacgaccagaccgtgctctgctacgactgcatggcctgcaaggcaggcgtgctggccaacctgaagaacgactggaagaagatcgccaccgtcaacatcgtcttcctgatcttcctcgtcgtcgtctactccgtcgggtgctgcgcgttcaggaacaaccggcaggacaactcgtacccggcctggaaatgagatacatacggctttggacttttgagatgggagcacgcttgacaagcttgaacgaaaaaggta

SEQ ID NO: 80501 - DNA, 7816 bp, Zea Mays
ccgaatcgattaatactcagctgaggatctccaaccacacgacatatgtagcacttaacccttgcatatgtcaactcgccaccggttttctcaagaccagaacgggttcacgcgacccgagagcacagcactccaccgtccagccattggcctggttggtacacgttactctcgccatggtgcccgccatgtttccgagagtacagcaccccaccttccagtctcttgccacggagggtacaagctactctcgccatctctccactcccagtgcgtgcgagctgttctggtattggtccgaccgaggctaagcttacccatgacgaggcatgtggccagttaaagggtcctagatcagcaagcctactttcggtacggtccttaatcgacacagacgggcgacctttcctgctcaacgtctggtctcatcttattatttaacacccaaatcatgtacctgacagaggtaccatacttgaatgatgaattcatcactgcagatgatgctctcaccattacaagtcctttttcataaaacaaacccataccagtgttacacagcattcttttaaaaagaatcaagttttagttctctaggcagggctaagcctcattggttctctttataaaacaggtagcaaggaggataatcaaattccaaggaatggtaatgcatcaattgtttattcacacaactcctatcacctaatgcagcaggtaagtgataaaagtttttaaaacagaaggaggtggcaaatgcaccggggcttgcctgggataacactatgttagtgttgttaaatgacgatcacttggtgagtatctcccatcctggcacttggttgattcatccactttagcttcatccatcagcatcgtcttgtgattaatccagctcttgtccttcacatcacgtgattaattaacgtacctagatgatatgcatactgcatatgagtgaataggagcataaatagcgcaagatagataagttatactaaggaggatacagacttaaagcaagacatcacaattcttatgtgtaacaactagatatatttaactctacatcagacatgacgttctagtcaattggacctaatccaatcatcaagtagcattagcaatattcaaatcctgatgtaccgcaatatttaaaaacaattactatatgttgacatatcactacgtatcacaattacatttttttcatttaaacggatgaactcaagcatcaaaaaggctacacataaatccaacctcatgaactagaatatcctaccgaatgattaacaccactcttagtactaagaaacaactcattattaagaagcatagaattttatagtatagtatttatcttaatttaaaggtttaaaacacttatatgcataaacactagatgcttctgattttatacaatcatgaactttgaggtaatcagacctaacccaaacattaggtaacaataactaaacacattaaacatgggacacatgttcactttaggttagctacttcaagacttcaccacaacgcatcacaccactcgggatctaacaagcagagtattattatatgatatagggttttacaaaactatttccgtaacaacccaagatttaaagcgcttatacgcactatccattgatagttcttaggtttttaccaaaacggacttatcgatgttattcgcttcctaattattttgggtaacaacaattatttatttatgacatttaatttattaataaacctagataatacatccgctactatggcaacgcatcactttcaccataccaataagaactctcactaataacactgatagtactatcaacaaacgctaaacttacttttcgcattactagttagcataatcatattgcatataaatctactaatattcttcgcataaatctatatctaaaatctagatttcaacacctaacgcgaccacttcacaatcacctcactgcatgaaacgatgtgttagaaccacactaatatagtcacaagatcatcacgactaacacacctagccaagccattcatcaaaccagctaacaaaaataataaattagctcaccaaagctaaatccggattgaaaccattaaatcgacgacgctgtccggcttgcgtatatcaccgatttgacgagcgtggcactggtgcttccctttcgtctttcggcgtgatcgcaaggtgcaacaaggctgctgaaacgatgacgatgctgggatgcagatgttgatgtctcagatgtggacacgaccaaaacccgcacgaggacaagggaagccagaacgacaatggcgcggcgacctcgacactaagcacccgagcacgacgatgtcgcggcgcaacaggaaatagtgacgccatgatggccagggaggcgtggctggcggtgcaaggcgcggtcgagaacggacagagggagccgggagaaagaactgcggcgctgcgagcagagcgcagggcgcacgcagcaaggagagaaggggaggaagagaagcaggggggcgcggcgagaggagcatgcgcgcgccaacaggctgggcgacggcacgagcagagaggagctggggagggagatccgcgagagatagatgggcgcgcagcggctagcacgcagagagccatgggagagggatccgagctggagctggaagaaggctccgggccatggggaatacaaggggctggggcgagctcggggaggaagaccgtggcgcacaggaaaacccggacgccgagcaagaacacggcagggaggagctcggccgggcgccatggggcgagctcggggaagctccacggcggggttcgcggcgcaggacgcaggcgcgcgcgcgcagagggagatgcgcacggctggcgagcgcagggagcatggccagggcgcggccgagcagtgagttccatggcagcggcatggtggagggagctgggaggaaacgccggggaagatgaggttggcgagcgctggggctggcagccaggcaccggatgcgagaggtagagggatcgagaatggatgcgatggtgaccgaaggaaaaggataagcccccagaaacgtgagcaattttggtgcagtttcttcgggaacgagccacggcgacggctttggataagaccagagaatacgtgaggaaaatggtgccctgtgtactccataaaaatctgagaggcaacagctgatttgtttagagataagggagatggaatagcggtggaatatttccaccccagataaacacacgtacttcaaataagaaatgttgcaaattaacatgtggatgataaaacttgtaattccttttctttatccttgtaacaaaagaataaataaatatctatctagtctcggctagagatttggggcgactctgtcggagctagattaagaactttcggcctgcgataatttagatagcattgatttaggaaatactctggaattaagatgaattttactcgttatctatatctgaggatttggatctggtcaggtctaaatggactggatatcgaatacaatattggaacaatgtttggttaattttgaaattcgagaaattttatccgttatctcaacatagttaattttactaccttacagagtgtgctgaaagataaattggatcataatctcgcgcaagatttctcttagacactgcgcgattcaaattattttgccctgaaaaatttagtcgtcgagttcaaactaatttgcccgggataaaatcgtaagaatagatcgagcttccgaatttgtatttgcgcgaccgatgtattttaaataatcaccggacacaccaatttttggaacgactatgttccgaacaacacgaaaatttcggaagagcccggatagataaaaatgacgtcgaactcgcgacagacaaaacagatgcgatataaaaatcgcgataagcgaagatgattagatcttaatgtccattttatttactgatatcacgtgcttaaatccatactcgttgtcgagcggaatataaacacctggggtgttacagccctccccccttaaaagaatctcgtcccgagattcgtagcaaaagacttttaagagtagagaagcatgtaacccatgtccattttagcgataattatgagacatttccaaacaagggcgagtgtctcagaatgtggtttctctagcggacataacatgtatcaacttaagccaatttagaaatgtccattagtagagacactgtctgccagaggagcacataaggttccatgtgtgcagtttgccttttctgatgacactgtactatatgagtctgttgagcgagcggtagatatgcaactttacccaaacagagtcaaatgcaacctcttgggtaaaacatacagaaagaggtttaccaacaagtggttacagtaagttcatggcacacgagacgggtgtggatgtcgaatattgtcacggttaacatatggctaaccagagaattcaagtccacgaacgatgatagagattcgagaaaatatcaatgaagagagccattaatgttgacttcgcgaccaacccatttcaccaaatacttagcacggctcgacttgatcacacatgctggaaaagcacacgtgaggcgattgaggcgtgactagaatgatgattaagggttactggccgacttactctcaattcttataaacacttccttacggggggatgtacaaaagtgagtttagacaactcgacaaaacgatctctaaactcggcctttgttcacaatgtagttacaagttagtaaaaccaacttgttgaactaactatgacattgagtaggtcctcttattatccatcgacaatccaattgtcgggagttcactcttgtacaagagatcatgcatttgggtagaaattcatttggtcaggttgttcagccgtttcttcatgcgaggtgaactgacttggttagggaatacatggattaaatgaaagagcgaatgaacaaactcctgcatttagcagcaagagaagtcaatctccattttgagaactaatcaattgtctcccaacactaaaaagatccaaggcttcacctttactcaaaggatgtcaagggaacttgtatgagtagtcactaccaagatcaaaagaaataagaccacacatgaaagtggtatgcccttttgatccgacggagatgatagatgttgctcgatcatttgacaaacaacatagaaattgtttcaaggaaaagatctacaggagttaacacatcagggtagttccataatggatcatgaccagagaccttgataccagcatccgacgagtagcacagtcctgtgtgcgcattcacaggaggctcttagtttcgctgcggcaccataagtcattaatcgtgacaccattaccaaacaacaccaataatgaatctcacatggaggaacaatttgtgcagagataacatattgatataatctcataatggattatgactgctaacgatgataccacgcgtgccaagtagcgcaaccatgtgttgatcacccaccggaggcccttggtttcgtcgtggcaccatcgcctttggttataacaccattaccagatgcaaccaataagaaatctcatgccccaccaatagattgagcaagggtgacaatatgcaaagagactacctgtcaaaacggttacaagtagagagccaaataggtcctggcccgatgaaaggaatacgagattgccaaaacctaaaatggttgatgagggagtacgatgggagactatttatttcaaccccaagcatatttctatgcccatcgtagcaatttcaaggtcaaggatgagcgcctgattagatacacaggaaaaacgatcggaagattaaattaatatgccttcgagagatatgaggaaaccaaaggcattaaattcaagaaaatttattgggcaatcctttccttggttagattgagaaaacgacaatgtgatcctcaagcagaggcaaactagaatagggataccagtttgcaccaaccgaacaagtcgaagcttacgaggaaaacatgaccataagagagctacaagtggattgtcaagatcatagacttgagatccttatcttaagcaccggtacatttattttctacgagaagattacctaaacacctatttagataagcttgatcctaaagtaacgatagaaattcagactcgtccacttttggaaactggggaaaaaaacttcggggaattaacatcgattcgggtcatggctcctgggtgaggacatggccagatttttagtttacccaaacataccataacaaacacaagttggactagcggtcaaattaagaagaaccacaaaccacataaagacatgtctaaaggacacaacaaacaaagctagaaattgcttatagaatagtaatgcttcacacattttccaattatttattatcggaataaagatgagggaagcacgttcgttcacaatcaccaattattagaataaaggtgagagaagcatatttgtgcacaaacgacaaacacaatgcaacaatcaggatgcatgttcgtcctattcggcctcaccaatttcgccaacataatgtggcaatagcgttctatatcggtggcacatctacgtctctctcggtatattgctagtcgtcagctacacatacgagttcgaagttagtgtacctgcagaaaattccatcacagcccaattcccaatgatgcaattcacacatgacagtttatactccatatatttttatatggaggccagctcctcattaagcgtcgagccacgcataggcgtcgttgccacactttaaccatagggcagctcattatggtaactcaccttcttacctgagcgtaggtgcgtcgttgcaaatacattacacttctcagtattcccatgtctgtatacccatacacatccatggggtactgaatcccgaaaaagtaattactccacatcacagccttcatatatacatatgtaaaacatgtatataatcaagcgctttttatgctcttccctagaccgacgtttgttcggtcatgctctcacatctcacgttacctgagcgtcgatccattcaaaactgaatggcctcaagaataacaatacacatgtatgcaatacccttccctggttgtgggttagtattctcaactaagccacctagtagtccttaacttagggcttaatagaggatgtcgctagcattatagtttttttaaatctgtttttcaaaatcaaacaatgtgtttagttgaaaataggtttttgaaaccaaaactttgttttaaaaatacgtatgtgaccgtattatacttaatacagctccgataccagctgtcgcagaacctcccaagttatcaggcccacatgcacttgtccttgtcttaaagacctcagacagctatgcgtgtgcaccaaacaacttaacaggatctgtccgagtgccccgaggaccccggataaacgacttatcgccaagatcgcatgattaagtaaatacaaatcacacaccaacatttgcagcggaaataaattctttattacaaaatgattacatgttacaataattttacattatacaattatcggagtgattacaagagaaaatgattcaaaagaattacaaattaaaatgtataaaatatttataggttttcaaatacatgctagtttaagtgacaatcctcaataaagaagctaaagatgggatatacttatataagaaggccgagcccaccggcacttagcaccatccacaacagaacaaacttataacctgaa

SEQ ID NO: 80502 - DNA, 2583 bp, Zea Mays
ctcgctttcccccattctctccctcctttccgtcctcccccttttcccacgccaagaaaccacgctgcgaccatccgtcctcctcgtcgtcgatctcaatctctcttcgtcacgatcgcaaacagatattgacccgtccgatcggctccgcatcgccagtttgcatctgcttccttcggtgagggtgtgtctggttcgtgctcccgcagcgaaggctggagccgagatgacaatgccgggctctccggcgaggccgagtttctcggccctccgcggtgcccggtggcgggcctatcttggcgtcatccccggcttcgccgccgtctccaccgacgagctccgccgcgccgccgctgactcccgccggagatatgctaatctccggcgaaggctgctaatagatccccatctctccaaggatgaagaaggtgcccctgacttgattgtggagaatccactatcgcagagcccagggagcacatggggccaatatttcaggaatgcggagcttgagaaaatgcttaaccaagatctgtcccgcctataccctgaattgggggacttcttccaaacaagcacatgtcagtctatgcttggacgtgtattgttagtatggagcctcagatacccagagtttggttacagacaagatcgttcaaagctgaacagaagtgacaggaaaaacagtgttgagggtagaacaggtaaaattagaagtttggctgaccttgatcctgatactagagatcttttcttgatcaatgatgcatacggagcagagggtgaactgggtattattttatcagaaaagttcatggagcatgatgcttactctatgtttgagaatttgatgaatggtgcacaaggagtggttgctatcactgacttctattctctgagttctgccccagaatcaagtatgggtttaacaccagtaagagaggcatcgtctgcaatatatcatttgcttgctagtgttgattcctctcttcatagtcaccttgtggagttaggagtcgaacctcagtacttcgcattacgatggctccgtgtcctatttggtcgtgaattttcacttgacagccttctgtttatttgggatgagatcttctcttctcctaaccattcttattgtactgacatcaggagtagggcagattatcaatttaaagtgttatgttctcctcgtggtgcactgattttgtcgatggcagtatcaatgatgctccatctcagatcctccttattagggagtgaacatgcgacttcttgcctagtgaggttgttaaattttccagaagatattgacttaaagagcttaattgagaaagccaagttactgcaatcttttgcccttgaagcaaatcttccttcatcctcatcgagaggaaattctctcttgtctacacccaactattgggaagagacatggaagattctccagccatcaatggaccaaaagggtggtggtgtcctcaagatgaagggaaggggcttcttgagaagaagcttgtctagcactgagtcgaatgtttccagaagcaaggctgctaattttgaaaacaacgatatgacttcaactaggcagtccactaccgatgaatttcacaatgctgatgtagttcctgcggagctgataactagtgtgccacacatgcttatagaaaaacaaaagcatcatgttggtaaaggtactgcagagactattgggagtaattcaaagaatggatgtgagacaggacagcatgatggttactgctcaacttcaggtgaaattagagatcctcttggagcagctagcgggtatttatcgaggagtagcagtatcactttgtcatgtggtactgaatatgatcatgatacccatcatctggaagaaccatgtgatccctgtgatgacagagtggttaatgaacctgatccactctctgtgcacaatactggaactgatgaagcagcaacaacagatcgaacatctggaatagtggatacttatcctgttcgacagcgtagactgtgttctgttgatgggaagctgaaaataaaaacccgaaatgccactagtgctaaaggtgacgaaaaagaaacattggcaatatgttcaatttcaaatgtggctgataaagagttgagcagaacattaagatctcttggtgaatctatggttgagaacatacaggatatcgaattgctgttaaaaccaaattcactctcgacttcagtggagaaacttgaggaagcaattcctggaagcacagagcaagctaaggcagtagcagctctaaaagaactcaggaagatcagtgaccttttacgccaaatctaaccggtacaactacggattcttctatacatatggtgttgtagtttttatacgtatctccattggacaatggatgtgatgtaacatgctaacagtatataaccatctgattgatcggtaaatagtaatttgtatgctccctgcaagctgatacattgtaaatgtacatctgaacggctgcctgctggttgtgaagtgaaggcggcaaacatttttttttggcttgtgacccaacaataaatattcaaggtttctgcgtt

SEQ ID NO: 80503 - DNA, 2610 bp, Zea Mays
ctcgctttcccccattctctccctcctttccgtcctcccccttttcccacgccaagaaaccacgctgcgaccatccgtcctcctcgtcgtcgatctcaatctctcttcgtcacgatcgcaaacagatattgacccgtccgatcggctccgcatcgccagtttgcatctgcttccttcggtgagggtgtgtctggttcgtgctcccgcagcgaaggctggagccgagatgacaatgccgggctctccggcgaggccgagtttctcggccctccgcggtgcccggtggcgggcctatcttggcgtcatccccggcttcgccgccgtctccaccgacgagctccgccgcgccgccgctgactcccgccggagatatgctaatctccggcgaaggctgctaatagatccccatctctccaaggatgaagaaggtgcccctgacttgattgtggagaatccactatcgcagagcccagggagcacatggggccaatatttcaggaatgcggagcttgagaaaatgcttaaccaagatctgtcccgcctataccctgaattgggggacttcttccaaacaagcacatgtcagtctatgcttggacgtgtattgttagtatggagcctcagatacccagagtttggttacagacaagcacttcagacaagtcagggaccttcatgaagagcttttgggtgatgattttgatggtcaaacttttccagatcgttcaaagctgaacagaagtgacaggaaaaacagtgttgagggtagaacaggtaaaattagaagtttggctgaccttgatcctgatactagagatcttttcttgatcaatgatgcatacggagcagagggtgaactgggtattattttatcagaaaagttcatggagcatgatgcttactctatgtttgagaatttgatgaatggtgcacaaggagtggttgctatcactgacttctattctctgagttctgccccagaatcaagtatgggtttaacaccagtaagagaggcatcgtctgcaatatatcatttgcttgctagtgttgattcctctcttcatagtcaccttgtggagttaggagtcgaacctcagtacttcgcattacgatggctccgtgtcctatttggtcgtgaattttcacttgacagccttctgtttatttgggatgagatcttctcttctcctaaccattcttattgtactgacatcaggagtagggcagattatcaatttaaagtgttatgttctcctcgtggtgcactgattttgtcgatggcagtatcaatgatgctccatctcagatcctccttattagggagtgaacatgcgacttcttgcctagtgaggttgttaaattttccagaagatattgacttaaagagcttaattgagaaagccaagttactgcaatcttttgcccttgaagcaaatcttccttcatcctcatcgagaggaaattctctcttgtctacacccaactattgggaagagacatggaagattctccagccatcaatggaccaaaagggtggtggtgtcctcaagatgaagggaaggggcttcttgagaagaagcttgtctagcactgagtcgaatgtttccagaagcaaggctgctaattttgaaaacaacgatatgacttcaactaggcagtccactaccgatgaatttcacaatgctgatgtagttcctgcggagctgataactagtgtgccacacatgcttatagaaaaacaaaagcatcatgttggtaaaggtactgcagagactattgggagtaattcaaagaatggatgtgagacaggacagcatgatggttactgctcaacttcaggtgaaattagagatcctcttggagcagctagcgggtatttatcgaggagtagcagtatcactttgtcatgtggtactgaatatgatcatgatacccatcatctggaagaaccatgtgatccctgtgatgacagagtggttaatgaacctgatccactctctgtgcacaatactggaactgatgaagcagcaacaacagatcgaacatctggaatagtggatacttatcctgttcgacagcgtagactgtgttctgttgatgggaagctgaaaataaaaacccgaaatgccactagtgctaaaggtgacgaaaaagaaacattggcaatatgttcaatttcaaatgtggctgataaagagttgagcagaacattaagatctcttggtgaatctatggttgagaacatacagtggagaaacttgaggaagcaattcctggaagcacagagcaagctaaggcagtagcagctctaaaagaactcaggaagatcagtgaccttttacgccaaatctaaccggtacaactacggattcttctatacatatggtgttgtagtttttatacgtatctccattggacaatggatgtgatgtaacatgctaacagtatataaccatctgattgatcggtaaatagtaatttgtatgctccctgcaagctgatacattgtaaatgtacatctgaacggctgcctgctggttgtgaagtgaaggcggcaaacatttttttttggcttgtgacccaacaataaatattcaaggtttctgcgtt

SEQ ID NO: 80504 - DNA, 1480 bp, Zea Mays
attggaggactgaatcatgttggccccaagcattaggagataaattttcaactaccgctcaacatgcaacctctgcccaaatgcgcctaacaaaacggcaaccaaagaagatatgcaacccattttcttgaaagatgtggtagagggcgcacaccgggttatgtggccataccctccttgcccatcggtcggtcgtccaaatcatgttctagatcgctagccagcttaaaaactaacacttagggggaacccagttcttccagatgatccactccaggtcagtatgtatggacccccaaaaattgtgcttggtgtgctgatctcgtcgactactagttgtttctagaaagcttccaagatatactgtcaggttgatgttccaaatcctattattattgcataaggcttcttgtaatgatctattttttcttagaaatatggaagatatttgagtttatcattttttgtgcaaggcgagtcgataccaaggctgagactaacagtggctgtccaatcttgccataaccaccttagagtgcactgcttgtgcaaaagaatgcggggaggatgctcaaacctcctagggcttttggtgctgaacgggggtccagttcactttgcatttccctcctgtgactctctccattccggtccaaggactagcataaaaaaccttcggctggccgcaacgggcatcctccattgggctcccaacatgcactaagcgatatattctgctgggccttggtgggcatttgctgaatggaatatgtaccgtatcattgaagtccgtacatcgccccaatataaatatatatgggggtgaccgtgctttcaagccgcatagaacggtggcagctgaggcgcggcgatcacatctatgcctggcggacaggctactcccatcatggaatctacgaaagcgacgagaagcaagtgccgtgaagctatgcgtggaggcggtgtcgtggtctgctgcctcgactgcttcctggaaggggacaatctctgcctcttcgcctactcagtgtccatggcattcgctgcactgagcaatatcggtgctcaagacacctgctccgtggtagacgaagacccacccgacacggtcttgcgccgcgccaacgacttcctcgactacggcggcttccgcagctacaacgttgcaggaacaccaacgttccccggcatgtacaatcctttagagctcctttggatggttgggtagtacccactagagatgattttacccgatatcaatttaggagctctaaagttagaaaaatcacgaaaaaacagatgattgtgaaatgttgctgcaatccacaaaattagtggcaaaaataaactttattcagtataagtatatgctttggatgaaaacattctatacaaattcaaagtacataaaaggctaattgctacaaggtataccaaagttaactattttacatataactaaaagtcttattcaaatgtc

SEQ ID NO: 80505 - DNA, 878 bp, Zea Mays
ctgggccttggtgggcatttgctgaatggaatatgtaccgtatcattgaagggggtgaccgtgctttcaagccgcatagaacggtggcagctgaggcgcggcgatcacatctatgcctggcggacaggctactcccatcatggaatctacgaaagcgacgagaaggtgatccacttcactagcgcttcagcgcagtcctccggcttcttcagcagctcttcatctgcagccttctcttctcacagcaagtgccgtgaagctatgcgtggaggcggtgtcgtggtctgctgcctcgactgcttcctggaaggggacaatctctgcctcttcgcctactcagtgtccatggcattcgctgcactgagcaatatcggtgctcaagacacctgctccgtggtagacgaagacccacccgacacggtcttgcgccgcgccaacgacttcctcgactacggcggcttccgcagctacaacgttgcaggcaataactgcttccactttgcctactactgcaagacaggacgcgaatatctctcaccagtgcggatgattgctgacccctcgcaggaacaccaacgttccccggcatgtacaatcctttagagctcctttggatggttgggtagtacccactagagatgattttacccgatatcaatttaggagctctaaagttagaaaaatcacgaaaaaacagatgattgtgaaatgttgctgcaatccacaaaattagtggcaaaaataaactttattcagtataagtatatgctttggatgaaaacattctatacaaattcaaagtacataaaaggctaattgctacaaggtataccaaagttaactattttacatataactaaaagtcttattcaaatgtc

SEQ ID NO: 80506 - DNA, 1990 bp, Zea Mays
cttttttttcccaaccgggcacacttccgtttacatctatcccctcagccagcggccagcgcacagcgcaaccgcctcaaaacacccgcgtgtgcgtgacagtgcagctagatccacccacaacctcgccaccactctccacgccttccgatccaatcacccgcccctttcactgacgccaggatcaatcaggcacggtcccacgggacagcgagaatatctaggtcgaccctgagagccagccgccaggcgctgatttctcttttgtagcctccggattttttttcgcctataattactcttccccgtgcgccctcgcgaggtcgaacccccaaggcgaggcgacgaaaccctcgccagtccccaactcgaacctcagtcaggcagcgtgaggagggagagttcaaggaccgaggcggcgtcgggcgagatgaagcttaacgtcaagaccctcaagggcaccaacttcgagatcgaggcgagccccgatgcatcggttgctgatgtgaagaggatcattgagaccactcaaggtcagagtacctaccgggcggaccagcaaatgctcatataccaagggaaaattctcaaggatgaaaccactttggaaagcaacggagttgctgagaacagcttccttgttataatgttgtccaaggctaaggcatcatcgagtggagcttctaccgctactactgcaaaagctcctgcaactctggcccaacctgctgcccctgtggcccctgctgcatcagttgcaagaacaccaacacaggctcctgttgccacagctgaaacggcacctccaagtgtccaacctcaggctgctccagctgctacggttgctgctactgatgatgctgatgtgtacagtcaggcagcttcaaaccttgtatctggcaacaatctagaacagactatccaacaaattcttgacatgggtggtggtacatgggaacgtgatactgttgttcgtgctctacgtgctgcatacaataaccccgagagagctatagactacctgtattctggaattcctgagaatgtggaggctcagcctgttgcccgagcacctgctgctggccaacaaacaaatcagcaggccgcatcacccgctcagccagcagttgcattgccagtgcagccatcacctgcctctgcagggcctaatgcaaatcctttgaacctttttcctcagggtgttccaagtggtgggtccaacccaggtgttgttccaggtgcaggatctggtgctcttgatgccttgcgacagcttccacagtttcaagcactccttcagttagtccaggctaatcctcaaatcttgcagccaatgcttcaagagctaggtaaacaaaacccacaaattctgcggttgattcaggaaaatcaagctgagtttctccgcttggtgaatgaatctcctgagggtggtcctggagggaacatactaggtcaactggcagctgctgtgccacaaacgctgacagttaccccagaggaacgggaggctatccagcggctcgagggaatggggttcaaccgtgagcttgtgctagaagttttctttgcatgcaacaaggacgaagagcttacagccaactacctcctggatcatggccatgagtttgacgagcagcagcaatagacgtggggtggatggaggaaaccgaggcagttgcagaacagcgagtgtcgttcttatgctatgctgctgactatcttttatttccatatatatttgttcggaatgctttctaagtacatattaattcaatatcaagcgttacaccgtgtatgaaagcctgtcaaatcgtggcctttggtttggagggaaggattcgattgctcacttgttttctttgctctttttcctggcgtattgttgcattgtatcaatattatgagttttagggcgttttggattttctataatatataatatacataaagtatagtgcattgtaaaactaagaatctataaaagcta

SEQ ID NO: 80507 - DNA, 1936 bp, Zea Mays
cttttttttcccaaccgggcacacttccgtttacatctatcccctcagccagcggccagcgcacagcgcaaccgcctcaaaacacccgcgtgtgcgtgacagtgcagctagatccacccacaacctcgccaccactctccacgccttccgatccaatcacccgcccctttcactgacgccaggatcaatcaggcacggtcccacgggacagcgagaatatctaggtcgaccctgagagccagccgccaggcgctgatttctcttttgtagcctccggattttttttcgcctataattactcttccccgtgcgccctcgcgaggtcgaacccccaaggcgaggcgacgaaaccctcgccagtccccaactcgaacctcagtcaggcagcgtgaggagggagagttcaaggaccgaggcggcgtcgggcgagatgaagcttaacgtcaagaccctcaagggcaccaacttcgagatcgaggcgagccccgatgcatcggttgctgatgtgaagaggatcattgagaccactcaaggtcagagtacctaccgggcggaccagcaaatgctcatataccaagggaaaattctcaaggatgaaaccactttggaaagcaacggagttgctgagaacagcttccttgttataatgttgtccaaggctaaggcatcatcgagtggagcttctaccgctactactgcaaaagctcctgcaactctggcccaacctgctgcccctgtggcccctgctgcatcagttgcaagaacaccaacacaggctcctgttgccacagctgaaacggcacctccaagtgtccaacctcaggctgctccagctgctacggttgctgctactgatgatgctgatgtgtacagtcaggcagcttcaaaccttgtatctggcaacaatctagaacagactatccaacaaattcttgacatgggtggtggtacatgggaacgtgatactgttgttcgtgctctacgtgctgcatacaataaccccgagagagctatagactacctgtattctggaattcctgagaatgtggaggctcagcctgttgcccgagcacctgctgctggccaacaaacaaatcagcaggccgcatcacccgctcagccagcagttgcattgccagtgcagccatcacctgcctctgcagggcctaatgcaaatcctttgaacctttttcctcagggtgttccaagtggtgggtccaacccaggtgttgttccaggtgcaggatctggtgctcttgatgccttgcgacagcttccacagtttcaagcactccttcagttagtccaggctaatcctcaaatcttgcaggaaaatcaagctgagtttctccgcttggtgaatgaatctcctgagggtggtcctggagggaacatactaggtcaactggcagctgctgtgccacaaacgctgacagttaccccagaggaacgggaggctatccagcggctcgagggaatggggttcaaccgtgagcttgtgctagaagttttctttgcatgcaacaaggacgaagagcttacagccaactacctcctggatcatggccatgagtttgacgagcagcagcaatagacgtggggtggatggaggaaaccgaggcagttgcagaacagcgagtgtcgttcttatgctatgctgctgactatcttttatttccatatatatttgttcggaatgctttctaagtacatattaattcaatatcaagcgttacaccgtgtatgaaagcctgtcaaatcgtggcctttggtttggagggaaggattcgattgctcacttgttttctttgctctttttcctggcgtattgttgcattgtatcaatattatgagttttagggcgttttggattttctataatatataatatacataaagtatagtgcattgtaaaactaagaatctataaaagcta

SEQ ID NO: 80508 - DNA, 3741 bp, Zea Mays
ctcttttttcatatcactataaatctaatatatgtaatatgacaccttttgcagcctgattatattaccttattatacttgctctaatcagattaaaatcaattgttcgggctgctgcatctataatccatagagacaaaacactgtagaaacaacttctacagtagaagctgttttggattaaagccaagagaacagtagaagcctttacatttcttagagcccgcatatacactttattatagttgctctattcagcatgaccattattctggataggtatatactccctccatccaaggatgatctacctatatcccactcaaatcatgcgcaacaaccgtttcagaaattttcagcccacaacgtacatatagggcctgattggttaccctgatgagaccgaactcggctccggaggtacaacatctttatacgttctcgtgtttggttctccagcctggctctagcgatacaagttatgcttgtttggatgactgcatttatagctggacctggcttagatgatgcaaaactgataagtgagcttggctcataagatacaggatttatttgcgtttctctggagcctggctcacataaacctgctctagatcagccaggtcacgaagacacaagccaggatgtctccgtccgaaaaccaaacaggcccatataagtcgcctcttccacttgcacatgtacctcttcccattctcttctagtggatgggaagtgccgagccggagaccagaactgaagttgtactctagttttactgtgtacaagatcattaattgttcgcctgattggatgactgtacccacacgtacaatctcgcgcgagcctggccaaccgcgtacgtccgttttagacgtacgtgtggatgcagctaacataacttattttgcgtctgtccatgcagcctgcgcttcacacgtgcaaccaaccaaacacaaactcagataaagtcaacacacgtggtgacatgggacgagacggtgcagctaaccaatcatatggacatatgtatgcaaggaggagtcatcccaacgactcctatgcagcatgcgtgcatgcatgtaacaaggagttaacatgcagcacaaagaataggtagattatccttggactactttaacacttaaaatagatagtccagtcttggacggatcgagtatatcattatgatgtacaagtcaatgatgatagtcatagtgagtccgcgatgagtcgcccactgctgtgcatctagccctcagcacgatcgtaatgcatcatataagatgataaaattttggtaaacaacaaggaaagaggtgaatgcaccgagatttgcctaggataaaacactatgttaatgttgttagatgatactcgcttgacgaccatctcccgtcctagcactcgatcgaatcatccatcgttaggttcatcgaccagcatcactttgagatcaattcggttcttgtcctccacatcacgtgatcaactagtgtacctaatgaaatgtgtgatgcacatgaacgaatgcagataaaaatagcacaagataggtaatattacccgaagtatatcaaacgcttatagcaaggcatcacaattctaatacgaaaacactaaatacttttaactctctaacacaacaatcttgatcttccaggtactcggacctaattcaaacatctggcaacaacagccatacatacgttctatgccctccttagctaaagaataacaccgaacattaacaaaacatatattcattaatctaggatacctaggacttagaataacaaacaatagcatgtcaagtaactttagaattactccactaaactattatgcatagcataccaactaaacaagcatcgcatcatcacatatgatcgaatttccccaagactatacaatataaaaataaacatttgctaacaaggtaacacaacactcataaacaaatactagatgttgacataacactaagaataatatcaactttattctaacttaaccggatccgattcaaaaagcaagtatcaataaaccatgcataagcactctaccttgcttagacatacaccaatagactagtagaacttagggtcattattcctaggcacctaaaagttataataagggtaggaacattctatctaactttctataccactttccgaattaacttgcataggacaccaactaacacaacatcacttttctttcaatcaaacaagtagagcactatcgcacaacatagagttccatggaactacattctcaacaactaaagatctaaagcataaaagatgtaatagaggaagtgctccataatttcattagctagagcataacatcgataggttacttagacttgtcacctttgaacactcaaaacttagaatggtgatataactcatttactaactttctaaaatatttctgtaggctaacttgtataatactttgacttactaactttggatataaaaaatttaggataaggatgaaagcaatgcaattaaccatttaatccaacaagacctagagcaagtatcaataaagcaatacaccgtactcaaacaacaaggcatttcatcaaatgtttacttacatacgcataagaacataggtaaagctaattccaagtaacaagtatcatgatcacatctacttgaataacccactccccaaacaaaaacccaagcaatggtatgagaaggcctagagatccacaaatccataatgccaccttctgcttacaatctgtttgaaaaagataacacgtagataacatggacatgataaagtcaaaatgacaaaagacaaatgaatcataagtaaatatccaccctccatgattaacttaagtgaataacatagaagatgatattttctaagaaaaagcattcatgtcaccatacaatagaaatttacataagtaacactaatagttcttatcgacaaagtgctagaagtactatacatattctttgtattactaatttaaccatacctcttgtaagtctagcaatgtactaactagataggaatgtcacattctttgatttagtaactagagtattaccaaatattgcataactctaccgactacacttttagaagcaaaagacctaaagtgcctacatgctaaacataagtgggctaagaagacaatacaaatagcttaaactatattgctaatgaattatattatacaaacataaggtctattcactcttgcttcattgatatattcacttaaatactcctcaaaaaacagtcattttaaacctaagttttacatgttgcgactactccatatttattaacacgatcacatcaatgcaagaaatgaggcttctcaaccataactattagtctacccaaactcattacattcaacatatcatcacaaaaacaaggaaatgataggaaaggtcgttccttgcatgacactatgaaacatcatctagacaatagcaaggagtctagaaatcaataccgcaacacacctgctttacaaataaaataaacatcataggtagaacatctatccaatcaaccattcatgctaactaacgaggatagcaaaggagctcaccataactaaatcagactacggaaacgacgacgatttcgattcaaccattacgtcgagcaccaggtgtgcgatgcgctggagcttcttttcttcttctccacccaaccatcccaggagttgctcctctacaataacac

SEQ ID NO: 80509 - DNA, 521 bp, Zea Mays
tagattatccttggactactttaacacttaaaatagatagtccagtcttggacggatcgagtatatcattatgatgtacaagtcaatgatgatagtcatagtgagtccgcgatgagtcgcccactgctgtgcatctagccctcagcacgatcgtaatgcatcatataagatgataaaattttggtaaacaacaaggaaagaggtgaatgcaccgagatttgcctaggataaaacactatgttaatgttgttagatgatactcgcttgacgaccatctcccgtcctagcactcgatcgaatcatccatcgttaggttcatcgaccagcatcactttgagatcaattcggttcttgtcctccacatcacgtgatcaactagtgtaccataactaaatcagactacggaaacgacgacgatttcgattcaaccattacgtcgagcaccaggtgtgcgatgcgctggagcttcttttcttcttctccacccaaccatcccaggagttgctcctctacaataacac

SEQ ID NO: 80510 - DNA, 3744 bp, Zea Mays
cgctaggcaccgttgtggctgtgcggaactgcacaagagcgtttcgcctcggccaccacgaacggagaaggcggcagccatggccatggaggaagcggggaagatgacatgcaggaagaagggtggtctgagaacaatgcccttcatcttcgcaaacgaggtggcggagaagctcgccgtggtgggtttctcgaccaacatgctgacgtacctgaccactcagctgcacatgccgctggcgaaggccgccaccacgctcaccaacttcggcggcacctccgccgcgacgcccctcatcggtgccttcctcgccgacgcctgcatcggccggttctggaccatcgccgccgcgtccgtcgtctaccaagccggcatggcgctcctgacggtgtcagcggcgctgccgcggttccggccggcgccgtgcaagcccggcggcgcggtggcatgccaggaggccgcgccgtggcagctggcggtgctgtacgtgtccctgctcctgaacgcggtgggcgcgggcgggtaccgcccctgcatcgtggcgttcggggcggaccagttcgacgagtcgcgggcggcggagcgcgcgcggagctggggcttcttcaactggtactacttctgcaacggcgcgtccatgctgctggccgtcacggcggtggtgtacgtgcaggacaacgtgggctggggctggggcctcggcgtgccggccttctgcatgggcgtctccgtcgccgccttcgtggccgggtacccgatgtaccggaggctggagcccgcggggagcccgttcacgcggctcgcgcaggttgtcgtcgccgctgtcaagaagcggcggctgccggcggcggacgtcgaccccgcgttgctgtacgaggacgacgagctcgacgcgcccatctccattgcactgcactggtaaggatcggggcccattttttgtggtggtttgactggatggactgccgacaaccgacaacccataagaaattgccaagaaaggatcacggacagggtagatccaatcacaaggccatgtgaagtggcgccgaaaatggacaagtccgcaacggtacaatttctcgtgttgtccggtcttgacttggacactgagagaagaagatcataacgcacgggtccacgtttgtttgctcaagcaagcgtgattgcagtctcggttaattgtcacttgtcaatggtggatacaccctatcctgaaattcgtcgtggacactcaacagggagtcatattctaagctgtatttttctgtgaaattaaacttgtcactatggatcaaacataaattagtctgaatcatggatcagattcgaattttcgatagtataaactgccactccaaatttaagttcaactgacaccgtttgcagcttctttgaccgcgcggcgatcgtcaccgacggcgacctggtcacgctgacggacgcggactccggcaagccgtcgacggcccccgtcccggacctgtggcgcctgagcaccgtgcaccgcgtggaggagctcaagtcggtgatccgcatgggtcctatctgggcggcgggcatcctggtgatcacggggtcgtcgacgcagaacaccttctccctgcagcaggcgagcaccatggaccgccgcctcgcgccgggcctctccacgttcgagatccccgcggggtccatgaccgtcttcgggctgctggccatgctcttcaccctcttcgtctacgaccgcgcgctcatccgcgtggcgcgccgcttcacggggctggaccgcggcatctccttcctgcaccgcatgggcgtcggcttcgccatcagcgtgctcgccaccctggtcgccggcttcgtggagcggcaccgcagggacgcggcggcggcggccggcgccacggacgccggcacgtccccgctgtcggcctactggctggtgccgcagtacgcgctgcacggcgtggccgaggcgttcacctccgtggggcacctcgagttcatgtacgaccaggcgcccgagagcatgcgcagcacggcgacggcgctcttctggctgtccatctcgctgggaagctacgcgagcacgctgctggtggacgctgtgcaccgctggagcgcggggcccggcggcgccaactggctgccggacaacatcaatcacggcaagctggattacttttactgggtcgtcacggtactgcaggtcatgaacctggtgtactacgccatttgcgccaagcggttcacgttcaagccagtgcagctccacaagaaagaggaagaagaaggcggcaaggcacttgtggagttgcaagagaaggtttaatttgagcagcatgcactttcagctatgtgcaggtacatgtctaatagaaaggaagtactcatcagtgctaggaagatcctcagaaaaactcccaaggtattactatataaatctatgtgagcatcttcccctgtattagtcaagtagatcaagaatgcaggaaggttgttcaggcaagcaacctcagaaattgtcaaggatcacatgacagctttgtggatggcagaagctatctggtctggtcctgagacttggcacaggtgcaaaacacaactgactatatttgtaattagaaagcaggcacgaggcacatgtctgaactctgaaacttgacgttaatgcacagtactctgtttgtacattaggatctagggataaacacagagaggcaacagtcttcgaaagttgtcacgcaacacatttctcagtgacagaaatatttcgatctgaatcctggcatagcttattaatattccgacttggacactaggtagtaaggaaacaggtttatacccacaatctggcatgaattccaacccaagcagatagcaaagcttttcaggaattcaggtaaacagactacggtacattagatgtcgcctctgatctttaatcgcagattcgcagtagtagtgcacgaatagaccgttcaagaccgcgcggcgagacgcgaacctgtcgcgggacggggggtcagacggtgaacttgatctcgaagccggtggacggatccacgggctcggccgtggacgggacgacggcggtgacggtggcggctggggggccgacggggaggcggcgggttatcatgtcttcgatcttcgcggggtctccggagaggagggcctccacactgccgtcacggcggttgcggacccagccggcgaggccgagcgactcggccgtggacgcagtccagtcgcggaaccccacccccgtgacgcgccccttcaccaccacgcggactgccttccgtgcgggctccggctgcggcgcggatggtggcgtggcggcatcgggatcggcggaggacgccatggcgcggtggtgctggtacggttgtggacttgtggaagcagcgagactggagaccggagacggagagggacgagacgagacgagacggctgaagcaaggaactgctggaacattttggaaagtcaaggcctgccctagtaggacaacccaagcccggcccaaaaaaaatcgtgaccctgcgcggctgggtcgcactcgcggctcgtggcagaggctgtgatgggctacagttgtgggctttttaaccttcttttaaaaatgtgttattatttttctatattcgtagtgtcccttttccatggttacttctctccagcattgctacatatatttcttgcctttcggcttctgtcttttctatgcgttgatgtgcattatttccatttgcatgt

SEQ ID NO: 80511 - DNA, 2374 bp, Zea Mays
cacgggcccaatctgagaaccctagcaaagccagcccgtcaatttccatccccttcgcccgcccgcccaaccaccatgtctcgacgcggggcaatgccatccaccgccccgcgcgcgcggctctcgccgccggcacccgcctcccacccgccgcggaaacgtggccgctctccatcggctcctggaagcacggcgtcgtggcgcgcgtccgccgagaacaccgtgcccctctaccaccgccgccgctggcacaacccggagcgtgcccctggtcgcgtctggcagcggttccgcgcgccccagcctgccttactctcctccaggctttggatttgctcggaggacgcctcgacctcctcctccggagatgcctgcactatcatgtcatacaacatcttggctgattacaatgctcggaatcatcccgacctttatttggatgccccctgggatgcaatgaggtgggattcaaggaggcgacttattattcgtgaaattaggcactgggatcctgacgtagtgtgtcttcaagaggtggataggtttcaggacattgctgcaggaatgaagagcagagggtacgaaggtatatttcagaggcgtactggagatactagagatggatgtgccatattttggaagtcaaaacagtatggatgatgcattgccctttattatattcattcatccgaataaaatgcttaatggaacacacaaatttgtactcgggaatattcatgttttgtttaatccaaagcgcggtgatgtaaaactgggccagattcgcatgctacttgagaatgcaaatgctcttgctgaaaaatgggataaaattcccatcgtgcttgccggtgatttcaacagcacacctgatagtgctatctacaagttcttgtcgacaatgaagctgaacatttctttgcacgatagaaggcatttatctggacttgatagcactgaatttgggtatgagctttgtagcctgctcaagtatcaatggactgatgaagaagtgagaaatgccacagggtattcaaatgtcatggtggctgaacatccactgaagctcagtagttcatatgccatgttaaagggaaattcaaacaataggggtcttcatggtgaacccttggcaacttcctaccacaggaagtttcttggaactgttgattacctgtggcacactcatggaattgaatgctccagagttttggacacgttacctattagtgttttgaagagaacgaggggtcttccaaccagggaaattggcagtgatcatttgcccattgttgctgaatttgctttcacggaatcagttgaagatgattccgatgaagatgatgaatctgagcaagatgacgaatctgagtaagaaatgagcgaagcgcaatacttatttttctcctcagacagtgagtcccgttgaagtgactggagtgattcagtatttcagttggttaaaaaggttcgaggtaagttattcaagaacagggagtatggtgcaccagagactacattgcatctttcatggtccataaacagaatatctccggcttcattgcacaatgaatttctcggtatctttgcccgtgtactgtatgggatcctgctgttcacagaatcaagtatcacattgagcagaatcaagtaccacattgagcagaatcaagtacgtgctgctgtgtgaaaggcaagattgcaacgaagtgctctctgcaagtttgtacgaactaattagtacttacgaagaaccgtcaatttagtggacatatttattccgtatcagatggttaactacaatttttaaagaactggcaaacggccctgtcccattttccattaaaaaatatagaaaacaccacgacaaactcataaagggttacaacctaagatctatgactatattatgttaactggtcttattttattcattccatcggtacatgtaattatgatatgtctgctagaaccaaacgctctttttgtgtagaccttcacgagtaatcattgctttttatgtttttccgcttatcgtaacagcactttccgcaccggatgtccactgaagcacgggcctttgcgctcgtcgctgaacattatgctatggatctggatgttaagcttagtatcttggttcgtgatcagaaaaaccactgctgatggatgacgtgctctgcctgctggatgcctctgttcatgtattgtgttttattattatatatgtgtaggtgtaatgaaaataatttgagtgtggttgaagaggcaatagtgatttaccaaaagttttatagcgacacatcacacatattctgtgtggtgacagcatgataataagaccctgcgaaatagaagttgatttgttgtgttacat

SEQ ID NO: 80512 - DNA, 2123 bp, Zea Mays
cacgggcccaatctgagaaccctagcaaagccagcccgtcaatttccatccccttcgcccgcccgcccaaccaccatgtctcgacgcggggcaatgccatccaccgccccgcgcgcgcggctctcgccgccggcacccgcctcccacccgccgcggaaacgtggccgctctccatcggctcctggaagcacggcgtcgtggcgcgcgtccgccgagaacaccgtgcccctctaccaccgccgccgctggcacaacccggagcgtgcccctggtcgcgtctggcagcggttccgcgcgccccagcctgccttactctcctccaggctttggatttgctcggaggacgcctcgacctcctcctccggagatgcctgcactatcatgtcatacaacatcttggctgattacaatgctcggaatcatcccgacctttatttggatgccccctgggatgcaatgaggtgggattcaaggaggcgacttattattcgtgaaattaggcactgggatcctgacgtagtgtgtcttcaagaggtggataggtttcaggacattgctgcaggaatgaagagcagagggtacgaaggtatatttcagaggcgtactggagatactagagatggatgtgccatattttggaagtcaaaacagttacatctggttgaggaagatagtattgactttagtgaattcaatcttcgaaataatgttgctcaaatatgtgtttttgagcttaatggaacacacaaatttgtactcgggaatattcatgttttgtttaatccaaagcgcggtgatgtaaaactgggccagattcgcatgctacttgagaatgcaaatgctcttgctgaaaaatgggataaaattcccatcgtgcttgccggtgatttcaacagcacacctgatagtgctatctacaagttcttgtcgacaatgaagctgaacatttctttgcacgatagaaggcatttatctggacttgatagcactgaatttgggtatgagctttgtagcctgctcaagtatcaatggactgatgaagaagtgagaaatgccacagggtattcaaatgtcatggtggctgaacatccactgaagctcagtagttcatatgccatgttaaagggaaattcaaacaataggggtcttcatggtgaacccttggcaacttcctaccacaggaagtttcttggaactgttgattacctgtggtatgcctctaaatgtttgcctgcttgttgtatgtatacacaacgtgactgacattctttgtccaaggcacactcatggaattgaatgctccagagttttggacacgttacctattagtgttttgaagagaacgaggggtcttccaaccagggaaattggcagtgatcatttgcccattgttgctgaatttgctttcacggaatcagttgaagatgattccgatgaagatgatgaatctgagcaagatgacgaatctgagtaagaaatgagcgaagcgcaatacttatttttctcctcagacagtgagtcccgttgaagtgactggagtgattcagtatttcagttggttaaaaaggttcgaggtaagttattcaagaacagggagtatggtgcaccagagactacattgcatctttcatggtccataaacagaatatctccggcttcattgcacaatgaatttctcggtatctttgcccgtgtactgtatgggatcctgctgttcacagaatcaagtatcacattgagcagaatcaagtaccacattgagcagaatcaagtacgtgctgctgtgtgaaagcactttccgcaccggatgtccactgaagcacgggcctttgcgctcgtcgctgaacattatgctatggatctggatgttaagcttagtatcttggttcgtgatcagaaaaaccactgctgatggatgacgtgctctgcctgctggatgcctctgttcatgtattgtgttttattattatatatgtgtaggtgtaatgaaaataatttgagtgtggttgaagaggcaatagtgatttaccaaaagttttatagcgacacatcacacatattctgtgtggtgacagcatgataataagaccctgcgaaatagaagttgatttgttgtgttacat

SEQ ID NO: 80513 - DNA, 1942 bp, Zea Mays
cacgggcccaatctgagaaccctagcaaagccagcccgtcaatttccatccccttcgcccgcccgcccaaccaccatgtctcgacgcggggcaatgccatccaccgccccgcgcgcgcggctctcgccgccggcacccgcctcccacccgccgcggaaacgtggccgctctccatcggctcctggaagcacggcgtcgtggcgcgcgtccgccgagaacaccgtgcccctctaccaccgccgccgctggcacaacccggagcgtgcccctggtcgcgtctggcagcggttccgcgcgccccagcctgccttactctcctccaggctttggatttgctcggaggacgcctcgacctcctcctccggagatgcctgcactatcatgtcatacaacatcttggctgattacaatgctcggaatcatcccgacctttatttggatgccccctgggatgcaatgaggtgggattcaaggaggcgacttattattcgtgaaattaggcactgggatcctgacgtagtgtgtcttcaagaggtggataggtttcaggacattgctgcaggaatgaagagcagagggtacgaaggtatatttcagaggcgtactggagatactagagatggatgtgccatattttggaagtcaaaacagttacatctggttgaggaagatagtattgactttagtgaattcaatcttcgaaataatgttgctcaaatatgtgtttttgagcttaatggaacacacaaatttgtactcgggaatattcatgttttgtttaatccaaagcgcggtgatgtaaaactgggccagagtgctatctacaagttcttgtcgacaatgaagctgaacatttctttgcacgatagaaggcatttatctggacttgatagcactgaatttgggtatgagctttgtagcctgctcaagtatcaatggactgatgaagaagtgagaaatgccacagggtattcaaatgtcatggtggctgaacatccactgaagctcagtagttcatatgccatgttaaagggaaattcaaacaataggggtcttcatggtgaacccttggcaacttcctaccacaggaagtttcttggaactgttgattacctgtggcacactcatggaattgaatgctccagagttttggacacgttacctattagtgttttgaagagaacgaggggtcttccaaccagggaaattggcagtgatcatttgcccattgttgctgaatttgctttcacggaatcagttgaagatgattccgatgaagatgatgaatctgagcaagatgacgaatctgagtaagaaatgagcgaagcgcaatacttatttttctcctcagacagtgagtcccgttgaagtgactggagtgattcagtatttcagttggttaaaaaggttcgaggtaagttattcaagaacagggagtatggtgcaccagagactacattgcatctttcatggtccataaacagaatatctccggcttcattgcacaatgaatttctcggtatctttgcccgtgtactgtatgggatcctgctgttcacagaatcaagtatcacattgagcagaatcaagtaccacattgagcagaatcaacactttccgcaccggatgtccactgaagcacgggcctttgcgctcgtcgctgaacattatgctatggatctggatgttaagcttagtatcttggttcgtgatcagaaaaaccactgctgatggatgacgtgctctgcctgctggatgcctctgttcatgtattgtgttttattattatatatgtgtaggtgtaatgaaaataatttgagtgtggttgaagaggcaatagtgatttaccaaaagttttatagcgacacatcacacatattctgtgtggtgacagcatgataataagaccctgcgaaatagaagttgatttgttgtgttacat

SEQ ID NO: 80514 - DNA, 1879 bp, Zea Mays
ttcaaaggtggataggtttcaggacattgctgcaggaatgaagagcagagggtacgaaggtatatttcagaggcgtactggagatactagagatggatgtgccatattttggaagtcaaaacagttacatctggttgaggaagatagtattgactttagtgaattcaatcttcgaaataatgttgctcaaatatgtgtttttgagcttaatggaacacacaaatttgtactcgggaatattcatgttttgtttaatccaaagcgcggtgatgtaaaactgggccagattcgcatgctacttgagaatgcaaatgctcttgctgaaaaatgggataaaattcccatcgtgcttgccggtgatttcaacagcacacctgatagtgctatctacaagttcttgtcgacaatgaagctgaacatttctttgcacgatagaaggcatttatctggacttgatagcactgaatttgggtatgagctttgtagcctgctcaagtatcaatggactgatgaagaagtgagaaatgccacagggtattcaaatgtcatggtggctgaacatccactgaagctcagtagttcatatgccatgttaaagggaaattcaaacaataggggtcttcatggtgaacccttggcaacttcctaccacaggaagtttcttggaactgttgattacctgtggcacactcatggaattgaatgctccagagttttggacacgttacctattagtgttttgaagagaacgaggggtcttccaaccagggaaattggcagtgatcatttgcccattgttgctgaatttgctttcacggaatcagttgaagatgattccgatgaagatgatgaatctgagcaagatgacgaatctgagtaagaaatgagcgaagcgcaatacttatttttctcctcagacagtgagtcccgttgaagtgactggagtgattcagtatttcagttggttaaaaaggttcgaggtaagttattcaagaacagggagtatggtgcaccagagactacattgcatctttcatggtccataaacagaatatctccggcttcattgcacaatgaatttctcggtatctttgcccgtgtactgtatgggatcctgctgttcacagaatcaagtatcacattgagcagaatcaagtaccacattgagcagaatcaagtacgtgctgctgtgtgaaaggcaagattgcaacgaagtgctctctgcaagtttgtacgaactaattagtacttacgaagaaccgtcaatttagtggacatatttattccgtatcagatggttaactacaatttttaaagaactggcaaacggccctgtcccattttccattaaaaaatatagaaaacaccacgacaaactcataaagggttacaacctaagatctatgactatattatgttaactggtcttattttattcattccatcggtacatgtaattatgatatgtctgctagaaccaaacgctctttttgtgtagaccttcacgagtaatcattgctttttatgtttttccgcttatcgtaacagcactttccgcaccggatgtccactgaagcacgggcctttgcgctcgtcgctgaacattatgctatggatctggatgttaagcttagtatcttggttcgtgatcagaaaaaccactgctgatggatgacgtgctctgcctgctggatgcctctgttcatgtattgtgttttattattatatatgtgtaggtgtaatgaaaataatttgagtgtggttgaagaggcaatagtgatttaccaaaagttttatagcgacacatcacacatattctgtgtggtgacagcatgataataagaccctgcgaaatagaagttgatttgttgtgttacat

SEQ ID NO: 80515 - DNA, 1621 bp, Zea Mays
tgcattgccctttattatattcattcatccgaataaaatgcttaatggaacacacaaatttgtactcgggaatattcatgttttgtttaatccaaagcgcggtgatgtaaaactgggccagagtgctatctacaagttcttgtcgacaatgaagctgaacatttctttgcacgatagaaggcatttatctggacttgatagcactgaatttgggtatgagctttgtagcctgctcaagtatcaatggactgatgaagaagtgagaaatgccacagggtattcaaatgtcatggtggctgaacatccactgaagctcagtagttcatatgccatgttaaagggaaattcaaacaataggggtcttcatggtgaacccttggcaacttcctaccacaggaagtttcttggaactgttgattacctgtggcacactcatggaattgaatgctccagagttttggacacgttacctattagtgttttgaagagaacgaggggtcttccaaccagggaaattggcagtgatcatttgcccattgttgctgaatttgctttcacggaatcagttgaagatgattccgatgaagatgatgaatctgagcaagatgacgaatctgagtaagaaatgagcgaagcgcaatacttatttttctcctcagacagtgagtcccgttgaagtgactggagtgattcagtatttcagttggttaaaaaggttcgaggtaagttattcaagaacagggagtatggtgcaccagagactacattgcatctttcatggtccataaacagaatatctccggcttcattgcacaatgaatttctcggtatctttgcccgtgtactgtatgggatcctgctgttcacagaatcaagtatcacattgagcagaatcaagtaccacattgagcagaatcaagtacgtgctgctgtgtgaaaggcaagattgcaacgaagtgctctctgcaagtttgtacgaactaattagtacttacgaagaaccgtcaatttagtggacatatttattccgtatcagatggttaactacaatttttaaagaactggcaaacggccctgtcccattttccattaaaaaatatagaaaacaccacgacaaactcataaagggttacaacctaagatctatgactatattatgttaactggtcttattttattcattccatcggtacatgtaattatgatatgtctgctagaaccaaacgctctttttgtgtagaccttcacgagtaatcattgctttttatgtttttccgcttatcgtaacagcactttccgcaccggatgtccactgaagcacgggcctttgcgctcgtcgctgaacattatgctatggatctggatgttaagcttagtatcttggttcgtgatcagaaaaaccactgctgatggatgacgtgctctgcctgctggatgcctctgttcatgtattgtgttttattattatatatgtgtaggtgtaatgaaaataatttgagtgtggttgaagaggcaatagtgatttaccaaaagttttatagcgacacatcacacatattctgtgtggtgacagcatgataataagaccctgcgaaatagaagttgatttgttgtgttacat

SEQ ID NO: 80516 - DNA, 473 bp, Zea Mays
aggagacatcagcaagaggaccgaacacaaaataggatggctcagagattcaggatgccttacttgagatagttggcaggcgtactgtccctcaagtttttgtccatggaaagcacctgggtggttctgacgatactgttgactcctacgaaagtggaaaactggctagacttctaaacatcggagtcaaggacgacctttgagtgacatgctacatcggtcagcctgttcgtttggtttcaatccgtaccggcttctactacttctatattgtttttgtctctatggattacagctacaacagtctaaatagctgattttaatccgaagcgaacagtccaaacagtctcttgttttgagttaccaagggattttttgtgtgactctgataaaagatatgtaactgaatgttttattatagtttataccatttgaaccgtacttttattgctcgcccatcaagcattatgtcg

SEQ ID NO: 80517 - DNA, 2160 bp, Zea Mays
cattcaacttctctacatgagtctatatatatactatcgctcatagtattctctcattcttcccctaagcacgcacacagcagcacaggtctacatcaacatcggtagctcacattccctcccacggctgcactagcgccttcaattctatcgtatagcttcattcttcactggtgaacaaggcagtagctatagcagatcgatctccatggacatggacatgagctcagcttatccccaccattggctctccttctccctctccaacaactaccaccatggcctactcgaagccttctctaactcctccggtactcctcttggagacgagcagggcgcagtggaggagtccccgaggacggtggaggacttcctcggcggcgtcggtggcgccggcgccccgccgcagccggcggcggctgcagatcaggatcaccagcttgtgtgcggcgagctgggcagcatcacagccaggttcttgcgccactacccggcggcgccagctgggacgacggtggagaaccccggcgcggtgaccgtggcggccatgtcgtcgacggacgtggccggggcggagtccgaccaggcgaggcggcccgccgagacgttcggccagcgcacatccatctaccgtggcgtcaccaggcaccggtggacggggagatatgaggcgcacctgtgggacaacagctgccgccgggagggccaaagccgcaaaggacggcaagtctacctaggaggctatgacaaggaggagaaggcggctagagcttacgacctcgccgcgctcaagtactgggggcctacaaccacgaccaacttcccggtgtccaactacgagaaggagctggaggagatgaagtccatgacgcggcaggagttcatcgcgtcgttgcgcaggtgaacacacaagacactcacatcacatgccgcggcacaggactcaccgcgcgccggccgcatccttttccacacgtacacacgtcgccgttcgcgtgcatgcacgcacgcacagtcgcatgtgcctgcctctgcctgtcctgagcggctttccttggctcgctctcacatgttgaccctccgtgtgctctcgttcctaccccattttttttgtcaggaagagcagcggcttctcacgaggcgcctccatctacagaggagtcacaaggcatcatcagcacggccggtggcaggcgaggatcggcagggtggccggaaacaaggacctgtacttgggcactttcagtactcaggaagaggcggcggaggcgtacgacatcgctgcgatcaagttccgcgggctcaacgccgtcaccaactttgacatgagccgctacgacgtggagagcatcctcagcagcgacctccccgtcgggggcggagctagcggtcgcgcccccgccaagttcccgttggactcgctgcagccggggagcgctgccgccatgatgctcgccggggctgctgccgcttcgcaggccaccatgccgccgtccgagaaggactactggtctctgctcgccctgcactaccagcagcagcaggagcaggagcggcagttcccggcttctgcttacgaggcttacggctccggcggcgtgaacgtggacttcacgatgggcaccagtagcggcaacaacaacaacaacaccggcagcggcgtcatgtggggcgccaccactggtgcagtagtagtgggacagcaagacagcagcggcaagcagggcaacggctatgccagcaacattccttatgctgctgctgctatggtttctggatctgctggctacgagggctccaccggcgacaatggaacctgggttactacgactaccagcagcaacaccggcacggctccccactactacaactatctcttcgggatggagtaggtgcatgcgctgacaagctagctagctgaaatcaggtggtaggcctaggaagaagctaggactgacatggaactgatcacaattttggctgctacatataccatgcatgccccatgtatggatgggggtgcgtgtgcgtccttctgcttgctattcacgacacttgctgacttactgtggcagagccgcagagggctggtgtaccatcagcatttctaaattctaattatcaagctcgtttcaagctaattaagcaaaaaaaaaaaaa

SEQ ID NO: 80518 - DNA, 1925 bp, Zea Mays
cattcaacttctctacatgagtctatatatatactatcgctcatagtattctctcattcttcccctaagcacgcacacagcagcacaggtctacatcaacatcggtagctcacattccctcccacggctgcactagcgccttcaattctatcgtatagcttcattcttcactggtgaacaaggcagtagctatagcagatcgatctccatggacatggacatgagctcagcttatccccaccattggctctccttctccctctccaacaactaccaccatggcctactcgaagccttctctaactcctccggtactcctcttggagacgagcagggcgcagtggaggagtccccgaggacggtggaggacttcctcggcggcgtcggtggcgccggcgccccgccgcagccggcggcggctgcagatcaggatcaccagcttgtgtgcggcgagctgggcagcatcacagccaggttcttgcgccactacccggcggcgccagctgggacgacggtggagaaccccggcgcggtgaccgtggcggccatgtcgtcgacggacgtggccggggcggagtccgaccaggcgaggcggcccgccgagacgttcggccagcgcacatccatctaccgtggcgtcaccaggcaccggtggacggggagatatgaggcgcacctgtgggacaacagctgccgccgggagggccaaagccgcaaaggacggcaagtctacctaggaggctatgacaaggaggagaaggcggctagagcttacgacctcgccgcgctcaagtactgggggcctacaaccacgaccaacttcccggagctggaggagatgaagtccatgacgcggcaggagttcatcgcgtcgttgcgcaggaagagcagcggcttctcacgaggcgcctccatctacagaggagtcacaaggcatcatcagcacggccggtggcaggcgaggatcggcagggtggccggaaacaaggacctgtacttgggcactttcagtactcaggaagaggcggcggaggcgtacgacatcgctgcgatcaagttccgcgggctcaacgccgtcaccaactttgacatgagccgctacgacgtggagagcatcctcagcagcgacctccccgtcgggggcggagctagcggtcgcgcccccgccaagttcccgttggactcgctgcagccggggagcgctgccgccatgatgctcgccggggctgctgccgcttcgcaggccaccatgccgccgtccgagaaggactactggtctctgctcgccctgcactaccagcagcagcaggagcaggagcggcagttcccggcttctgcttacgaggcttacggctccggcggcgtgaacgtggacttcacgatgggcaccagtagcggcaacaacaacaacaacaccggcagcggcgtcatgtggggcgccaccactggtgcagtagtagtgggacagcaagacagcagcggcaagcagggcaacggctatgccagcaacattccttatgctgctgctgctatggtttctggatctgctggctacgagggctccaccggcgacaatggaacctgggttactacgactaccagcagcaacaccggcacggctccccactactacaactatctcttcgggatggagtaggtgcatgcgctgacaagctagctagctgaaatcaggtggtaggcctaggaagaagctaggactgacatggaactgatcacaattttggctgctacatataccatgcatgccccatgtatggatgggggtgcgtgtgcgtccttctgcttgctattcacgacacttgctgacttactgtggcagagccgcagagggctggtgtaccatcagcatttctaaattctaattatcaagctcgtttcaagctaattaagcaaaaaaaaaaaaa

SEQ ID NO: 80519 - DNA, 2328 bp, Zea Mays
atgcccgccgtggacaccctcgaactcgttaccggctcccccaccgacattgcggccccatcagtgatctgtcccccaccaacccttccaccacgccgcggcggtataataacccggcttcctccccaattccgccactcctcagctcaggcgagcagcggagccgagcagagcctcgagatcccgcccaccatttgccctccggccgacgcggagccgatcgcttcaccggcagcgaggacgatgggttccgtcgcggaggactccaccgcggcagcggcagcagcggcgtcggtagtgttccgctccaagctacccgacatcgagatcccgcggaacctctcgctgcaggcctactgcttcgagcggctccccgaggtgtcctcccgcccctgcctcatcgacgggcagacgggcgccgtgcacacctacgccgaggtggaccgcctgtcgcgctccgcggcggcggcgctgcgcgggctcggggtgggcaggggcgacgtggtgatggcgctgctccgcaactgccccgagttcgccttggtcttcctcggcgcggcgcggctgggcgccgccaccaccacggccaacccgttctacaccccgcacgagatccaccgccaggcggccgcggcgggggccagggtggtcgtcaccgaggcctgcgccgtcgacaaggtgcgcgggttcgccgccgagcgcggcgtgccggtggtcgccgtcgacggcgccttcgacgggtgcctggagctgcgggccctggtggacgccgccgagccgctcgccgccgacgaggaggtcggccccgacgacgtcgtcgcgctgccctactcctccggcaccaccgggatgcccaagggcgtcatgctcacgcatcgcagcctcgtcaccagcgtcgcgcagcaggtggacggcgagaacccgaacctgtacttcagcaaggatgacgtggtgctgtgcgtgctgccgctgttccacatctactcgctgaactcggtgctcctggcggggctgcgcgccggctgcgccatcgtgatcatgcgcaagttcgagatcggcgcgctggtggagctggtgcgcgcgcacggcgtgaccgtggcgcccttcgtgccgcccatcgtggtggagatcgccaagagcccccgcgtgggcgccgccgacctcgcctccatccgcatggtcatgtccggcgccgcgcccatggggaaggacctccaggacgcgttcatggccaagatccccaacgccgtgctcggccaggggtacgggatgaccgaggcggggcccgtgctggccatgtgcctggccttcgccaaggagccgttcgaggtcaagtccggctcctgtggcaccgtcgtcaggaacgcggagctgaagatcgtcgacccagacaccagcgcgtcgctgggacggaaccagccaggcgagatatgcatccgcggcgaacaaatcatgaaagagaagaacagagccctctccacaagttgcggacggtccgctcacgcaaagagtacctcaagtcctcgctccctacaagcgagatcacggttatctgaatgatccagaggcgacaaagaacaccattgataaggacggatggctgcacaccggggacattggttatgtggacgatgacgacgagatcttcatcgttgacaggctgaaggagataatcaaatacaagggcttccaagtacctcctgcggagcttgaagcccttctcatcacacatcctgaaatcaaggatgccgctgttgtctcgatgaaagatgaagtcgccggcgaagtcccggtggcattcattatacgcagtgaaggctctgagatcagtgagaacgagatcaagcagtttgttgcaaaggaggtcgtgttctacaagaggatcaacagagttttcttcacggattctatcccgaagaatccctccggcaagattcttaggaaggacctgagagcgcggcttgccgcgggcatcccaagcagtgacaacacacagtccaaaagttgatacgtactttcgtactattcttttctagctgtgccaaaaatcatgctgtgctctattcatgagatggcaatggtatacacaaaacgccaagcggtcgttatcgattcttctagatgggcaagggtaaggtatacttcgtttgtgtccgacatattatgtatttgtatcatgtatagatacgttttgttgacaacaagtgctaattataatgtataccatgtttgggaacctattgttcttgttaataaagagtcgacccctgtcctgaattgcgtttgctctctgttacataaatccatatccgctttggtaaaataaag

SEQ ID NO: 80520 - DNA, 1048 bp, Zea Mays
cgcctttacgccggcgctctgtttgttcgcccgcgcctgatggaggcgctagtgtggtgtggtgaaaggggtacgggatgaccgaggcggggcccgtgctggccatgtgcctggccttcgccaaggagccgttcgaggtcaagtccggctcctgtggcaccgtcgtcaggaacgcggagctgaagatcgtcgacccagacaccagcgcgtcgctgggacggaaccagccaggcgagatatgcatccgcggcgaacaaatcatgaaaggttatctgaatgatccagaggcgacaaagaacaccattgataaggacggatggctgcacaccggggacattggttatgtggacgatgacgacgagatcttcatcgttgacaggctgaaggagataatcaaatacaagggcttccaagtacctcctgcggagcttgaagcccttctcatcacacatcctgaaatcaaggatgccgctgttgtctcgatgaaagatgaagtcgccggcgaagtcccggtggcattcattatacgcagtgaaggctctgagatcagtgagaacgagatcaagcagtttgttgcaaaggaggtcgtgttctacaagaggatcaacagagttttcttcacggattctatcccgaagaatccctccggcaagattcttaggaaggacctgagagcgcggcttgccgcgggcatcccaagcagtgacaacacacagtccaaaagttgatacgtactttcgtactattcttttctagctgtgccaaaaatcatgctgtgctctattcatgagatggcaatggtatacacaaaacgccaagcggtcgttatcgattcttctagatgggcaagggtaaggtatacttcgtttgtgtccgacatattatgtatttgtatcatgtatagatacgttttgttgacaacaagtgctaattataatgtataccatgtttgggaacctattgttcttgttaataaagagtcgacccctgtcctgaattgcgtttgctctctgttacataaatccatatccgctttggtaaaataaag

SEQ ID NO: 80521 - DNA, 1019 bp, Zea Mays
ggcgagtcccaccacggatgccggtgcacctacatcgttgggtacgggatgaccgaggcggggcccgtgctggccatgtgcctggccttcgccaaggagccgttcgaggtcaagtccggctcctgtggcaccgtcgtcaggaacgcggagctgaagatcgtcgacccagacaccagcgcgtcgctgggacggaaccagccaggcgagatatgcatccgcggcgaacaaatcatgaaaggttatctgaatgatccagaggcgacaaagaacaccattgataaggacggatggctgcacaccggggacattggttatgtggacgatgacgacgagatcttcatcgttgacaggctgaaggagataatcaaatacaagggcttccaagtacctcctgcggagcttgaagcccttctcatcacacatcctgaaatcaaggatgccgctgttgtctcgatgaaagatgaagtcgccggcgaagtcccggtggcattcattatacgcagtgaaggctctgagatcagtgagaacgagatcaagcagtttgttgcaaaggaggtcgtgttctacaagaggatcaacagagttttcttcacggattctatcccgaagaatccctccggcaagattcttaggaaggacctgagagcgcggcttgccgcgggcatcccaagcagtgacaacacacagtccaaaagttgatacgtactttcgtactattcttttctagctgtgccaaaaatcatgctgtgctctattcatgagatggcaatggtatacacaaaacgccaagcggtcgttatcgattcttctagatgggcaagggtaaggtatacttcgtttgtgtccgacatattatgtatttgtatcatgtatagatacgttttgttgacaacaagtgctaattataatgtataccatgtttgggaacctattgttcttgttaataaagagtcgacccctgtcctgaattgcgtttgctctctgttacataaatccatatccgctttggtaaaataaag

SEQ ID NO: 80522 - DNA, 3211 bp, Zea Mays
gttcgtggttcatcgaactaggaatgcaagtgggcaagtgccaaggaactgagcccatccaggttcatgatcaactggtactttccttgctctctctcagggaaaaaaaaccacagtccgccagtccatccatagaccatagtccaaaaggcaaggtgaggttgcaccttgaggtcgttctatcaataatcaatccatccatagaggcaaggtgaggttgccaagggggcaagtgcgtggtcacaaaagtgagacaccggatgagcttgctgtgtccattgcactcttcacctgaagtgcgagctgtgaaccttggtgacctcccaagaggcacctcaccccctcaaggcagggatcacatgtattaaatttcaaaaaaaaactctattattggtgccaactgtgctgaattttcttcatcacgtaaacaaagcacattctgaaagcaaaatgttcatgtgagggctaggactcggcaagtttagaaattttcaagcaaaagacgcgagagaaggccaaattcttttggcctatatgaagttgaggtgtctgaaacgagagatctcattctcatcactcatcaggctgcctctgtcaatgggtcaccactcatccaagcccccccatccttgcaagttgtcggtccagccagccacatagagacatataatcacatagataaggcgaattccacggtcccatccaattgcttgcttcagacttcagaggctagaggcaatagttctctctcccggtcccggggaaagccatggaggaagagcagagcccaaggctgggccgggatccggcgaccgagcccagtcctgcgccggaatggccggattcggacagcaagaacgacgacagtgcgaacgacccggaggaccctgccggcggcagcggcagcggcagcggcaacggcatcagctccttggagcagccgctgctcaagcggagcaccaccctgacggccagccacctggccatcgtcggcgccaaggtctcccacatcgagagcctcgactacgagatcatcgagaacgacctgttcaagcacgactggcggagccgctccaacgtcgaggtgcttcagtacatcttcctcaagtgggccatggcgttcctcgtcggcctcctcaccggcgtcatcgcgtccctcatcaacctcgccatcgagaacatctccggcctcaagatgctccagatggtcaacctcgtccgcgggaagcgctactgggcgggcttcctctacttcgccggcgtcaacttcgcgctcaccttcgtcgccgcggtgctctgcgtcgtcttcgcccccaccgccgctggccctggcatccccgagatcaaggcttatctcaacggcgtcgacacgcccaacatgttcggcgcgccgcagctcatcgtcaagatcatcggcagcatcggcgccgtgtcgtcggggatggatctcggcaaggagggcccgctggtgcacatcggcgcgtgcctggccaacctgctcagccagggcggcgagggccggtggcgcctgcgctggcggtggctgcgctacttcaacaacgaccgcgaccgccgggacctgatcacgtgcggcgcgtcgtccggggtgtgcgcggcgttccgcgcgcccgtcggcggcgtgctgttcgcgctggaggaggtggcgacgtggtggcgcagcgcgctgctttggcgcaccttcttcagcacggccaccgtcgtggtggtgctgcgcggcttcatcgaggtgtgcagggacgggcgctgcggcatgttcggcgagggcgggctcatcctcttcgacgtcagtgacgtcaccgtccgctaccacgtcggcgacctcctccccgtcacgctcgtcggcgtcctcggcggggtcctgggggcactctacaaccacgtcctccaccaggtgctccggctgtacaacctgatcaacgccaagggccggctggcgaagctggcgctcgccctcgcggtgtccgtgttcacgtcggcggggctgtacctcctgccgttcgctgtgccgtgcacgccgtgcgacccggcgttcggcgacgcgtgcccgacggtgggcaagtccggcaacttcaagcagttcaactgccccaccggctactacaacgacctggcgtcgctgctccacgccaccaacgtggacgccacgcgcaacatcttctccacgggcaccgccggcgaattcaggctcgactcgctgctcatcttcttcggcatctactgcgtgctggggctcttcaccttcggcatcgctgtgccgtcggggctcttcctgcccatcatcctcatgggctccgcctacggccgcatcctggcgctcgtgctcgcgcgcttcgtgaggatcgaccacggcctctacgccgtgctcggcgccgccgcgctcatgtcgggctccatgaggatgaccgtctcgctgtgcgtcatcttcctcgagctcaccaacaacctcctcctgctccccatcaccatgttcgtgctgctcatcgccaagacggtgggcgacgctttcaaccccagcatctacgagatcatcctcgacctcaagggcctgccgttccttgagcccaagccggaaacgtggatgaaggacctcgcagtcggcgagctcgcggccgccaagccgcgggtcgtcacgctgcaggtgatcgagaaggtgtccaccgtcgtggaggtgctgaggtccacgccgcacaacgggttccccgtgctggactggccgcggccaggcgtatcggagctccacgggctggtgctccggtcccacctgatggccgtgctcaagaagcggtggttcctgacggacaagaggaggacggaggaatgggaggcccgtgagaggttctcgtcgacggagctcgcggagaagtccgggagtatcgacgaggtggcggtgcagctgacgccggaggagctggacatgtacattgacctccacccgttcaccaacaccacgccgtacaccgtcgtggagaccatgtcggtggccaaggccgtggtgctcttccgcacctgcgcgctccggcacatgcttatcatcccaaagttccaagggcctgagatagctccaatcgtggggatcctaacgaggcaggacctgagggcacacaacatccttggtgcattccctcatttggcaaacaaaaggaaagtacactaagctctgtcgcgccatttttgaagagcccgttgctga

SEQ ID NO: 80523 - DNA, 630 bp, Zea Mays
ccgattccgagtttttctatcgattccgtttccgtatttttagtaaccgtttctgtttagactaaaattttagtaaaatttcaaaaacaattcccagtattcaaaaattacggttttcgctttcatccctaccgacgcgtgccgtgggaatgcgacgtcggccgggccaggtctcccatggaagcaggccactggttcctgacgtgcacagactactcgcgttgaaaccaaaccatccacttaaatgcaccatctttagtactctttttttttattctttattctcgtttccctattctcgtagtcttccattactctatagttccaccgtccaccgtcgtcctgcgtcgtcatttggttgtccaagacaagccatgagaaagtatctaaaaccaatacgacacaaagtcgtatgcagagagctctcggatagtaccagtaccatctcgcctagttgaaggaaaacaagcggttaagcaagcaataagagatatatatcttttcaactcataccttttaactaaaataaagcgcaaccctatcagatatgtgggtcatatgtccactttaataaatacagtatttatgatttaatatctagtatgcgaaccattcgtgtttagtttcttt

SEQ ID NO: 80524 - DNA, 1323 bp, Zea Mays
gttatatttgctgaagctcccaaatcccaatcacagattgaaaagacgtagaagactaaaaaggagatctcaaatctctacaaataagttggcacaatatcaaacaattacttgcttggatgaaaaacaataaacacatattgtatctaggataatatatcataataacaaaatataaatactcgtccgaaatttaagttgagataaggggtaacagattggtgctgacccgatagaattttctgacttctccaattccccttttcaattcagcaactctctgaactctgcttgtgaagctcttcgaaccatgcactgcatcaaagcaaataggcagaacaaggtgctaaacagacgtgaacatgtaggttggtcaatgcaatagcaatgcaacctgtcccttgaggtgcatcagccactgtgtccatcgactcctccaccatcacaaggtcaatcagaccaattagagacaatgccattccaacaaacatggtgcagcaccccatcatccttgacaccagcatggttcttaaggtggtatggtgaggcaagaaaaatggccaccgcctggacgcctaggcaaggtaggcgagcaaggcgcctcgaattgcttgagcgcctggacgcctaggcgacgcctttaaaacactggacaccaggggcactcgcgtccttagtcgccaagtagaattagccacccgctgagatgacctctctggtcaaggagcctgagaggtgggcagacaagccatctaatccaaggatgatggggcctggtttgcactgatagagttaggttatgccgtcatgccagggatgatggagtctggtttccacgtggtaaaggcaacagcaagaaacattgatagcaagcatgtgcattgttatcttttttctgaaactgtaaaagagctattcatatatgatgcatatttggattcttcagcccttgtcggggccagaacctagaagtacctggaaatatcaaggccatttcttagcaccttttgcgcacgtaactttgctttcttctggatacatctcataagtctttttgagttcacaggaaaaagaatgaagtcaacccatcagagaacaattttcatatacactaataaatagtgccatacttaaaattacttggtcttaagattatattaacttcgattgccatgggaaaaagccatggtgctatatacctcttcatggagttcagaaacaatcatcataggtatgtcctgagtgacagctccgacgaactgaacaacatagtacagtgtcgaaccttctccagtacagttagttcatgcctgaaagagtttc

SEQ ID NO: 80525 - DNA, 1911 bp, Zea Mays
cgaggaaggttctaataatccttttaagataacagaattattagtcaactcaataaaataagtactaacactcccagtctggattcatcttgggctcttggctatgactgttcgaccattgtctctcaccaaccttagcagtgttgaagcactgcatatattattatttttttgtggcaaatgagtcactctagcaaacggtagcttccaaaagagatgaaatagaagtgcatacctatccaaaccaatggtgggctcatctaggatgaccaacctaggcttcatcagcatctccatggccatgctgaccgtcctcacatcgctgccacctgatcacccgcagtgtgcccatcgttcagtttcctcttcttatctcacaatatccacaacatataaaaaatatgagatcaggcaagagaacatgaaactcattgaaatacaacaaaaccaacaccaattgtaattgcattaactactggatttggttcatgaacgagaataggcccctcaaccaaaagctgttgtatgctatataaaaaagagattgtcgatcatctaaagtgaaaatgatctatagatgacctagacatatataaataaagatgccaaacatttcaaatgaagtttttttcatgaaactatatggtggtgcttcagtgcttgtagcttaacataagttgaatggatcattataacatcagtcagaacaaaacaacttgtaaagaacaaattagtaagttatcctagcataatgttaaagttaagctctttgccactcggaaaaaaagatattagtcatctacagaagtaggtgtattatgcaacaatatatgaaggcttcataaacaagcactcagaaatccttaggagcccaggacgtcctccacttctcatatcagatatgcctgcattgtgcctgtcattttttaagcttttcttgagaagttaaggcagctatatgataggttttgcactttcttgactaattacattttaaatatcataatttatgatggtctttagacatagtaatcaggggagaagtttatagttatttatttatgctacaacatttgtcacacaactgaacattataaacaatataagaaccaaccaattaaccaacagaatgtaagaaatttacctaagaagatctagtaaagtgctctcgtcgtcgatggcaatagtaatttccacatcggtatcacgtcctcacaccaccactgcactcgatggcgatgttgtgcacgtcgccctggtcgtggaactgtgcctcggccatgaaccaccactgcccaaatacgtgtccctgtcatgccataggaaatgcttgtgtctcgcagttgcagataacctttctatgtttctgcacagctattgtttcagttacagttacagtatgacacaagcatccacaatcttaaataatctaaatgtaatgcaagaggcaacatgataatgaccttactaaatagcatggatttattttagcagatacataatcatgaatttgtccagattcaatgaacttagtctagcaatattgtaaattttatgagatttgtggactgcacagatccggagtgagaaaagatataaataaactaattagtgaagttttcaaaaactatcgcaacatcaatttccaattcaggtttaagttaatacttttcatttaggcgatttagatccaggataacatcttttataatcatgcagttttagcatacagatgaagccctggaatcagatatgaacacaacgagctgtcgggcatcatatacaaacaaaaagaaaaacaaagcaaagcatataacccgaacaatctgatgaggaagagggcatgtgactcaccttcatagcttgaaggacagaagtcacgctgctgaagaggcgccaatctggtctgag

SEQ ID NO: 80526 - DNA, 1940 bp, Zea Mays
ccatcaccaagccgaaccgagaccgagagagcttccccacacccacagcggggtgcagcggatcgcgccaaattcgaccgaacaatcgcgcgccactcggccccgccactatgagcttctcgtccatgagcaaacagcaggtgctggacgccggtgacggggagggggaagaggtcgtggagcttatcccgggcctgccggaagaggtggccgagaagtgcctcctccacctgcccttcctctaccaccgtctcttccgcaccgtctcctccacctggaaccgcttcctcaccgactcccctgccaagccgctgctgttcactcccgcggagggggcgggggctggcgcggggagcgcagccatgggctcgttgtccttatcgctgcccttcctcttcgccttcgcgtttgaccctgtgtcgcgacgcctccagtgccaggcgctcgaccctttctcgaggaggtggctcctgctcccgccggtgcccggcggcgccgcggccgggtcgtttgcggtggtggggctcccccgccgcggcgagatctacgtgattgggggcgtcgaggagggcagcgacaaggcggtgacgagcgtggccgtgtacagcgccgcgcggaacggatgggaggaggcggcggcgatgcggacgccccgcgggtacatggcggctggggaggtgggagggcgggtggtggtggccggggaggacggcgaggccgaggtgttcgacccggatgccgggcggtggtcgccggctgcgccgcgccggggcgcggcggtggcgtggtacgacgcggcggcggcgggtgggaagctgtacgtgacggaggggtgggcgtggccgttcgagcgcgcgccgcgcggcgccgtgtacgactccgccacggactcgtggtgcgagatggcgcgcgggatgcgggaggggtggacgggctcttgcgccgtcgccggcggccggatgtacatcgtggcggagtacggggagtggcggctgaagcagtacgacgaggcccgggacgagtggcggatggtggccggcagcggggtgccccccgaggtgcgccggccacacgtcgtcgccggggagatcggggaggtcgccggtgggaggcgaaggatatacgttgttggcgccgggctggacgtcgccgtgggcactgtttcggcctcagacaccgccgcggcacccggcgtccacggcgtcgaggaggaagtggtggagtgggaggtggtcaagggccccaccgagttcgtcgggctcgcgccctgcaacgcacaggtcctctacgcatgacccagccttcgggtagaacaaacatctgcatcgccgaaccaagacgtttcggcccactccgcgcacccacacgggtccacaagccccgagccacatcacgtcgcccctggctggtccacatgtcagtgaaacttgactgctccagcgtctcgccggcaggagcgagtgccctgctgccagactgcccagatggattttccggatgcgcaagcacatgtattcacagtcacaggcagcacagtctcgccacgtgggaccagtctgtgagcgagcagtgatgggacttggaagaggctgagaagtcttttccacctcggggaaaggacaaaggaggaagcgagcaggcaggacggattatttttctttccgttttgatttgaggtttttcttgtacctgtgtatatattatatattggtattgtattttgagaaacaatggagaagaaaccaaaatcaaaaaaatgtgatgtaatgatttgaaactgacctcagttccagcttgcaaaagaacgtgatgtaagcctctcaacctatgtactctaaatttcttttcctctagactagttgtcatccacaaaatcgaagtaaattgtaggaactaaaattgcgtttttatccaattttaaataagaaatgaattttaac

SEQ ID NO: 80527 - DNA, 606 bp, Zea Mays
atgggctatataacacatgaggcacgtctacacttcattcatcacttccacctcttcataccacaaacagtaatggatccctttattaagtccaatgttctcttgcacatggctcaagacatggaagctgatgacgacgaacttgagttagcgaccatccgctatgtaaggagccgccgtgaacgcaaccagcatcgacatggtggttccgttccgggccgagttcggatcccccgaaaccattttggcggtaacttgaggatcttagccgactatttcttagatcatccagtttacacagatgcccagttccaaaggaggtttcgcatgcattgccatgtgttcgagcgcctcatggggacagtccaacaggttgacccgtactttgtatagcgtccaaactgcgctggaaagatgggactctccgctttgcagaaggtgtggccgtgcatgtatccgaattgaaggtagtgtgttgtgtctctattgctccaagtgaaatgtgtggtccttcatggaagctttacaagtaccaagtatttgcatacccagccaactactacgttcatgaacataaattaaaagaaagctctagattgattttct

SEQ ID NO: 80528 - DNA, 764 bp, Zea Mays
ccaagttgctgccgtcgcgtcggtcgtcgactcgtcgtgatcgcgggcagcgcagtagctgccgcgtccttgggtccgtgcctgggtggcggaaaactcgtacgcgtacggccaaacaagctcgaagaatcaccggagccggccgctggccagatccaatccaacaagaaccggatggaccgagcttcacggcaatcgtttcgaaatccggccacgcggccgtggcatgttgtaacacttgaaccaaagcacgacgagcccgaaccgattcccggttgcagtgaggggtattacttcgccttcgtttcaaaataattgccacaaagaccattctttcctcaagttcctgtggctgttcctggccacattcaccctgtgcagtagtactcctgcatggatgcacaagcacaaagaccattctttccgatcgtgcaccgcccacttttgttggtcaaagcatccaacatccagcaccattgcaacacgatgaggggcggatcaatggcacttttgtggtgtcaaattctggactggattgagtggttcactgttttctggtctggaaccgtttccgacttggaaccttcaaggcaaccgaacacggggacgccacatcctggggacgatatggccaccatggtgacaccgtcggcgatggaaattgaggtcttatttacgtagtgtagtttaaagtagaaaacgctgtaggcattccatggagaggcgaagccttattgctgcgtgccaagttcgggacgatgaag

SEQ ID NO: 80529 - DNA, 1884 bp, Zea Mays
cccgcttcaggttccattcctcatcaccaagccgaaccacagagctcccccacacccacagcggggtgaagcgaatcgcatcaaattcgaccgaagaatcgcgccgctcggcccggccaccatgagcttctcgtccatgagcaagcagcaggtgctggacgccggtgacggggagggggaggaggtcatggagctcatcccgggcctgccggaggaggtggccgagaagtgcctcctccacctgcccttcctctaccaccgcctcttccgcaccgtctcctccacctggaaccgcttcctcacggacgccctggccaagccactgctgttccctcacgcggcgggggcggggaccgcggccacggggtcggtgcccttcctcttcgccctcgcctttgaccccatgtcgcggcgcctccagtgccaggcgctcgaccgtttctcgaggaagtggctcctgctcccgccggtgcccggcggcgccgcggccgggtcgttcgcggtggtggggctcccccgccgcggccagatctacgtgattgggggcgtcgaggagggcggcgacaaggccgtgacgagcgtggcggtgtacagcgccgcgcggaacgggtgggaggaggcggcggcgatgcggacgccccgcgggtacatggcggccggggaggtgggagggcgggtggtggtggccggggaggacggcgaggcggaggtcttcgacccggaggccgggcggtggtcgccggccgcgccgcgccgcggcgccgccgtggcgcggtacgacgcggcggcggcgggcgggaagctgtacgtgacggagggttgggcgtggccgttcgagcgcgcgccgcgcggcgccgtgtacgacgccgccgcggactcgtggtgcgagatggcgcgcgggatgcgggaggggtggacgggctcctgcgccgtcgccggcggccggatgtatatcgtggcggagtacggggagtggcggctgaagcggtacgacgaggcccgggacgagtggcggatggtggccggcaccggggtgccccccgaggtgcgccggccgcacgtggtcgctggcgagctcggggaggtcgctggcgggaggcggaggatatacgtcgtcggcgccgggctcgacgtcgccgtgggcacggtttctgccgccgcatccgccgccgccgcggtacccggcgtcgaggacgaagtggtggagtgggaggtggtcaagggctccgccgagttcgccgggatggcgccctgcaacgcgcaggtcctatacgcttgaggcgccgccggaccccgccttcgggtagaacgtccgcaaaccgatggttcggtaccagtcggcgcacccacaggggtccaccagccccgtgccgcatcacgtcgccggcgaagcgcatacctagcccacatgtcagtggaacgcgacggctcccgctccatcgtctcgccggcaggagcgagtggcttgctgttcctgttcctgctaggagagaagtatatagatgacccagaagaaaccagatgcgcaaacgcagctgcacaggctcgcaagtcgcaacgtggtggtctggtggacgagtgtgtgaaccgtgagcgagcattgatggcactagagaaaggctgaaaaatcttttcttccatgtggggccgaggaagtgtgcaagcagtagaacttatttttcttttcaggcttttttttacctgtgtatattggattttggtaaagactttatttgcgttcgtcgcaatgcacaaacatccggatcgaaccgtacatctaaaatcgtagagctgaggccaatgttcctaccttatgttcagtgtactttggagaggattccttctgctacgatccttatggactagtttgagaattttattttc

SEQ ID NO: 80530 - DNA, 1424 bp, Zea Mays
gctgcgctgcctccctccactactacgccagccactctgccttccctcccccaccaccacaagaaccgcttcaccattgccgcgtccagctgagcctcctcttagccgcgtccagccaggagaaggcgggcgcgcacacctgctgcttggtgaccacgttcgatggagctgcacaagtactggggcgtggggggccggcggtgcggcagctgcgagggggccccggcggcggtgcactgccgcacgtgcgttggtggatccttcctctgcacgacgtgcgacgcccggcccgcgcacgcgcgcctgggccacgagcgcgtgtggatgtgcgaggtctgcgagctggcccccgccgccgtcacgtgcaaggccgaccacgcgcacgcgcacgcgcacgcgctgaacctcaacgtggaggccaaggacatgaagctggactacctcttctctgaactggatccctacctcagcgtcgagatcccgcgcttccagcacgctgacagcgtcgtccccaacggcgccggcgctgccgtcgagctggacttcacgtgcggcatcggcgttaagcactcctcctacagctcctacacggccacctccctcgctcatagcggctcctcgtcggaggttggcgtggtgccagaggccttcggcggcagcggcagcggcggcgggagctttgagctcgacttcacaaggcccaagcctcaggcctacatgccatacaccgggactccccagagccacagcgtgccatccgcggacgtggaggtggtgccggagcggggagacttggctgcggtgaggccggtgccgctgatgggggagagcagggaggcgcgcctgatgcggtaccgtgagaaaaggaagaacaggcgcttcgagaagaccatccggtacgcgtcccggaaggcctacgccgagacgcggccgcgaatcaagggccggtttgccaagcgtgctgaccacgacggggacgccgacgccgacgacgctgaggccgaggccgaggccgccgtgccgatgtcatatgtgctcgacttcggctacggcgtcgtaccgagcttttgatgtgcccgggcccaacacgcgcgcacatggccggccgcgcgcttgaaccggcatggcacgccgctgcgcgcgcgccttgtacttgtatcgatcgatgtatagggaggagtagtaatcccatgtactctctttttgagcaagctcttgcgtaaactagtgatgtataatttgtactactagtaagaaactgcagtagccgctgctaatggatcaccaatctataccgcgcacaagttgtcttaaacttgctattctgagtgcgggattttattgcactgttttcaaaaatacacatcagtttttttaaaaaaatttaaaatcgtgtatctgaagttatatgcagaaaaaaaaaa

SEQ ID NO: 80531 - DNA, 1036 bp, Zea Mays
gctccgaggccgccgccgcggccgtggaggccaaggacatgaagctggactacctcttctctgaactggatccctacctcagcgtcgagatcccgcgcttccagcacgctgacagcgtcgtccccaacggcgccggcgctgccgtcgagctggacttcacgtgcggcatcggcgttaagcactcctcctacagctcctacacggccacctccctcgctcatagcggctcctcgtcggaggttggcgtggtgccagaggccttcggcggcagcggcagcggcggcgggagctttgagctcgacttcacaaggcccaagcctcaggcctacatgccatacaccgggactccccagagccacagcgtgccatccgcggacgtggaggtggtgccggagcggggagacttggctgcggtgaggccggtgccgctgatgggggagagcagggaggcgcgcctgatgcggtaccgtgagaaaaggaagaacaggcgcttcgagaagaccatccggtacgcgtcccggaaggcctacgccgagacgcggccgcgaatcaagggccggtttgccaagcgtgctgaccacgacggggacgccgacgccgacgacgctgaggccgaggccgaggccgccgtgccgatgtcatatgtgctcgacttcggctacggcgtcgtaccgagcttttgatgtgcccgggcccaacacgcgcgcacatggccggccgcgcgcttgaaccggcatggcacgccgctgcgcgcgcgccttgtacttgtatcgatcgatgtatagggaggagtagtaatcccatgtactctctttttgagcaagctcttgcgtaaactagtgatgtataatttgtactactagtaagaaactgcagtagccgctgctaatggatcaccaatctataccgcgcacaagttgtcttaaacttgctattctgagtgcgggattttattgcactgttttcaaaaatacacatcagtttttttaaaaaaatttaaaatcgtgtatctgaagttatatgcagaaaaaaaaaa

SEQ ID NO: 80532 - DNA, 3468 bp, Zea Mays
atcagaccaggggatcctactcggatcaggtctccgacataagaagcagcttccgattatctctctctcattggttagtcagtgaaactgttatgctacggattatatcattctcagagaacaaggagcattgaaatttcggccatggattaatgttatcagctataatcagcaacatcatctgttgggttcaacagtcaactgatgtttgagtaaatttcaatgtgatcggaaaaccgtgctgattatcgagaaagatgggggacgactacctagctgaacctgaggatgaggttgcacaatcaatgtggcccgagaatataggagacaaacaccagaggcagttcagaatggaaaagtttaggaaggaccaagatgctttcaaggatgtgaagtttgatgaaaagcctgttcatgtggactttcagcggcttatggaaatggcaaattctgagaaaggtgtttctcagatgcaatactttatgaagcactgggaatataagagagccaatgctgctcgacttctggaggaagagcttggccttctctgccaacaaaggaaagagattgaacaaaataagcaacaaatcttggaggagcaacgttttcaggatgagagttattacgctgtaaaacggcatgtaccaatactggatgaagtttatgaagatgagtggaagcgacctagcaaaaagaatgacgatctttctcgtagtagagagactaatatagatgcagatcatgacagtgtttcctactggaaagagcgggcaactaagttagaggaaaaacttgaggaaagcatccaaagggagcgttcgttagttgagaaattggaggaaaatataaagaatctgcagtcgcacacaccagctgaggaattctctggaatgctaaaacgcgctgattacttcttgcacttggttctacaaagcgctcctattgttattgctcatcaggatgcagatttacgataccgtttcatatttaaccactatccaacacttgctgatgaggatgttattggtaagacagactatgagatattgtcaggtgagggtatagaagagatgaatagtgtcaagcgagaagttatggcctcggggatagcaactaaaagagaatttgcgtttaatacaccaatgtttggggcaaagacatttgtgacatacattgagccagttttcagcaaaggtggggaagcgattggtgtgaattatgttgcaatggacataacagatcaggtcaaaagaagagagaaaatggcagacataagggtgagggaagctgtccaaaatgccaaggaaactgaacttagcagatctcttcacataacagaggaaacaatgcgagcaaaacaaatgctagctaccatgtcccatgagatcagatctcctctttcgggtgttcttagcatggctgaaattcttgcaactaccaaactggataaagaacagcatcagttgctagaagttatgttatcctctggagaccttgtattgcagctgatcaatgacatccttgatctttccaaagtggagtcaggggctatgaaactagaatctactacatttagaccaagggaagtagttaaacatgtactgcaaactgctgcggcttctctgaagaaggaattgacccttgtagggtgcataggtgatgatgttccagtggaggttattggtgatgtgctaaggattcggcaaattctgaccaacttgatcagcaatgcagtcaagtttacacatgaagggaaagttggaataaatcttcaggtcgtacatgagaagcaactaggatgcaaaatagagattgggaaaattcataagcgagcgtattctgggacagcaattactgctgcagaaactgctgctgtctctacaagaaactgtgataaagatactttgcattgctcgaaacatgaagatgcttttcagaatggtgttccaacatgcgaaaatttcaaggaggatattgagggagaggaagtcgtttggcttcgctgtgatgtatatgacactggaataggaataccagagaagtccttaccgttgctgttcaagaggtatatgcaagctagtgctgatcatgcgaggaagtatggtgggacagggcttggccttgcaatctgcaagcagttggtggagttgatgggtggtactctgacagtggtcagcaaagagaatgaaggatcaacatttacatttgtgctgccttgtaaaatccctgtaaaagatgagcatagtgatgatcccgacgaaatgcacagttctcagaatgattctgcaaatagtgatatagaaggttctttctttttcaagccacaaatgagagcttctcttctgtctcctggagtttcaataatgaacaacacgaagttaatcggcgccaagcttatgtgctatgatccgcctgacatatcacatgaccgcaaattgttctcaaatggtttctcatcaacagagcataactttacaaatacctgtactgctcaccaaccgaatggtgctagtgttaggagcacagctgaagaacctgataatgcaatggtccttgagctgaatagtcaagctgaacgggtttccagttcccgaggagacttggtatctgtttcaggtgctgctgcgtgcaaagttcttgaagaacaatcactccacaagaaaccaaagtgttctccaatcggcaataaagcaaagatcctgctagttgaagataacaaggtcaacataatagtagcaaaatcaatgctggagcagctgggccatggaatagatatcgtaaataatgggatgcaagcaatccgtgcagtacaacagcatcaatatgatcttattctgatggatgttcacatgccagaaatggatggcctacaagccactaaacatatccgttattttgagaataccggctgttgggacgtttctgtaaagcctgaagacaatcggatgataactggctcagttatttcatcagattgtgcacatgcaaaaaagcaagggcaaagagttccaataattgcgatgacagcaaattcattcgcagagagttccgaggaatgccttgctgcaggcatggattcctacatatctaagcctgtgaactttcagaatataaaggaatgcctgcagcggtatttgatgtctcagtgactatccaattattgtaaagtagaagggtaatctgtaggttaggaaagttttgtgaaatcacctgagtccgtttcttgtaaatcaatgcgtaataaatataatgtatcctgtcttgtcgaccattttacctttactactgggagacagagacagctctattttgaagagcgtcctgaatctgacctaaccccaccagtaaggtcaagagctgactcaaaactttaggatcctcatttgtttatgagacatattcctgtacatagttgttatggaggttcttacactttagcagctggtctttatctgtatcataattcat

SEQ ID NO: 80533 - DNA, 3242 bp, Zea Mays
cagcttccgattatctctctctcattggttagtcagtgaaactgttatgctacggattatatcattctcagagaacaaggagcattgaaatttcggccatggattaatgttatcagctataatcagcaacatcatctgttgggttcaacagtcaactgatgtttgagtaaatttcaatgtgatcggaaaaccgtgctgattatcgagaaagatgggggacgactacctagctgaacctgaggatgaggttgcacaatcaatgtggcccgagaatataggagacaaacaccagaggcagttcagaatggaaaagtttaggaaggaccaagatgctttcaaggatgtgaagtttgatgaaaagcctgttcatgtggactttcagcggcttatggaaatggcaaattctgagaaaggtgtttctcagatgcaatactttatgaagcactgggaatataagagagccaatgctgctcgacttctggaggaagagcttggccttctctgccaacaaaggaaagagattgaacaaaataagcaacaaatcttggaggagcaacgttttcaggatgagagttattacgctgtaaaacggcatgtaccaatactggatgaagtttatgaagatgagtggaagcgacctagcaaaaagaatgacgatctttctcgtagtagagagactaatatagatgcagatcatgacagtgtttcctactggaaagagcgggcaactaagttagaggaaaaacttgaggaaagcatccaaagggagcgttcgttagttgagaaattggaggaaaatataaagaatctgcagtcgcacacaccagctgaggaattctctggaatgctaaaacgcgctgattacttcttgcacttggttctacaaagcgctcctattgttattgctcatcaggatgcagatttacgataccgtttcatatttaaccactatccaacacttgctgatgaggatgttattggtaagacagactatgagatattgtcaggtgagggtatagaagagatgaatagtgtcaagcgagaagttatggcctcggggatagcaactaaaagagaatttgcgtttaatacaccaatgtttggggcaaagacatttgtgacatacattgagccagttttcagcaaaggtggggaagcgattggtgtgaattatgttgcaatggacataacagatcaggtcaaaagaagagagaaaatggcagacataagggtgagggaagctgtccaaaatgccaaggaaactgaacttagcagatctcttcacataacagaggaaacaatgcgagcaaaacaaatgctagctaccatgtcccatgagatcagatctcctctttcgggtgttcttagcatggctgaaattcttgcaactaccaaactggataaagaacagcatcagttgctagaagttatgttatcctctggagaccttgtattgcagctgatcaatgacatccttgatctttccaaagtggagtcaggggctatgaaactagaatctactacatttagaccaagggaagtagttaaacatgtactgcaaactgctgcggcttctctgaagaaggaattgacccttgtagggtgcataggtgatgatgttccagtggaggttattggtgatgtgctaaggattcggcaaattctgaccaacttgatcagcaatgcagtcaagtttacacatgaagggaaagttggaataaatcttcaggtcgtacatgagaagcaactaggatgcaaaatagagattgggaaaattcataagcgagcgtattctgggacagcaattactgctgcagaaactgctgctgtctctacaagaaactgtgataaagatactttgcattgctcgaaacatgaagatgcttttcagaatggtgttccaacatgcgaaaatttcaaggaggatattgagggagaggaagtcgtttggcttcgctgtgatgtatatgacactggaataggaataccagagaagtccttaccgttgctgttcaagaggtatatgcaagctagtgctgatcatgcgaggaagtatggtgggacagggcttggccttgcaatctgcaagcagttggtggagttgatgggtggtactctgacagtggtcagcaaagagaatgaaggatcaacatttacatttgtgctgccttgtaaaatccctgtaaaagatgagcatagtgatgatcccgacgaaatgcacagttctcagaatgattctgcaaatagtgatatagaaggttctttctttttcaagccacaaatgagagcttctcttctgtctcctggagtttcaataatgaacaacacgaagttaatcggcgccaagcttatgtgctatgatccgcctgacatatcacatgaccgcaaattgttctcaaatggtttctcatcaacagagcataactttacaaatacctgtactgctcaccaaccgaatggtgctagtgttaggagcacagctgaagaacctgataatgcaatggtccttgagctgaatagtcaagctgaacgggtttccagttcccgaggagacttggtatctgtttcaggtgctgctgcgtgcaaagttcttgaagaacaatcactccacaagaaaccaaagtgttctccaatcggcaataaagcaaagatcctgctagttgaagataacaaggtcaacataatagtagcaaaatcaatgctggagcagctgggccatggaatagatatcgtaaataatgggatgcaagcaatccgtgcagtacaacagcatcaatatgatcttattctgatgatgacagcaaattcattcgcagagagttccgaggaatgccttgctgcaggcatggattcctacatatctaagcctgtgaactttcagaatataaaggaatgcctgcagcggtatttgatgtctcagtgactatccaattattgtaaagtagaagggtaatctgtaggttaggaaagttttgtgaaatcacctgagtccgtttcttgtaaatcaatgcgtaataaatataatgtatcctgtcttgtcgaccattttacctttactactgggagacagagacagctctattttgaagagcgtcctgaatctgacctaaccccaccagtaaggtcaagagctgactcaaaactttaggatcctcatttgtttatgagacatattcctgtacatagttgttatggaggttcttacactttagcagctggtctttatctgtatcataattcat

SEQ ID NO: 80534 - DNA, 3239 bp, Zea Mays
cggattatatcattctcagagaacaaggagcattgaaatttcggccatggattaatgttatcagctataatcagcaacatcatctgttgggttcaacagtcaactgatgtttgagtaaatttcaatgtgatcggaaaaccgtgctgattatcgagaaagatgggggacgactacctagctgaacctgaggatgaggttgcacaatcaatgtggcccgagaatataggagacaaacaccagaggcagttcagaatggaaaagtttaggaaggaccaagatgctttcaaggatgtgaagtttgatgaaaagcctgttcatgtggactttcagcggcttatggaaatggcaaattctgagaaaggtgtttctcagatgcaatactttatgaagcactgggaatataagagagccaatgctgctcgacttctggaggaagagcttggccttctctgccaacaaaggaaagagattgaacaaaataagcaacaaatcttggaggagcaacgttttcaggatgagagttattacgctgtaaaacggcatgtaccaatactggatgaagtttatgaagatgagtggaagcgacctagcaaaaagaatgacgatctttctcgtagtagagagactaatatagatgcagatcatgacagtgtttcctactggaaagagcgggcaactaagttagaggaaaaacttgaggaaagcatccaaagggagcgttcgttagttgagaaattggaggaaaatataaagaatctgcagtcgcacacaccagctgaggaattctctggaatgctaaaacgcgctgattacttcttgcacttggttctacaaagcgctcctattgttattgctcatcaggatgcagatttacgataccgtttcatatttaaccactatccaacacttgctgatgaggatgttattggtaagacagactatgagatattgtcaggtgagggtatagaagagatgaatagtgtcaagcgagaagttatggcctcggggatagcaactaaaagagaatttgcgtttaatacaccaatgtttggggcaaagacatttgtgacatacattgagccagttttcagcaaaggtggggaagcgattggtgtgaattatgttgcaatggacataacagatcaggtcaaaagaagagagaaaatggcagacataagggtgagggaagctgtccaaaatgccaaggaaactgaacttagcagatctcttcacataacagaggaaacaatgcgagcaaaacaaatgctagctaccatgtcccatgagatcagatctcctctttcgggtgttcttagcatggctgaaattcttgcaactaccaaactggataaagaacagcatcagttgctagaagttatgttatcctctggagaccttgtattgcagctgatcaatgacatccttgatctttccaaagtggagtcaggttattggtgatgtgctaaggattcggcaaattctgaccaacttgatcagcaatgcagtcaagtttacacatgaagggaaagttggaataaatcttcaggtcgtacatgagaagcaactaggatgcaaaatagagattgggaaaattcataagcgagcgtattctgggacagcaattactgctgcagaaactgctgctgtctctacaagaaactgtgataaagatactttgcattgctcgaaacatgaagatgcttttcagaatggtgttccaacatgcgaaaatttcaaggaggatattgagggagaggaagtcgtttggcttcgctgtgatgtatatgacactggaataggaataccagagaagtccttaccgttgctgttcaagaggtatatgcaagctagtgctgatcatgcgaggaagtatggtgggacagggcttggccttgcaatctgcaagcagttggtggagttgatgggtggtactctgacagtggtcagcaaagagaatgaaggatcaacatttacatttgtgctgccttgtaaaatccctgtaaaagatgagcatagtgatgatcccgacgaaatgcacagttctcagaatgattctgcaaatagtgatatagaaggttctttctttttcaagccacaaatgagagcttctcttctgtctcctggagtttcaataatgaacaacacgaagttaatcggcgccaagcttatgtgctatgatccgcctgacatatcacatgaccgcaaattgttctcaaatggtttctcatcaacagagcataactttacaaatacctgtactgctcaccaaccgaatggtgctagtgttaggagcacagctgaagaacctgataatgcaatggtccttgagctgaatagtcaagctgaacgggtttccagttcccgaggagacttggtatctgtttcaggtgctgctgcgtgcaaagttcttgaagaacaatcactccacaagaaaccaaagtgttctccaatcggcaataaagcaaagatcctgctagttgaagataacaaggtcaacataatagtagcaaaatcaatgctggagcagctgggccatggaatagatatcgtaaataatgggatgcaagcaatccgtgcagtacaacagcatcaatatgatcttattctgatggatgttcacatgccagaaatggatggcctacaagccactaaacatatccgttattttgagaataccggctgttgggacgtttctgtaaagcctgaagacaatcggatgataactggctcagttatttcatcagattgtgcacatgcaaaaaagcaagggcaaagagttccaataattgcgatgacagcaaattcattcgcagagagttccgaggaatgccttgctgcaggcatggattcctacatatctaagcctgtgaactttcagaatataaaggaatgcctgcagcggtatttgatgtctcagtgactatccaattattgtaaagtagaagggtaatctgtaggttaggaaagttttgtgaaatcacctgagtccgtttcttgtaaatcaatgcgtaataaatataatgtatcctgtcttgtcgaccattttacctttactactgggagacagagacagctctattttgaagagcgtcctgaatctgacctaaccccaccagtaaggtcaagagctgactcaaaactttaggatcctcatttgtttatgagacatattcctgtacatagttgttatggaggttcttacactttagcagctggtctttatctgtatcataattcat

SEQ ID NO: 80535 - DNA, 3189 bp, Zea Mays
tgattatcgagaaagatgggggacgactacctagctgaacctgaggatgaggttgcacaatcaatgtggcccgagaatataggagacaaacaccagaggcagttcagaatggaaaagtttaggaaggaccaagatgctttcaaggatgtgaagtttgatgaaaagcctgttcatgtggactttcagcggcttatggaaatggcaaattctgagaaaggtgtttctcagatgcaatactttatgaagcactgggaatataagagagccaatgctgctcgacttctggaggaagagcttggccttctctgccaacaaaggaaagagattgaacaaaataagcaacaaatcttggaggagcaacgttttcaggatgagagttattacgctgtaaaacggcatgtaccaatactggatgaagtttatgaagatgagtggaagcgacctagcaaaaagaatgacgatctttctcgtagtagagagactaatatagatgcagatcatgacagtgtttcctactggaaagagcgggcaactaagttagaggaaaaacttgaggaaagcatccaaagggagcgttcgttagttgagaaattggaggaaaatataaagaatctgcagtcgcacacaccagctgaggaattctctggaatgctaaaacgcgctgattacttcttgcacttggttctacaaagcgctcctattgttattgctcatcaggatgcagatttacgataccgtttcatatttaaccactatccaacacttgctgatgaggtgagggtatagaagagatgaatagtgtcaagcgagaagttatggcctcggggatagcaactaaaagagaatttgcgtttaatacaccaatgtttggggcaaagacatttgtgacatacattgagccagttttcagcaaaggtggggaagcgattggtgtgaattatgttgcaatggacataacagatcaggtcaaaagaagagagaaaatggcagacataagggtgagggaagctgtccaaaatgccaaggaaactgaacttagcagatctcttcacataacagaggaaacaatgcgagcaaaacaaatgctagctaccatgtcccatgagatcagatctcctctttcgggtgttcttagcatggctgaaattcttgcaactaccaaactggataaagaacagcatcagttgctagaagttatgttatcctctggagaccttgtattgcagctgatcaatgacatccttgatctttccaaagtggagtcaggggctatgaaactagaatctactacatttagaccaagggaagtagttaaacatgtactgcaaactgctgcggcttctctgaagaaggaattgacccttgtagggtgcataggtgatgatgttccagtggaggttattggtgatgtgctaaggattcggcaaattctgaccaacttgatcagcaatgcagtcaagtttacacatgaagggaaagttggaataaatcttcaggtcgtacatgagaagcaactaggatgcaaaatagagattgggaaaattcataagcgagcgtattctgggacagcaattactgctgcagaaactgctgctgtctctacaagaaactgtgataaagatactttgcattgctcgaaacatgaagatgcttttcagaatggtgttccaacatgcgaaaatttcaaggaggatattgagggagaggaagtcgtttggcttcgctgtgatgtatatgacactggaataggaataccagagaagtccttaccgttgctgttcaagaggtatatgcaagctagtgctgatcatgcgaggaagtatggtgggacagggcttggccttgcaatctgcaagcagttggtggagttgatgggtggtactctgacagtggtcagcaaagagaatgaaggatcaacatttacatttgtgctgccttgtaaaatccctgtaaaagatgagcatagtgatgatcccgacgaaatgcacagttctcagaatgattctgcaaatagtgatatagaaggttctttctttttcaagccacaaatgagagcttctcttctgtctcctggagtttcaataatgaacaacacgaagttaatcggcgccaagcttatgtgctatgatccgcctgacatatcacatgaccgcaaattgttctcaaatggtttctcatcaacagagcataactttacaaatacctgtactgctcaccaaccgaatggtgctagtgttaggagcacagctgaagaacctgataatgcaatggtccttgagctgaatagtcaagctgaacgggtttccagttcccgaggagacttggtatctgtttcaggtgctgctgcgtgcaaagttcttgaagaacaatcactccacaagaaaccaaagtgttctccaatcggcaataaagcaaagatcctgctagttgaagataacaaggtcaacataatagtagcaaaatcaatgctggagcagctgggccatggaatagatatcgtaaataatgggatgcaagcaatccgtgcagtacaacagcatcaatatgatcttattctgatggatgttcacatgccagaaatggatggcctacaagccactaaacatatccgttattttgagaataccggctgttgggacgtttctgtaaagcctgaagacaatcggatgataactggctcagttatttcatcagattgtgcacatgcaaaaaagcaagggcaaagagttccaataattgcgatgacagcaaattcattcgcagagagttccgaggaatgccttgctgcaggcatggattcctacatatctaagcctgtgaactttcagaatataaaggaatgcctgcagcggtatttgatgtctcagtgactatccaattattgtaaagtagaagggtaatctgtaggttaggaaagttttgtgaaatcacctgagtccgtttcttgtaaatcaatgcgtaataaatataatgtatcctgtcttgtcgaccattttacctttactactgggagacagagacagctctattttgaagagcgtcctgaatctgacctaaccccaccagtaaggtcaagagctgactcaaaactttaggatcctcatttgtttatgagacatattcctgtacatagttgttatggaggttcttacactttagcagctggtctttatctgtatcataattcat

SEQ ID NO: 80536 - DNA, 360 bp, Zea Mays
gtataataaaggggccacccatcaggagagacaagcaaatttcccaaacgcaaaaccgcatcctctcatcagcttccttccacattcgtctcgagatctcgccccgtcgccatggacgcgatcgacagcgtggtggatcccctccgcgacttcgccaaggacagcgtccgcctcgtcaagcgctgccacaagcccgaccgcaaggagttcaccaaggtggcggcgcggacggcgatcgggttcgtcgtcatgggcttcgtcggcttcttcgttaagctcatcttcatccccatcaacaacatcatcgtcggttccggctagatgagacacatatacaagtttcaatgggaatattcaaac

SEQ ID NO: 80537 - DNA, 386 bp, Zea Mays
ctgccaggatccctccttccgccgcgccctagttcaccaaggtggcggcgcggacggcgatcgggttcgtcgtcatgggcttcgtcggcttcttcgttaagctcatcttcatccccatcaacaacatcatcgtcggttccggctaggcttacaggagtacagggcgactagcatgggagtagtgcaatacttttgggagcaatagataacgaggatcctggtctttcgaatagtattgttaatgaaatttttcgttcggttgtgtttctgatgtaatcgttgtactgagtagaccttctggataccggattctgagtagacctttgaatccttgatggatcagccaatctcggaaaggaagtttcgtattttgttgttccgttaag

SEQ ID NO: 80538 - DNA, 1056 bp, Zea Mays
ggggaagtccacttactaattcaatcttggttgagtagtgaagacgacttgcaagtgtcaatgggcgtgagaatgaaagacaaatatgacaagtattggggagtgtggcacacaaacaacaattcgtttgagaatgacgatgaggacgaggatgaggatgggaatgggaggggcaggcgtaaggggaagggaaagggaaaagagaaggagaaagagaacattaacttgttgatttttgtggctgctgttcttgatccaagatacaagctatctttgtacacaaagataaccatcgaagaaatatttggtcaagaaaggggagagctagtttgggaagccattaacacttgtgtccatgagctttttgaggaatataggaaattgtatgctccaaatgaacaaccaattgaagcaagtgatctgactccaaagggaggtcccgggggcaagcttaaagaagtaattgctaagaggatgaagatgaacaatggctcaagtagctcttccaagtctgaacttgacaagtatcttacagaagaaaatgaagacacggaaaggaagcttaacattctagcttggtggaaggcccatgcacataggtttccaattttggctcacttagcccgtgatgtccttgctatgcctatctcaacagtagcttcagaatctgcattcagcacaagtgggcgcatattagatgattttcgtacctctcttactccattcatgctagaggctctagtatgtactcaagattggatgagaaggtcaactcctattgatatcaaagagagtgatgaggaattagccatgattgaaaaagagttaattgaagaatttggtcctggttccaaaggaaaagggaaagagaaggcttcaacacaaagcagtagcaaagctccttccaacactggaacaggaacttcttaaaggctgtctttgcacaatcctttatagcctacaattcctagtattagtgctaagcaagtcacttgtgtatttcattttgtagttctgttgtatgcctttgccgtgagattcttgtttcattttttg

SEQ ID NO: 80539 - DNA, 4444 bp, Zea Mays
aaaagaaagaaacatgcttgctacttgctagcgttgggttatctgtttgaggtattgggccaaaatgtaagagtagaaacaaccccagccgccgccaaccccaaccccgttctccggcccgccgctctctctctcctagtccccttctatcgtggcaacgacgagcgacagtcgctgccgccctacggcaggtgcccaggtcttcttcggtcccttcgccgtcgacgagcactaccaggtacgcgcacccctttatcttcccttccctgctgcgcgaagccgtgcacccaaaccctgtactcggatctgatatacttacaagtgtatacgtgtattatgcttactagcttcgattgtcttgcaaaaaaaaaaaatatgtcgggtgtacatgtgtacacccatgtcctttacttggtccgcccttgtcccttaatgtagctggaaagggtaggccttcgtgttatgattatgaatctgtgccctagattgtgacttcagaatcgggcgctaccattccatgccggtgcttagattttgacttcggagagagttgcaaaaaaaaaaaaatcatgcacttgactcggtgatgcttttgctggtagtgaattcgtgaatgtgagctgtgtttcactttgtcaattcccagtatatggaactaattagactgaattgtcaatgataacacaaatttgatggttgcttgtaacagttttctttcgttattaacaaaagagcaacgatttgggaacgtggtgtccaggggcttaatagttctcaaatatgtggactaagtgtgtgaactcttaggttgtacacatattgtaatttatgcaaatttcaagcttaattgttgaacttaagatattatgtgatgttttaaattatatcatacttttttatacttatatactgaaacggttggcaaatcttatagttgtttaactaattataccatactttttttatacttatatactgaaacggttggcaaatcttatagttgtttaactaattgctcattcgaatgtcagaaaatcttatagttgtttacctaattgaccattggaatatatcaaatgtatgttggagtattggctcagcatggacttgaaattaaaatcctggattagctgctgtttgttactttgtttataccaccagctcagggattaatctgtttggaaaatcattatagtttcttggacataagatatttgttgctagaattccattttttcccattgaattaaacatagctttgttctacaaacacacacatgtatgagcatttcatgtaaaacaatgttaccgcttttcttcatattcaatatctaggacatttagcttctctaggttcctgtgtaaataaaagcgtgtggtaatactcctggccactgagggtcggcactaatggccctgcatgttttagctcccagcagaatttaggttcacatacaatttgcattcacacacataaggtgctggatcttgctagcttctagacccaaagccattccagttccagtcagttttgtgcatggctgactgtcaccaagccaaaagctctgacctggtgaatggtgatgtcttcctgttattctactgcgacacctaacatcttatccgtattcgcttacactccattaccctgtgaaactctcctggtccacctctcatgtggcttgttttggtagaggaaactactctgttcggttgcagaagagtgatgtttgtagatggaccacttacccccaaacacaacttcatctgcatttcttactataacaacatcatcaacaacaacaacaaatcctttttagtccgaagcaagttgggtaggctagagttggaacccaatagaaatcacaagttaaggttcaggcacatggatagctgttttacatgcactcttattcaaggctaaatctttggtatattccatcctttcaagtcttctttactgcatcttcccatgtcaacttgggtcttcccttacatctctttctattgctatcgcgccttaggattacactacacactagtgcctctagaggtctctgttgcacatgtccaaactatctcaattggtgttggacaagctttttatagtttcatactcaatccgttcttgtatggccacaaactcaacgcaacatatgcatttccacaacatttatctgctaaacatgttgtctttttgtaggctaacattctacaccatagaacatagcaggtctaatcgccgtcctattaaacttgccttttagcttctatggtaccctcttgtcacatagaacgtcagatgtttgacgccactttatccactcagctttaattctatggctaacatctttatcaatatcctcgtctctctgtagcaatgatcctaaatatcgaaatctatccttcttgtgcactacttgatcttctaaactagcatccttcctcatgtttatcaataccaaagtcacatatcatgtattattttttagttctactaaattaaaaacctttggactctagaatctcccaccacaactctagttttctatttactatagttttctattttctcctaccgcaacttcatctacatgtctactataatatatttgtaggctgccaaaatcgtatgataacgaaactattttttaagaaaaaaatccgccctgtccattttgaaatgtcagtcaatgcaaacaaatctatttgattatcaagattttgataggttgattgcatgcagttttcacttaaacagcctttaaatggtttggaaaacggaaacagtgccatattgtcttgtttagggcctatttggtcaattaaatggtgctaccctttacatggttgtaaacgctaaaaacagctggaacaggcaacgaggaagagtgctaaacatacttggaagaactaaatgggctgttcaggagatacaaatgccaaggattggggaaatttaagacaatcagaactcacacgcaaaactacttcatcttggcccaatttgcagtccatatataatactgaggcccaacttgtcacattagagtttttatttgccattcagctgccagctcgtcctcgccgtcacgcgttccggtgttcaggcttgtcaatcggctgttgctctccattgaccctccgcaccgtaaagctgtgtgatgtgccctttcactctgagaaggtatcaagaagacttgggtgtgttgtgactagtgtcctcttgctgcggtcaggcgcatctgtaactgcgtgggcgccgtctgcagtgacgggacttctccagctctccaactgtgctagcctcgatgtgctactctagtatccactctccagtacttccttctccagtcccacagtccccccaatcccccatgaatggatctgaatgtctatgcaagctttcttggactccttaaattgtgattctcgatgttcagtgttcaccatgctcaattgttgatttaaattattgcctagccagcgttccaggtctgacctatcatgattgcatctgctactctgcagttcaatctcactgcacctaacttgtgattgaatatgatgtaatgatgaacacaaattgttaaataaatggctgcccactgcaccactgcttgattcagtattgtagattgctgagaactcatttttttatttttatttgtgcaggatagtccttgcaaaaagtaagaattcacattcacagttacataccaagctgctgatttttttcttttgcatggctagcagctggtgttggctaatcttttgcatgtggcttgtaattaaattgtctaggatcttgctgggatgacctgaggtgtgagtgaagtgttgttagaactaaagtgagaccttgacagttgacaccttgacaacatcattggtgcttttgcttatggactaatttgtctttggtttatggcattgtgctgtgatgaccaatcttattcagagatgttgtgtgaatttatgcactcatgatgttatataccgttgtactgatctgaatacatgttaagtagctgccatttgtcaatttgtgagtgtgccaactactcaattgtcaatgatcgtgctattgtctatcacttgactcatttatctatcattaaccatgtttcaattgtcatgtgaatatgcacgtgttctcaatttgagaacttgctaatgtgctatacattagaatacttatttatttacatgcgcaagatgtgcatatatttgctagaacacttaaatttttaaatgaacatatatataagtaatatattttggaaaaacaacacaaaacagtttagactgtttaattccatttaaacaccgtgtaaatggctaaacgctaaacaaaaggcgcccgtactgtttagcatttaggataacattgattgcatgtaacccagaacatgattatttatgctaagtttggactggcaag

SEQ ID NO: 80540 - DNA, 999 bp, Zea Mays
gaaacatgcttgctacttgctagcgttgggttatctgtttgaggtattgggccaaaatgtaagagtagaaacaaccccagccgccgccaaccccaaccccgttctccggcccgccgctctctctctcctagtccccttctatcgtggcaacgacgagcgacagtcgctgccgccctacggcaggtgcccaggtcttcttcggtcccttcgccgtcgacgagcactaccaggatagtccttgcaaaaagtaagaattcacattcacagttacataccaagctgctgatttttttcttttgcatggctagcagctggtgttggctaatcttttgcatgtggcttgtaattaaattgtctaggatcttgctgggatgacctgaggtgtgagtgaagtgttgttagaactaaagtgagaccttgacagttgacaccttgacaacatcattggtgcttttgcttatggactaatttgtctttggtttatggcattgtgctgtgatgaccaatcttattcagagatgttgtgtgaatttatgcactcatgatgttatataccgttgtactgatctgaatacatgttaagtagctgccatttgtcaatttgtgagtgtgccaactactcaattgtcaatgatcgtgctattgtctatcacttgactcatttatctatcattaaccatgtttcaattgtcatgtgaatatgcacgtgttctcaatttgagaacttgctaatgtgctatacattagaatacttatttatttacatgcgcaagatgtgcatatatttgctagaacacttaaatttttaaatgaacatatatataagtaatatattttggaaaaacaacacaaaacagtttagactgtttaattccatttaaacaccgtgtaaatggctaaacgctaaacaaaaggcgcccgtactgtttagcatttaggataacattgattgcatgtaacccagaacatgattatttatgctaagtttggactggcaag

SEQ ID NO: 80541 - DNA, 3936 bp, Zea Mays
gttatctgtttgaggtattgggccaaaatgtaagagtagaaacaaccccagccgccgccaaccccaaccccgttctccggcccgccgctctctctctcctagtccccttctatcgtggcaacgacgagcgacagtcgctgccgccctacggcaggtgcccaggtcttcttcggtcccttcgccgtcgacgagcactaccagttttctttcgttattaacaaaagagcaacgatttgggaacgtggtgtccaggggcttaatagttctcaaatatgtggactaagtgtgtgaactcttaggttgtacacatattgtaatttatgcaaatttcaagcttaattgttgaacttaagatattatgtgatgttttaaattatatcatacttttttatacttatatactgaaacggttggcaaatcttatagttgtttaactaattataccatactttttttatacttatatactgaaacggttggcaaatcttatagttgtttaactaattgctcattcgaatgtcagaaaatcttatagttgtttacctaattgaccattggaatatatcaaatgtatgttggagtattggctcagcatggacttgaaattaaaatcctggattagctgctgtttgttactttgtttataccaccagctcagggattaatctgtttggaaaatcattatagtttcttggacataagatatttgttgctagaattccattttttcccattgaattaaacatagctttgttctacaaacacacacatgtatgagcatttcatgtaaaacaatgttaccgcttttcttcatattcaatatctaggacatttagcttctctaggttcctgtgtaaataaaagcgtgtggtaatactcctggccactgagggtcggcactaatggccctgcatgttttagctcccagcagaatttaggttcacatacaatttgcattcacacacataaggtgctggatcttgctagcttctagacccaaagccattccagttccagtcagttttgtgcatggctgactgtcaccaagccaaaagctctgacctggtgaatggtgatgtcttcctgttattctactgcgacacctaacatcttatccgtattcgcttacactccattaccctgtgaaactctcctggtccacctctcatgtggcttgttttggtagaggaaactactctgttcggttgcagaagagtgatgtttgtagatggaccacttacccccaaacacaacttcatctgcatttcttactataacaacatcatcaacaacaacaacaaatcctttttagtccgaagcaagttgggtaggctagagttggaacccaatagaaatcacaagttaaggttcaggcacatggatagctgttttacatgcactcttattcaaggctaaatctttggtatattccatcctttcaagtcttctttactgcatcttcccatgtcaacttgggtcttcccttacatctctttctattgctatcgcgccttaggattacactacacactagtgcctctagaggtctctgttgcacatgtccaaactatctcaattggtgttggacaagctttttatagtttcatactcaatccgttcttgtatggccacaaactcaacgcaacatatgcatttccacaacatttatctgctaaacatgttgtctttttgtaggctaacattctacaccatagaacatagcaggtctaatcgccgtcctattaaacttgccttttagcttctatggtaccctcttgtcacatagaacgtcagatgtttgacgccactttatccactcagctttaattctatggctaacatctttatcaatatcctcgtctctctgtagcaatgatcctaaatatcgaaatctatccttcttgtgcactacttgatcttctaaactagcatccttcctcatgtttatcaataccaaagtcacatatcatgtattattttttagttctactaaattaaaaacctttggactctagaatctcccaccacaactctagttttctatttactatagttttctattttctcctaccgcaacttcatctacatgtctactataatatatttgtaggctgccaaaatcgtatgataacgaaactattttttaagaaaaaaatccgccctgtccattttgaaatgtcagtcaatgcaaacaaatctatttgattatcaagattttgataggttgattgcatgcagttttcacttaaacagcctttaaatggtttggaaaacggaaacagtgccatattgtcttgtttagggcctatttggtcaattaaatggtgctaccctttacatggttgtaaacgctaaaaacagctggaacaggcaacgaggaagagtgctaaacatacttggaagaactaaatgggctgttcaggagatacaaatgccaaggattggggaaatttaagacaatcagaactcacacgcaaaactacttcatcttggcccaatttgcagtccatatataatactgaggcccaacttgtcacattagagtttttatttgccattcagctgccagctcgtcctcgccgtcacgcgttccggtgttcaggcttgtcaatcggctgttgctctccattgaccctccgcaccgtaaagctgtgtgatgtgccctttcactctgagaaggtatcaagaagacttgggtgtgttgtgactagtgtcctcttgctgcggtcaggcgcatctgtaactgcgtgggcgccgtctgcagtgacgggacttctccagctctccaactgtgctagcctcgatgtgctactctagtatccactctccagtacttccttctccagtcccacagtccccccaatcccccatgaatggatctgaatgtctatgcaagctttcttggactccttaaattgtgattctcgatgttcagtgttcaccatgctcaattgttgatttaaattattgcctagccagcgttccaggtctgacctatcatgattgcatctgctactctgcagttcaatctcactgcacctaacttgtgattgaatatgatgtaatgatgaacacaaattgttaaataaatggctgcccactgcaccactgcttgattcagtattgtagattgctgagaactcatttttttatttttatttgtgcaggatagtccttgcaaaaagtaagaattcacattcacagttacataccaagctgctgatttttttcttttgcatggctagcagctggtgttggctaatcttttgcatgtggcttgtaattaaattgtctaggatcttgctgggatgacctgaggtgtgagtgaagtgttgttagaactaaagtgagaccttgacagttgacaccttgacaacatcattggtgcttttgcttatggactaatttgtctttggtttatggcattgtgctgtgatgaccaatcttattcagagatgttgtgtgaatttatgcactcatgatgttatataccgttgtactgatctgaatacatgttaagtagctgccatttgtcaatttgtgagtgtgccaactactcaattgtcaatgatcgtgctattgtctatcacttgactcatttatctatcattaaccatgtttcaattgtcatgtgaatatgcacgtgttctcaatttgagaacttgctaatgtgctatacattagaatacttatttatttacatgcgcaagatgtgcatatatttgctagaacacttaaatttttaaatgaacatatatataagtaatatattttggaaaaacaacacaaaacagtttagactgtttaattccatttaaacaccgtgtaaatggctaaacgctaaacaaaaggcgcccgtactgtttagcatttaggataacattgattgcatgtaacccagaacatgattatttatgctaagtttggactggcaag

SEQ ID NO: 80542 - DNA, 1492 bp, Zea Mays
caactgcgcgtgacagggtcacggcggctgggcgcgagacgcggccctgcgcccacgccagccgccagccgccgcccatttccctttcgtccccgcaagtgcttcttatcctctcgcagtctcgctctcgagcctcgcgtcgcagccctcgtcgcataggcgtgcatccagcatcctctcccggataaatacctgggggcaaacagcccggctctcctcgctttcccttcacgcacgcacgcacgcacgctcgccaagagcaaaggcggccggacggggggcggcgggggcggggcagagcggagcggagcggtttgtctccacgcctgacgtctccctcttccccgctgtccgcagcttcggtgcttccttctcccgttcaggaccattgtgtttactgaagcagcttagttcatgttcctgtcatgggtatggaacatttcatcagttctgcaaacctttcagcaggtttcacatcgtatggaaatgaagcagcagaggaaatgaaaaaactacgaggtctaagattggaaacactgatggaaacctgccaaaacacagaaagcagagatgtagcgatcaggtgtccaataccatgcaaaagcagcaggtacaatccagctctctgatctggtctggaagttatgttactattgtacttctaaatttgcataagcaatcacacactttgcatgttctgatgtttcttgtactgatctcatgagtcaaggcggtatagggaacatgacttgagagctgcacaagatctttctgaattcattgtgagtaaggttcgtttctgtacagttgtttcatcaaactggcgcctgtatactgtcgtttctcaaatgtgcttccacttccatttaatctatcgcctttattaaaaaatttctttttctttcttggtttctttctcttttcttgaggtgattttgttgcaaatttttagcacagttaaattgaaatttatttggaattaaactaatgcttctgttgtgggaccttgcaatctgcaggcttcacctccatactttatgggatctccaccacttcgtgcaaccaatcctcttgctcatgatgcacaattctgtgcgtggaaggtgcacagcgtagatcagtcactaggaattcctataccagccaagagttacaatgctcgctactatgcaaggaaagaatcttttaggaaggcttgaagctactttttgtcaagttcatgatcgtcagtgatgtcatagtcgtatctccgcttctctcagcaaggctaacttgtttacttgtatatgagtggctgtcccttttgaaggtgtgagttgtcttatttgagtgtttagagtatctcatccctagtgttgtaaatatatttctttgctcattttttgttagtggagctagttttggtgaataagtactggtataaagtataaacagtgttgctgagtaatgaggtaatctgaatgaaaatgtttgccattcttcagtttctgat

SEQ ID NO: 80543 - DNA, 1135 bp, Zea Mays
caactgcgcgtgacagggtcacggcggctgggcgcgagacgcggccctgcgcccacgccagccgccagccgccgcccatttccctttcgtccccgcaagtgcttcttatcctctcgcagtctcgctctcgagcctcgcgtcgcagccctcgtcgcataggcgtgcatccagcatcctctcccggataaatacctgggggcaaacagcccggctctcctcgctttcccttcacgcacgcacgcacgcacgctcgccaagagcaaaggcggccggacggggggcggcgggggcggggcagagcggagcggagcggtttgtctccacgcctgacgtctccctcttccccgctgtccgcagcttcggtgcttccttctcccgttcaggaccattgtgtttactgaagcagcttagttcatgttcctgtcatgggtatggaacatttcatcagttctgcaaacctttcagcaggtttcacatcgtatggaaatgaagcagcagaggaaatgaaaaaactacgaggtctaagattggaaacactgatggaaacctgccaaaacacagaaagcagagatgtagcgatcaggtgtccaataccatgcaaaagcagcaggcggtatagggaacatgacttgagagctgcacaagatctttctgaattcattgcttcacctccatactttatgggatctccaccacttcgtgcaaccaatcctcttgctcatgatgcacaattctgtgcgtggaaggtgcacagcgtagatcagtcactaggaattcctataccagccaagagttacaatgctcgctactatgcaaggaaagaatcttttaggaaggcttgaagctactttttgtcaagttcatgatcgtcagtgatgtcatagtcgtatctccgcttctctcagcaaggctaacttgtttacttgtatatgagtggctgtcccttttgaaggtgtgagttgtcttatttgagtgtttagagtatctcatccctagtgttgtaaatatatttctttgctcattttttgttagtggagctagttttggtgaataagtactggtataaagtataaacagtgttgctgagtaatgaggtaatctgaatgaaaatgtttgccattcttcagtttctgat

SEQ ID NO: 80544 - DNA, 1375 bp, Zea Mays
caactgcgcgtgacagggtcacggcggctgggcgcgagacgcggccctgcgcccacgccagccgccagccgccgcccatttccctttcgtccccgcaagtgcttcttatcctctcgcagtctcgctctcgagcctcgcgtcgcagccctcgtcgcataggcgtgcatccagcatcctctcccggataaatacctgggggcaaacagcccggctctcctcgctttcccttcacgcacgcacgcacgcacgctcgccaagagcaaaggcggccggacggggggcggcgggggcggggcagagcggagcggagcggtttgtctccacgcctgacgtctccctcttccccgctgtccgcagcttcggtgcttccttctcccgttcaggaccattgtgtttactgaagcagcttagttcatgttcctgtcatgggtatggaacatttcatcagttctgcaaacctttcagcagaaggtttcacatcgtatggaaatgaagcagcagaggaaatgaaaaaactacgaggtctaagattggaaacactgatggaaacctgccaaaacacagaaagcagagatgtagcgatcaggtgtccaataccatgcaaaagcagcaggcggtatagggaacatgacttgagagctgcacaagatctttctgaattcattgtgagtaaggttcgtttctgtacagttgtttcatcaaactggcgcctgtatactgtcgtttctcaaatgtgcttccacttccatttaatctatcgcctttattaaaaaatttctttttctttcttggtttctttctcttttcttgaggtgattttgttgcaaatttttagcacagttaaattgaaatttatttggaattaaactaatgcttctgttgtgggaccttgcaatctgcaggcttcacctccatactttatgggatctccaccacttcgtgcaaccaatcctcttgctcatgatgcacaattctgtgcgtggaaggtgcacagcgtagatcagtcactaggaattcctataccagccaagagttacaatgctcgctactatgcaaggaaagaatcttttaggaaggcttgaagctactttttgtcaagttcatgatcgtcagtgatgtcatagtcgtatctccgcttctctcagcaaggctaacttgtttacttgtatatgagtggctgtcccttttgaaggtgtgagttgtcttatttgagtgtttagagtatctcatccctagtgttgtaaatatatttctttgctcattttttgttagtggagctagttttggtgaataagtactggtataaagtataaacagtgttgctgagtaatgaggtaatctgaatgaaaatgtttgccattcttcagtttctgat

SEQ ID NO: 80545 - DNA, 881 bp, Zea Mays
tgcagggcccagtgttcggtcagtgaggcagcaggaccattgtgtttactgaagcagcttagttcatgttcctgtcatgggtatggaacatttcatcagttctgcaaacctttcagcaggttcaaaccatgctttgttgtacataatatagttccattttttgggtaacttgcacaaattgtgactaaaacccagcttacgtcttataaagaaggtttcacatcgtatggaaatgaagcagcagaggaaatgaaaaaactacgaggtctaagattggaaacactgatggaaacctgccaaaacacagaaagcagagatgtagcgatcaggtgtccaataccatgcaaaagcagcaggcggtatagggaacatgacttgagagctgcacaagatctttctgaattcattgcttcacctccatactttatgggatctccaccacttcgtgcaaccaatcctcttgctcatgatgcacaattctgtgcgtggaaggtgcacagcgtagatcagtcactaggaattcctataccagccaagagttacaatgctcgctactatgcaaggaaagaatcttttaggaaggcttgaagctactttttgtcaagttcatgatcgtcagtgatgtcatagtcgtatctccgcttctctcagcaaggctaacttgtttacttgtatatgagtggctgtcccttttgaaggtgtgagttgtcttatttgagtgtttagagtatctcatccctagtgttgtaaatatatttctttgctcattttttgttagtggagctagttttggtgaataagtactggtataaagtataaacagtgttgctgagtaatgaggtaatctgaatgaaaatgtttgccattcttcagtttctgat

SEQ ID NO: 80546 - DNA, 2698 bp, Zea Mays
ctgccatgcattcgtaggtccactcatgtcactaaaagaaaaaaaaagttgagggactagtgactaccaccagacagacctcgagtgctccattgctcccgtcccccttctctcccgcctcccccccttctctcgtcgctagacctgccgcccggccggcctatatgttctctccttttgagagaagggaggaatagccgcaagcctgcagcgcaaaggaaagcacagcagcggcggtttgcaaaagagcccgccacctctgtctctctgccctgcgctgcgccgtccacaccactcatccggcaacctctctctgtctccactcgtacagtattaatttcctcgcgcctcctccgtcctccattttttttgttgggtgccgtgcgagctccaagtacccctgtctccctcccgtcttgcgggcttgcctttgcctgttccatttccggctcctccagttggtagtgtcgtttcaatgcgagacgccgtccttcacgagcttgattgcccttgaaagcgaagttggtgttggtgtcgttgccggtgaggaggaagaggggatatatggctcccacggaagaggcagcaggggaggacgagcggctgctgaaggatcttctcgcttcttcgtcagataaggaaggagaggatgaagagagtacaaagacacagtccgatgaatctactaggggggattgtgataacggcgggtccgtagccgccttatcgagtgaagatgtcaatgataggcatggtagtgacagcaacagccaatgtgctgaatctgatggtgcttgcagtcaagtgcctggaacaggctccaagagcagcaacgatgagtgcggtgctgaagtgcctcaaaccggatccaagagcagtaatgatgaagatgacgggtgtgctgatgaaatgccaggagccctctccaagagcagtagcaatgacagcagtgagtgcgctgaccggagctctccgcgagctgtcctagatatctcagtatctggcagcatggactcggatgacagtgtttcagtcgagcagtcagcagaatcaaaccaaaatgtgcagtggaggaacctgatcagcagtctaatactcagaagaaagaagtccatgggcagcgcagtgacgttccctcagagacccaagagcaaagggcttagagggtacttggagaggatgaggagtggtaagaaccaaatggactgcagcgccattgctcctgagatcctccctcagatcgggaaatggaggccatcatggcggagctttgactacaatgagctttgtgctgcaactgacagttttggttcagagaaaatgattgggaagggagggcatgcagaggtatacaaaggacagcttgctgatggacaatttgtggcagtgaagagattaacaaaaggcggtaacaaagaggacagagttagcgatttcttatctgagcttggaataatagcccatgttaaccacccaaacgcagcacagctcctggggtttagcgtggaagggggtctgcacttggttcttcagttctcacctcatggaagccttgcttctgttctacatggtacaaaggagcccctgaagtggaaagtcaggttcaaaattgcacttggaattgctgaagggctgctttatctacatgaaggctgccatcgccgcataattcacagagacatcaaggcatctaatatccttctaactgaagactaccaacctcagatatcagattttgggcttgcaaagtggctccctgacaaattgacccatcatgttgtgtatcccattgaaggcacattcgggtatatggccccagaatacttcatgcatgggatcataaatgagaagaccgatgtgttcgcatatggagttctacttcttgaactagttaccgggcggaaagcggtggactcatccagacagagcctagtgatatgggcaaaaccgctgcttgatgcgaacaacatccaagagctggtggatccttcccttggtaacgagtatgaccctgaagagatggtgtacacactagcagtggcatccttgtgcatccaccacagctcaacctcgaggcctagtatgaaatcggtagtctgtttcttgaagggtgaccgggagtcacttgagctggtgagaaggcctaaaatcgtgaagcccctgatgtttgactcgggcgattcagaagattacacgcgctcgagctacctcagcgatctcaaccggcacaagcagctcgcgctggagcagtgaacatcgaattgagtttgaacagattcactagtttcagcgcatgttacggccctgcgatcatctgtatcatccggactgtccgattgtaatgtcaggtgatgcagccactagcgaccagtctgctatactgttcgtgaaatggtgattgttagcatggttgtgtcctgatcatttccatggtttcatatatgtaatgtctcctagtattaaccctcaccagtcatgagcgacttgcatgtttcctagatccggtggtgtcaaggcatctaacaagtttagatccattcggcagccggcatttgcaaacacacgatggcactgctactactgtgctgaattgactacataaaaatgaggttgccaaactagccttagactttagaagctttctattattcacatataagcgtgcagggttgaggaagctgccaatcataaaacttac

SEQ ID NO: 80547 - DNA, 3695 bp, Zea Mays
gtcttcttccaccgcctcatgtttcccaaaggaaaatgtcgccgtcgtgctcctactttgaagcagtcttgtatatagactcacatcgcgcgcacccgctagcagttggctgctccctctcagtctcacgtctcaccggcaccttcctcttcctcctcctctccctgtcaccttctcttgtacgtcacatgttgacaccaatgccccggaccaaacaccgttctgtaccattcaagcaacctcctcctcctctctctctcgtcatcccgccgtcccaacgtcaagtcttctcttcatccttctctctcacccatccacccctctcctctcgctctcgctctcccgcgcctgcaccgatcagttgccatatattcctccaccctccctatctcaagcacctaccccgggccttgcgtggcgatcgagttgccaccagacaactcggctcggctcgtcgtccaccgaccctcctcctcgctccaagcttccctctcccctcctcctccgtcagctggggagctagctagggagcggcgccggcggctgatcgagcggacagacagctgaacgagccggaaatggcggcggggcgcgcgccgtggctcgccgccggcctcgtggcggtgctgatggtggtggccgcgcgcgcgcggttcgtggtggagaagagcagcgtgcgggtgctggcgcccgagcacatccggggccaccacgacgccgccatcggcaacttcggcgtgcccgactacggcggcacgctcaccggcgtcgtcatctacccggacaccaagcccacggggtgcgacgacttcgacgccaagttcaaggccaagtcccgccgccccgtcatcctcctgctcgaccgcggagaatgctacttcgcgctcaaggcgtggaacgcgcagcgcgcgggcgcggcggcggtgctgatcgcggacagcgtggacgagcagctgctgacgatggacagcccggaggcgtcgccgggcacggagtacatcgacaagatcaacatcccgtcggcgctggtgaaccgcgcgttcggcgagtccctgaaaaagatggcgcagaaggtggccggcgcgggcagcgaggaggtggtggtgaagctggactggcgggagtcgatgcctcacccggacgagcgcgtggagtacgagctgtggaccaacagcaacgacgagtgcggcgcgcggtgcgacgagcagatggcgttcgtgcgcggcttccgcggccacgcgcagctcctggagcgcgccgggtacgcgcgcttcacgccgcactacatcacctggtactgccccgaggcgttccgggcgacgcagcagtgccggtcgcagtgcatcaaccgcggcaggtactgcgcgcccgacccggagggggacttcggcgccggctacgagggcaaggacgtggtggtggagaacctgcgccagctctgcgtgcaccgcgtcgccaacgaaacgggccgcccctgggcctggtgggactacgtcatggactacaagatccggtgctccatgaaggagaagaagtacaccaagacctgcgccgaggacgtcgtcaccgcgctcggtctggatctcaagaaggtgctggagtgcatgggcgaccccgaggccgacgccgacaacgccgtcctgtccaaggagcaggaagaccagatcggtagcggatcgcgaggcgacgtcaccatcctgccgaccctggtcatcaacaacgtccagtacagagggaaattggagcggacggcagtgctgaaggccgtgtgcgccggcttcaaggaagggaccgagccccgcgtctgcctcagccatgacatcgagacgaacgagtgcctgcacaggaacggcgggtgctggcgcgacgaggccaccaacgtgacggcctgccaggacacgtaccggggccgggtgtgcgagtgccccgtggtgaacggcgtccgctacgagggcgacggctacactgactgcaaagctattgggccgggcaggtgcgctctcaacaacggcgggtgctggtcggcgacgcgagggcaccagaccttctccgcctgcacggagaccgcgctgacagggtgccggtgcccgccggggttccatggcgacggccacaaatgtgaagacctggacgagtgcagggagaagctggcgtgcacgtgcccggactgccagtgcaagaacacgtggggcaactacgagtgcaagtgcaagggcaaccagctctacatccggggcgaggacgtctgcatagctaacagcatgtcgaagctcggctggttcatcaccatcgcggccgtggcgtgcgtcctcggcgtcggggtcgccggctacgtcttctacaagtacaggctcaggtcgtacatggactcggagatcatgtccatcatgtcccagtacatgccgctggacagccagaacaacgagaaccagcctctgcggcagcacgattcggaggctctgaggcactaaaggggccccaatgcaagatgcgcacatgatctcgacagatataatctgctccggtttcgacgacgatggtttgcttcgcttttgtatagcgcgtagaaaacaaaaaggaggacggtttgtactgtgccgaggacagagttgagctctagagagtttagacaggtaggcatttcgctcggctctcttgggagctagtagtcttgtgggtcaagagccgtttaaagcacacaaacagcatgtagaaaaaaaaggcgtatacgagctgctatacatgtacattgtacagtagacaaatcctactacggacaatttgttactgccatatttggtatgcgcgggagtttcaccttatgattggtaggagtaaggagtgtactatactgtactgcattaaaaattgtgtggaatgggactgcagccttgcaaagtaactgtagaaaataactggcctagaaatggctaggtggcccatagcacaagaaaacgtaaagtgtaaacccatacatagagtggtactagtcaagtgtctgtgcgttgcaacgacacacaaattattcgtgcacaatgattacataaaaacaagtaacacatattatcgatcacaatcttataaattctctgaaaacaacaaatgaagaattaaactaatacaaatcaatttacaatacaatgtgaaaatcacaaaaataacgtctaagtgagtacaatgtttgtgcattgtgaggattgtaatggtaatgaagtgaatatatattaaaattcatactaaaaggacgggaataacaagtgagagaatttttttgaatctttgtttattatcctaaactcgagtatttgcaaataacatcacatatattgtatataaaccgagaattaaaactgaagataaactgagaagcaacccaattaagccaccttttcggaaatgagctggaaatccaaccatgaaatgaacatgtacaatagacagaaatatatatagaccataatagaactaactactactctagacccgtggggaatgcaacaattcagaattaaaaatgaagacgaagtcgaaaacctatactatgaatctttataggaacctcggttttagtaggctacgtttaaatgaatggacatttcagaacagctgacttaagttcacggatcatagcactttgtcaatgaatttctaaacacgatctgtatatagcttcttaacagaacaaccaatttaag

SEQ ID NO: 80548 - DNA, 2922 bp, Zea Mays
ctgaagcatcagctgtccactaacatttttttaatgctacttcgcgctcaaggcgtggaacgcgcagcgcgcgggcgcggcggcggtgctgatcgcggacagcgtggacgagcagctgctgacgatggacagcccggaggcgtcgccgggcacggagtacatcgacaagatcaacatcccgtcggcgctggtgaaccgcgcgttcggcgagtccctgaaaaagatggcgcagaaggtggccggcgcgggcagcgaggaggtggtggtgaagctggactggcgggagtcgatgcctcacccggacgagcgcgtggagtacgagctgtggaccaacagcaacgacgagtgcggcgcgcggtgcgacgagcagatggcgttcgtgcgcggcttccgcggccacgcgcagctcctggagcgcgccgggtacgcgcgcttcacgccgcactacatcacctggtactgccccgaggcgttccgggcgacgcagcagtgccggtcgcagtgcatcaaccgcggcaggtactgcgcgcccgacccggagggggacttcggcgccggctacgagggcaaggacgtggtggtggagaacctgcgccagctctgcgtgcaccgcgtcgccaacgaaacgggccgcccctgggcctggtgggactacgtcatggactacaagatccggtgctccatgaaggagaagaagtacaccaagacctgcgccgaggacgtcgtcaccgcgctcggtctggatctcaagaaggtgctggagtgcatgggcgaccccgaggccgacgccgacaacgccgtcctgtccaaggagcaggaagaccagatcggtagcggatcgcgaggcgacgtcaccatcctgccgaccctggtcatcaacaacgtccagtacagagggaaattggagcggacggcagtgctgaaggccgtgtgcgccggcttcaaggaagggaccgagccccgcgtctgcctcagccatgacatcgagacgaacgagtgcctgcacaggaacggcgggtgctggcgcgacgaggccaccaacgtgacggcctgccaggacacgtaccggggccgggtgtgcgagtgccccgtggtgaacggcgtccgctacgagggcgacggctacactgactgcaaagctattgggccgggcaggtgcgctctcaacaacggcgggtgctggtcggcgacgcgagggcaccagaccttctccgcctgcacggagaccgcgctgacagggtgccggtgcccgccggggttccatggcgacggccacaaatgtgaagccgaccggacagcaagaatggccgaactaatcgagatgcccccgatccgtgtcgtcctcctccagacctggacgagtgcagggagaagctggcgtgcacgtgcccggactgccagtgcaagaacacgtggggcaactacgagtgcaagtgcaagggcaaccagctctacatccggggcgaggacgtctgcatagctaacagcatgtcgaagctcggctggttcatcaccatcgcggccgtggcgtgcgtcctcggcgtcggggtcgccggctacgtcttctacaagtacaggctcaggtcgtacatggactcggagatcatgtccatcatgtcccagtacatgccgctggacagccagaacaacgagaaccagcctctgcggcagcacgattcggaggctctgaggcactaaaggggccccaatgcaagatgcgcacatgatctcgacagatataatctgctccggtttcgacgacgatggtttgcttcgcttttgtatagcgcgtagaaaacaaaaaggaggacggtttgtactgtgccgaggacagagttgagctctagagagtttagacaggtaggcatttcgctcggctctcttgggagctagtagtcttgtgggtcaagagccgtttaaagcacacaaacagcatgtagaaaaaaaaggcgtatacgagctgctatacatgtacattgtacagtagacaaatcctactacggacaatttgttactgccatatttggtatgcgcgggagtttcaccttatgattggtaggagtaaggagtgtactatactgtactgcattaaaaattgtgtggaatgggactgcagccttgcaaagtaactgtagaaaataactggcctagaaatggctaggtggcccatagcacaagaaaacgtaaagtgtaaacccatacatagagtggtactagtcaagtgtctgtgcgttgcaacgacacacaaattattcgtgcacaatgattacataaaaacaagtaacacatattatcgatcacaatcttataaattctctgaaaacaacaaatgaagaattaaactaatacaaatcaatttacaatacaatgtgaaaatcacaaaaataacgtctaagtgagtacaatgtttgtgcattgtgaggattgtaatggtaatgaagtgaatatatattaaaattcatactaaaaggacgggaataacaagtgagagaatttttttgaatctttgtttattatcctaaactcgagtatttgcaaataacatcacatatattgtatataaaccgagaattaaaactgaagataaactgagaagcaacccaattaagccaccttttcggaaatgagctggaaatccaaccatgaaatgaacatgtacaatagacagaaatatatatagaccataatagaactaactactactctagacccgtggggaatgcaacaattcagaattaaaaatgaagacgaagtcgaaaacctatactatgaatctttataggaacctcggttttagtaggctacgtttaaatgaatggacatttcagaacagctgacttaagttcacggatcatagcactttgtcaatgaatttctaaacacgatctgtatatagcttcttaacagaacaaccaatttaag

SEQ ID NO: 80549 - DNA, 2001 bp, Zea Mays
ctaaagtctaaagcacacacacacacagagagagagagagagagagagagatagagagacgagcacttcaaggaggaagaagagaccaagattagtaccacttgtactgtacactcctcgttccgcgtgcgaagcgaaccctgttccatgttcttgaatctctctgagcccagtccttgtagctagcagatcagatcgctcaggcggaaagatcgagagaaggtcgccccaggatcgagatctagagcgagaaaggtttaagagggaaaggcgcggcaaggagtcgagagaatagaatgttcccttcctccaagaagcaggccagcaccggtgccgcgaacccaaatgatcggcctatgtgcgggcaaggcggcgactccggcggtctcgtcctcaccaccgaccccaagccccgcctccggtggacacccgagctccatgaccgcttcgtcgatgccgtcgcccagctcggaggcccggacaaggcaacgcccaagaccatcatgagggttatgggagtcaagggcctcaccctctaccacctcaagagtcaccttcagaaattcaggctagggaagcagcacaaggagttgggtgaccatacaggttaggattgtacagcagatgccatgcactaagattctaagactactatatgcttattaattatctagatagagaaattattagaacttgtagcgcatacataatttttgtttccttgccttcttctatctgcttctatatgtgttcccttttccatccttttatgagaacctattatgagttttagattcattcatcacgtacccaaacctagtaacaaagatcatcattttgtctatatatcatgtgtccagtactttcagttgtttgcaatgatagttaattgtagtataaacatatttttcaaaactactgacatatatcatccaatgaattaaccacattcagcaatggagatgcaacgtagcgtggcctcttcttcaggcatgatagcaagaagcatgaacgaccgcagcgtgaatgtgaacgaggccttaaggatccaaatggaagtccaaagaaggctccatggagaactagaggtgcagaagcacctccagatgagggttgaagcccaggggaagtacatgcagtccatcgtggagaaagcataccaagccctcgggtccagcgactgcgccacgtggcccgctgggtacagaactctaggcagccaaggggtccttgacatcggcaccagctccacgagcttctcgtccgtccaggacctgcagtgcttctatggaggaagcagccacatggaccagctcctgcatcagatggagaggccaatggatggcttcctgacgttgggcgagagctgcttcattggctcagcagacaacaaaaaggaccttaataaccattgcagctccagtggcaagagctcgatgatgtgggccagcgaagagcagcaggcaaagagcggcaacgatcagcttcagatggggtcgtcgacaaggatggagggtgcaggcattgatgtcatggatccagtcaccgggctgtacgagggcgccgtgtcgggagactccatggacagcaagggttttgagggttcgaactccaggctcgagatgaagccgcctgcacaacaagcacctgtaggaagtcagaggatacgcatatagtcgtccaatatataatggtttggaactcacgtaaagaactgtatactacaatatatatggataagcaaggtcaagctaaggtatttaaatgcaagtgtcagttttgttgtgaaccatcaaagttcagacgattagcatgtgatcggagttgtagtacatgcagtcattagttttaattgttggatacaagatattatggagatcaattctccatatatatgtttgtttattttgtccctaagattcgccatatatatgctgtattatattggatttgtgtgacaccgttgtaacattgatcagagatcttttgtgggtgcagtgt

SEQ ID NO: 80550 - DNA, 1494 bp, Zea Mays
agagaccaagattagtaccacttctagcagatcagatcgctcaggcggaaagatcgagagaaggtcgccccaggatcgagatctagagcgagaaaggtttaagagggaaaggcgcggcaaggagtcgagagaatagaatgttcccttcctccaagaagcaggccagcaccggtgccgcgaacccaaatgatcggcctatgtgcgggcaaggcggcgactccggcggtctcgtcctcaccaccgaccccaagccccgcctccggtggacacccgagctccatgaccgcttcgtcgatgccgtcgcccagctcggaggcccggacaaggcaacgcccaagaccatcatgagggttatgggagtcaagggcctcaccctctaccacctcaagagtcaccttcagaaattcaggctagggaagcagcacaaggagttgggtgaccatacagcaatggagatgcaacgtagcgtggcctcttcttcaggcatgatagcaagaagcatgaacgaccgcagcgtgaatgtgaacgaggccttaaggatccaaatggaagtccaaagaaggctccatggagaactagaggtgcagaagcacctccagatgagggttgaagcccaggggaagtacatgcagtccatcgtggagaaagcataccaagccctcgggtccagcgactgcgccacgtggcccgctgggtacagaactctaggcagccaaggggtccttgacatcggcaccagctccacgagcttctcgtccgtccaggacctgcagtgcttctatggaggaagcagccacatggaccagctcctgcatcagatggagaggccaatggatggcttcctgacgttgggcgagagctgcttcattggctcagcagacaacaaaaaggaccttaataaccattgcagctccagtggcaagagctcgatgatgtgggccagcgaagagcagcaggcaaagagcggcaacgatcagcttcagatggggtcgtcgacaaggatggagggtgcaggcattgatgtcatggatccagtcaccgggctgtacgagggcgccgtgtcgggagactccatggacagcaagggttttgagggttcgaactccaggctcgagatgaagccgcctgcacaacaagcacctgtaggaagtcagaggatacgcatatagtcgtccaatatataatggtttggaactcacgtaaagaactgtatactacaatatatatggataagcaaggtcaagctaaggtatttaaatgcaagtgtcagttttgttgtgaaccatcaaagttcagacgattagcatgtgatcggagttgtagtacatgcagtcattagttttaattgttggatacaagatattatggagatcaattctccatatatatgtttgtttattttgtccctaagattcgccatatatatgctgtattatattggatttgtgtgacaccgttgtaacattgatcagagatcttttgtgggtgcagtgt

SEQ ID NO: 80551 - DNA, 2065 bp, Zea Mays
gggagatactagttaaaatatccccaaactgtcgacgccggctcgacacgaacccaacccagtcgaaccacctcgccagtgagcgcctccccccgtcctctttccctgctggccagaactccgaatgaaatcgctgctccaccagctttctttaccttcaggaagcgagccggtagcatcaagctagatcgcggagaagctcctcgtttcccccatcggcgctgctctggcggggagaagcgtcctctcacggcggccgggaagaccaatccgcgccgccagtccctgcggcggcttccgtgaggtggtcttggctcctggggcggcgtgttcgtggtggccggcgagatgagcagccacgcggttggaacaagcaacggcggatccggggatgcggccgccgggggcgcggccaggaggaacaccaggatgcccaaatattccaagttcacacagcaggagctgcccgcttgcaagccgattcttactccaaaatgggttgtctctgttttcttaatcgttggggtcatctttgttcctattggtgttgtttcactgctagctgcaagagatgttgttgagattattgatcggtatgatgaggcatgtgtgccagttaacatgactgagaacaagcttgcttacatccagaatgagaccatatccaaagagtgcataaggaatcttacggttacaaaatatatgaagcagcctatttttgtgtattatgaacttgataacttctatcagaaccataggaggtatggtgttttttaagatttgcatgcaatcatttgaatctttaccccttggtacgaattgacagctcttgctttcctgatgttgatgaattatcatttgcaatcgtgatgctattttatttggaaaacatgatacaacaattttactgctaacttggatatcttaccgccaaaggaaaagaagtgaatagtctttcatttgagatttaccatgcacttccctggttcagatatgtaaagagccgaaatgatgcgcaactaagagatgctagtaaagctaaccagacatccgcttgtgaacctgagaagaccacagctaatgggcaaccaattgttccttgcggccttattgcttggagcttgtttaatgatacatataatttcactcgtggtaatgagaacttgacagtggacaagaaagacatctcctggaagagtgatagggagcataaatttggtaaagatgtctatccgagcaacttccagaatggtgcacttaaaggtggagcaacacttaacccaaagatcccgttgagtgagcaagaggacctcattgtttggatgcggaccgcagcacttccgacgttcagaaagttatatggcagactatactttgacctcaaggagaatgacacaataacagtgagattgaataacaactacaatacatatagctttggtggcaagaaaaagctggtcctctccactgcaacctggcttggggggaagaacgattttcttggctttgcataccttatagttggtgggctctgcattttcctggcatttgcattcaccttgctgtacttcgtaaaaccaaggaaactgggagaccacaactacttatcctggaacagacgctaggatgtttcggaacaccaagtgtccgtactactcgaaatgtagcttgtatgaaatgaaatgctctgaaccagaaatgtcgatgggcataagcaagcatggttcaggaaagaacttcatgtatattttttacgaaggggtctaggtggctacgttatttttgtttcttgtgttctttagtgtagcactgaacaggagaataccaattgatctctattagcttgcttcgtggtacaagcactctaaatggttgactgtgtggtgttgacgctttggctgccgaagaataccaattaatgatgttggttgactgtaatatcctcaagtgggaacagtaccaacttctgtataaattgattaccgtgtgatgtttgtttctccactaccattatagtacacgggtgcctatcattgtcatctattcacggtcagaatgcctttct

SEQ ID NO: 80552 - DNA, 1760 bp, Zea Mays
ctagttaaaatatccccaaactgtcgacgccggctcgacacgaacccaacccagtcgaaccacctcgccactttctttaccttcaggaagcgagccggtagcatcaagctagatcgcggagaagctcctcgtttcccccatcggcgctgctctggcggggagaagcgtcctctcacggcggccgggaagaccaatccgcgccgccagtccctgcggcggcttccgtgaggtggtcttggctcctggggcggcgtgttcgtggtggccggcgagatgagcagccacgcggttggaacaagcaacggcggatccggggatgcggccgccgggggcgcggccaggaggaacaccaggatgcccaaatattccaagttcacacagcaggagctgcccgcttgcaagccgattcttactccaaaatgggttgtctctgttttcttaatcgttggggtcatctttgttcctattggtgttgtttcactgctagctgcaagagatgttgttgagattattgatcggtatgatgaggcatgtgtgccagttaacatgactgagaacaagcttgcttacatccagaatgagaccatatccaaagagtgcataaggaatcttacggttacaaaatatatgaagcagcctatttttgtgtattatgaacttgataacttctatcagaaccataggagatatgtaaagagccgaaatgatgcgcaactaagagatgctagtaaagctaaccagacatccgcttgtgaacctgagaagaccacagctaatgggcaaccaattgttccttgcggccttattgcttggagcttgtttaatgatacatataatttcactcgtggtaatgagaacttgacagtggacaagaaagacatctcctggaagagtgatagggagcataaatttggtaaagatgtctatccgagcaacttccagaatggtgcacttaaaggtggagcaacacttaacccaaagatcccgttgagtgagcaagaggacctcattgtttggatgcggaccgcagcacttccgacgttcagaaagttatatggcagactatactttgacctcaaggagaatgacacaataacagtgagattgaataacaactacaatacatatagctttggtggcaagaaaaagctggtcctctccactgcaacctggcttggggggaagaacgattttcttggctttgcataccttatagttggtgggctctgcattttcctggcatttgcattcaccttgctgtacttcgtaaaaccaaggaaactgggagaccacaactacttatcctggaacagacgctaggatgtttcggaacaccaagtgtccgtactactcgaaatgtagcttgtatgaaatgaaatgctctgaaccagaaatgtcgatgggcataagcaagcatggttcaggaaagaacttcatgtatattttttacgaaggggtctaggtggctacgttatttttgtttcttgtgttctttagtgtagcactgaacaggagaataccaattgatctctattagcttgcttcgtggtacaagcactctaaatggttgactgtgtggtgttgacgctttggctgccgaagaataccaattaatgatgttggttgactgtaatatcctcaagtgggaacagtaccaacttctgtataaattgattaccgtgtgatgtttgtttctccactaccattatagtacacgggtgcctatcattgtcatctattcacggtcagaatgcctttct

SEQ ID NO: 80553 - DNA, 1678 bp, Zea Mays
ccaaactgtcgacgccggctcgacacgaacccaacccagtcgaaccacctcgccagtgagcgcctccccccgtcctctttccctgctggccagaactccgaatgaaatcgctgctccaccagctttctttaccttcaggaagcgagccggtagcatcaagctagatcgcggagaagctcctcgtttcccccatcggcgctgctctggcggggagaagcgtcctctcacggcggccgggaagaccaatccgcgccgccagtccctgcggcggcttccgtgaggtggtcttggctcctggggcggcgtgttcgtggtggccggcgagatgagcagccacgcggttggaacaagcaacggcggatccggggatgcggccgccgggggcgcggccaggaggaacaccaggatgcccaaatgttgttgagattattgatcggtatgatgaggcatgtgtgccagttaacatgactgagaacaagcttgcttacatccagaatgagaccatatccaaagagtgcataaggaatcttacggttacaaaatatatgaagcagcctatttttgtgtattatgaacttgataacttctatcagaaccataggagatatgtaaagagccgaaatgatgcgcaactaagagatgctagtaaagctaaccagacatccgcttgtgaacctgagaagaccacagctaatgggcaaccaattgttccttgcggccttattgcttggagcttgtttaatgatacatataatttcactcgtggtaatgagaacttgacagtggacaagaaagacatctcctggaagagtgatagggagcataaatttggtaaagatgtctatccgagcaacttccagaatggtgcacttaaaggtggagcaacacttaacccaaagatcccgttgagtgagcaagaggacctcattgtttggatgcggaccgcagcacttccgacgttcagaaagttatatggcagactatactttgacctcaaggagaatgacacaataacagtgagattgaataacaactacaatacatatagctttggtggcaagaaaaagctggtcctctccactgcaacctggcttggggggaagaacgattttcttggctttgcataccttatagttggtgggctctgcattttcctggcatttgcattcaccttgctgtacttcgtaaaaccaaggaaactgggagaccacaactacttatcctggaacagacgctaggatgtttcggaacaccaagtgtccgtactactcgaaatgtagcttgtatgaaatgaaatgctctgaaccagaaatgtcgatgggcataagcaagcatggttcaggaaagaacttcatgtatattttttacgaaggggtctaggtggctacgttatttttgtttcttgtgttctttagtgtagcactgaacaggagaataccaattgatctctattagcttgcttcgtggtacaagcactctaaatggttgactgtgtggtgttgacgctttggctgccgaagaataccaattaatgatgttggttgactgtaatatcctcaagtgggaacagtaccaacttctgtataaattgattaccgtgtgatgtttgtttctccactaccattatagtacacgggtgcctatcattgtcatctattcacggtcagaatgcctttct

SEQ ID NO: 80554 - DNA, 1953 bp, Zea Mays
ggtcgcagttttgcacaaagatcctctgtcttttcgcgatttagctcgtgctcctccctcgacgtggtctccggaatccagatctgtatcacgggaagcacatctgctggcctacaccagattcttccatggttgtattatcacaatgtcattggtgtttcacatttctttctattagttgaaggagaggctgcaaagccagctgtcacctctgttcttgaatctattcaggatgctagaatggattggatcattcacctcgatactgatgagttgattcatccagctggtgcccgagagtactccctgaggcgattgcttttagatgttcctgacaacgttgacatggttatcttccccaattatgaaagcagcattgactgtatgacattaaggatccttttactgaggtatagaactactgttatctgtaacatatattcaaaagaaagggaaaaatgctctgtatcctattgatgatccactggcttgagaaacaaagtgccacctgtacgtaactggatatagtttcactgtctagaaaaaaactatagtttagcaaacactacacataactactctcattaatgcattgcaggaattgataggattggtcggattatcgttggctgtgtttgataggttgcatgttttataaattcttttgtgcctgcaggtttccatgtttaagaaatatctttacgatttcatttttcacaatatgcatatggtatcataactctcgaaatgctcacggaaattgtcatgagtggaaacgatttcatttttcgcatatgcatgtagtatcttttttttaactgaaattgtatgacaggatgtagttatgtctgaatcagatacaatattttaccttcttcatgtgccttgtactcatcacagaaatgtttcctcatggtccattctccagcatacaatgtatagccagccatgccagagaaccatataggtgtcttttgaatggcccctttcttactgtgcattggtggctaactggataactgactcggagagctaatgagtaatgaatcctcccgtgtattgtgtcatggcaggcctttataattgcatcgacagcaactgaggaggagatggggaactggctatcattcgtggcctcaaggaacccgacgtctttaccaatgcagtaacatcagcgaaagcacagtcgaaaacgaagccgtcaaacatgggtctcggaaacaaggaggctatggccatccaaccgaacgtaactgctggtcagtccacactggaaggtggtcacgagaggttacaggcaaccgtaagaaagatcttggaaatggtggacgcccaggaacaggaagaagcaatgccgccgaggccgtcccctggtttgctcgagctctcggaacgcgccactgctttgtcatgacgacttgacgacgctgtgaggttctggaggcgttattaagcatggactcgggttgtttaaccatgctaggtgatacagcgcccgatagggcgctattttttctagtttctttaatgtagcctgcagtctgcacgctgtgccattgtggatagatcgatcgagcctggtgcatatgccccaccatatatatgtttaattaaccttgcacgttaaagagtccctttccataatcaagggaaaaaacttaaaaaatgacggtcaaattttctactattgagcgtgggtttaactctgacggatctagaatgtcacatgccaacggtgttttttttttgaagtggtctaagagttgatagattttatatgtatccacgatggctttgccaatctaaaaaatctgacgattcagtctatcggggttaatatgcacaaatgtatgttagggctatatattcttttagtaaatggatatcaagctcacaataagctggtctattaagggcttgtttgattagctctcaatctatatagattgagtg

SEQ ID NO: 80555 - DNA, 2165 bp, Zea Mays
ggtcgcagttttgcacaaagatcctctgtcttttcgcgatttagctcgtgctcctccctcgacgtggtctccggaatccagatctgtatcacgggaagcacatctgctggcctacaccagattcttccatggttgtattatcacaatgtcattggtgtttcacatttctttctattagttgaaggagaggctgcaaagccagctgtcacctctgttcttgaatctattcagccgcatttggaatgagacttggctagcaggtttcttttacaagccgtgtaattacgaactatttgtcaagcaatcactaaacatggaaatggctattattatggcaagggatgctagaatggattggatcattcacctcgatactgatgagttgattcatccagctggtgcccgagagtactccctgaggcgattgcttttagatgttcctgacaacgttgacatggttatcttccccaattatgaaagcagcattgactgtatgacattaaggatccttttactgaggtatagaactactgttatctgtaacatatattcaaaagaaagggaaaaatgctctgtatcctattgatgatccactggcttgagaaacaaagtgccacctgtacgtaactggatatagtttcactgtctagaaaaaaactatagtttagcaaacactacacataactactctcattaatgcattgcaggaattgataggattggtcggattatcgttggctgtgtttgataggttgcatgttttataaattcttttgtgcctgcaggtttccatgtttaagaaatatctttacgatttcatttttcacaatatgcatatggtatcataactctcgaaatgctcacggaaattgtcatgagtggaaacgatttcatttttcgcatatgcatgtagtatcttttttttaactgaaattgtatgacaggatgtagttatgtctgaatcagatacaatattttaccttcttcatgtgccttgtactcatcacagaaatgtttcctcatggtccattctccagcatacaatgtatagccagccatgccagagaaccatataggtgtcttttgaatggcccctttcttactgtgcattggtggctaactggataactgactcggagagctaatgagtaatgaatcctcccgtgtattgtgtcatggcaggcctttataattgcatcgacagcaactgaggaggagatggggaactggtaacacccttagccctccgtgtaccaagcatcgaccattcctccctatcctacctgaattaagagagatcatcacattggtctgatgattacctttgttcaggctatcattcgtggcctcaaggaacccgacgtctttaccaatgcagtaacatcagcgaaagcacagtcgaaaacgaagccgtcaaacatgggtctcggaaacaaggaggctatggccatccaaccgaacgtaactgctggtcagtccacactggaaggtggtcacgagaggttacaggcaaccgtaagaaagatcttggaaatggtggacgcccaggaacaggaagaagcaatgccgccgaggccgtcccctggtttgctcgagctctcggaacgcgccactgctttgtcatgacgacttgacgacgctgtgaggttctggaggcgttattaagcatggactcgggttgtttaaccatgctaggtgatacagcgcccgatagggcgctattttttctagtttctttaatgtagcctgcagtctgcacgctgtgccattgtggatagatcgatcgagcctggtgcatatgccccaccatatatatgtttaattaaccttgcacgttaaagagtccctttccataatcaagggaaaaaacttaaaaaatgacggtcaaattttctactattgagcgtgggtttaactctgacggatctagaatgtcacatgccaacggtgttttttttttgaagtggtctaagagttgatagattttatatgtatccacgatggctttgccaatctaaaaaatctgacgattcagtctatcggggttaatatgcacaaatgtatgttagggctatatattcttttagtaaatggatatcaagctcacaataagctggtctattaagggcttgtttgattagctctcaatctatatagattgagtg

SEQ ID NO: 80556 - DNA, 2089 bp, Zea Mays
ggtcgcagttttgcacaaagatcctctgtcttttcgcgatttagctcgtgctcctccctcgacgtggtctccggaatccagatctgtatcacgggaagcacatctgctggcctacaccagattcttccatggttgtattatcacaatgtcattggtgtttcacatttctttctattagttgaaggagaggctgcaaagccagctgtcacctctgttcttgaatctattcagccgcatttggaatgagacttggctagcaggtttcttttacaagccgtgtaattacgaactatttgtcaagcaatcactaaacatggaaatggctattattatggcaagggatgctagaatggattggatcattcacctcgatactgatgagttgattcatccagctggtgcccgagagtactccctgaggcgattgcttttagatgttcctgacaacgttgacatggttatcttccccaattatgaaagcagcattgactgtatgacattaaggatccttttactgaggtatagaactactgttatctgtaacatatattcaaaagaaagggaaaaatgctctgtatcctattgatgatccactggcttgagaaacaaagtgccacctgtacgtaactggatatagtttcactgtctagaaaaaaactatagtttagcaaacactacacataactactctcattaatgcattgcaggaattgataggattggtcggattatcgttggctgtgtttgataggttgcatgttttataaattcttttgtgcctgcaggtttccatgtttaagaaatatctttacgatttcatttttcacaatatgcatatggtatcataactctcgaaatgctcacggaaattgtcatgagtggaaacgatttcatttttcgcatatgcatgtagtatcttttttttaactgaaattgtatgacaggatgtagttatgtctgaatcagatacaatattttaccttcttcatgtgccttgtactcatcacagaaatgtttcctcatggtccattctccagcatacaatgtatagccagccatgccagagaaccatataggtgtcttttgaatggcccctttcttactgtgcattggtggctaactggataactgactcggagagctaatgagtaatgaatcctcccgtgtattgtgtcatggcaggcctttataattgcatcgacagcaactgaggaggagatggggaactggtaccgggaacataactatgccccatggctatcattcgtggcctcaaggaacccgacgtctttaccaatgcagtaacatcagcgaaagcacagtcgaaaacgaagccgtcaaacatgggtctcggaaacaaggaggctatggccatccaaccgaacgtaactgctggtcagtccacactggaaggtggtcacgagaggttacaggcaaccgtaagaaagatcttggaaatggtggacgcccaggaacaggaagaagcaatgccgccgaggccgtcccctggtttgctcgagctctcggaacgcgccactgctttgtcatgacgacttgacgacgctgtgaggttctggaggcgttattaagcatggactcgggttgtttaaccatgctaggtgatacagcgcccgatagggcgctattttttctagtttctttaatgtagcctgcagtctgcacgctgtgccattgtggatagatcgatcgagcctggtgcatatgccccaccatatatatgtttaattaaccttgcacgttaaagagtccctttccataatcaagggaaaaaacttaaaaaatgacggtcaaattttctactattgagcgtgggtttaactctgacggatctagaatgtcacatgccaacggtgttttttttttgaagtggtctaagagttgatagattttatatgtatccacgatggctttgccaatctaaaaaatctgacgattcagtctatcggggttaatatgcacaaatgtatgttagggctatatattcttttagtaaatggatatcaagctcacaataagctggtctattaagggcttgtttgattagctctcaatctatatagattgagtg

SEQ ID NO: 80557 - DNA, 2502 bp, Zea Mays
ggtcgcagttttgcacaaagatcctctgtcttttcgcgatttagctcgtgctcctccctcgacgtggtctccggaatccaggtgcaaatccctccctccctcccagtccccctccccacctccctctccgcgcggcggctgccgtcaaagccgccggggctgtccctccctccctcccagcccccctccccacctccctctccgcgcggcggctgccgtcgaagccgccggggccgtccaccaccaacccctacccgctcttcgccaaccctcgcctcctgcgccgccgcctggcgctctccggcgctggcgccgaccaagccccgcgccgcgccgcgccgaccccagccgccgcgggtgagggcccctccgccctcctccaccgaggacccggtccttgtccgcgtcgccgacgaaggcgtgccgctcgagggcgtcatccagattgagaagctcggggatgcggccgccgagtccaagctcgtctcctacggatctgtatcacgggaagcacatctgctggcctacaccagattcttccatggttgtattatcacaatgtcattggtgtttcacatttctttctattagttgaaggagaggctgcaaagccagctgtcacctctgttcttgaatctattcagccgcatttggaatgagacttggctagcaggtttcttttacaagccgtgtaattacgaactatttgtcaagcaatcactaaacatggaaatggctattattatggcaagggatgctagaatggattggatcattcacctcgatactgatgagttgattcatccagctggtgcccgagagtactccctgaggcgattgcttttagatgttcctgacaacgttgacatggttatcttccccaattatgaaagcagcattgactgtatgacattaaggatccttttactgaggtatagaactactgttatctgtaacatatattcaaaagaaagggaaaaatgctctgtatcctattgatgatccactggcttgagaaacaaagtgccacctgtacgtaactggatatagtttcactgtctagaaaaaaactatagtttagcaaacactacacataactactctcattaatgcattgcaggaattgataggattggtcggattatcgttggctgtgtttgataggttgcatgttttataaattcttttgtgcctgcaggtttccatgtttaagaaatatctttacgatttcatttttcacaatatgcatatggtatcataactctcgaaatgctcacggaaattgtcatgagtggaaacgatttcatttttcgcatatgcatgtagtatcttttttttaactgaaattgtatgacaggatgtagttatgtctgaatcagatacaatattttaccttcttcatgtgccttgtactcatcacagaaatgtttcctcatggtccattctccagcatacaatgtatagccagccatgccagagaaccatataggtgtcttttgaatggcccctttcttactgtgcattggtggctaactggataactgactcggagagctaatgagtaatgaatcctcccgtgtattgtgtcatggcaggcctttataattgcatcgacagcaactgaggaggagatggggaactggtaccgggaacataactatgccccatggctatcattcgtggcctcaaggaacccgacgtctttaccaatgcagtaacatcagcgaaagcacagtcgaaaacgaagccgtcaaacatgggtctcggaaacaaggaggctatggccatccaaccgaacgtaactgctggtcagtccacactggaaggtggtcacgagaggttacaggcaaccgtaagaaagatcttggaaatggtggacgcccaggaacaggaagaagcaatgccgccgaggccgtcccctggtttgctcgagctctcggaacgcgccactgctttgtcatgacgacttgacgacgctgtgaggttctggaggcgttattaagcatggactcgggttgtttaaccatgctaggtgatacagcgcccgatagggcgctattttttctagtttctttaatgtagcctgcagtctgcacgctgtgccattgtggatagatcgatcgagcctggtgcatatgccccaccatatatatgtttaattaaccttgcacgttaaagagtccctttccataatcaagggaaaaaacttaaaaaatgacggtcaaattttctactattgagcgtgggtttaactctgacggatctagaatgtcacatgccaacggtgttttttttttgaagtggtctaagagttgatagattttatatgtatccacgatggctttgccaatctaaaaaatctgacgattcagtctatcggggttaatatgcacaaatgtatgttagggctatatattcttttagtaaatggatatcaagctcacaataagctggtctattaagggcttgtttgattagctctcaatctatatagattgagtg

SEQ ID NO: 80558 - DNA, 2393 bp, Zea Mays
ggtcgcagttttgcacaaagatcctctgtcttttcgcgatttagctcgtgctcctccctcgacgtggtctccggaatccaggtgcaaatccctccctccctcccagtccccctccccacctccctctccgcgcggcggctgccgtcaaagccgccggggctgtccctccctccctcccagcccccctccccacctccctctccgcgcggcggctgccgtcgaagccgccggggccgtccaccaccaacccctacccgctcttcgccaaccctcgcctcctgcgccgccgcctggcgctctccggcgctggcgccgaccaagccccgcgccgcgccgcgccgaccccagccgccgcgggtgagggcccctccgccctcctccaccgaggacccggtccttgtccgcgtcgccgacgaaggcgtgccgctcgagggcgtcatccagattgagaagctcggggatgcggccgccgagtccaagctcgtctcctacggatctgtatcacgggaagcacatctgctggcctacaccagattcttccatggttgtattatcacaatgtcattggtgtttcacatttctttctattagttgaaggagaggctgcaaagccagctgtcacctctgttcttgaatctattcaggatgctagaatggattggatcattcacctcgatactgatgagttgattcatccagctggtgcccgagagtactccctgaggcgattgcttttagatgttcctgacaacgttgacatggttatcttccccaattatgaaagcagcattgactgtatgacattaaggatccttttactgaggtatagaactactgttatctgtaacatatattcaaaagaaagggaaaaatgctctgtatcctattgatgatccactggcttgagaaacaaagtgccacctgtacgtaactggatatagtttcactgtctagaaaaaaactatagtttagcaaacactacacataactactctcattaatgcattgcaggaattgataggattggtcggattatcgttggctgtgtttgataggttgcatgttttataaattcttttgtgcctgcaggtttccatgtttaagaaatatctttacgatttcatttttcacaatatgcatatggtatcataactctcgaaatgctcacggaaattgtcatgagtggaaacgatttcatttttcgcatatgcatgtagtatcttttttttaactgaaattgtatgacaggatgtagttatgtctgaatcagatacaatattttaccttcttcatgtgccttgtactcatcacagaaatgtttcctcatggtccattctccagcatacaatgtatagccagccatgccagagaaccatataggtgtcttttgaatggcccctttcttactgtgcattggtggctaactggataactgactcggagagctaatgagtaatgaatcctcccgtgtattgtgtcatggcaggcctttataattgcatcgacagcaactgaggaggagatggggaactggtaccgggaacataactatgccccatggctatcattcgtggcctcaaggaacccgacgtctttaccaatgcagtaacatcagcgaaagcacagtcgaaaacgaagccgtcaaacatgggtctcggaaacaaggaggctatggccatccaaccgaacgtaactgctggtcagtccacactggaaggtggtcacgagaggttacaggcaaccgtaagaaagatcttggaaatggtggacgcccaggaacaggaagaagcaatgccgccgaggccgtcccctggtttgctcgagctctcggaacgcgccactgctttgtcatgacgacttgacgacgctgtgaggttctggaggcgttattaagcatggactcgggttgtttaaccatgctaggtgatacagcgcccgatagggcgctattttttctagtttctttaatgtagcctgcagtctgcacgctgtgccattgtggatagatcgatcgagcctggtgcatatgccccaccatatatatgtttaattaaccttgcacgttaaagagtccctttccataatcaagggaaaaaacttaaaaaatgacggtcaaattttctactattgagcgtgggtttaactctgacggatctagaatgtcacatgccaacggtgttttttttttgaagtggtctaagagttgatagattttatatgtatccacgatggctttgccaatctaaaaaatctgacgattcagtctatcggggttaatatgcacaaatgtatgttagggctatatattcttttagtaaatggatatcaagctcacaataagctggtctattaagggcttgtttgattagctctcaatctatatagattgagtg

SEQ ID NO: 80559 - DNA, 2447 bp, Zea Mays
ggtcgcagttttgcacaaagatcctctgtcttttcgcgatttagctcgtgctcctccctcgacgtggtctccggaatccaggtgcaaatccctccctccctcccagtccccctccccacctccctctccgcgcggcggctgccgtcaaagccgccggggctgtccctccctccctcccagcccccctccccacctccctctccgcgcggcggctgccgtcgaagccgccggggccgtccaccaccaacccctacccgctcttcgccaaccctcgcctcctgcgccgccgcctggcgctctccggcgctggcgccgaccaagccccgcgccgcgccgcgccgaccccagccgccgcgggtgagggcccctccgccctcctccaccgaggacccggtccttgtccgcgtcgccgacgaaggcgtgccgctcgagggcgtcatccagattgagaagctcggggatgcggccgccgagtccaagctcgtctcctacggatctgtatcacgggaagcacatctgctggcctacaccagattcttccatggttgtattatcacaatgtcattggtgtttcacatttctttctattagttgaaggagaggctgcaaagccagctgtcacctctgttcttgaatctattcagccgcatttggaatgagacttggctagcaggtttcttttacaagccgtgtaattacgaactatttgtcaagcaatcactaaacatggaaatggctattattatggcaaggctggtgcccgagagtactccctgaggcgattgcttttagatgttcctgacaacgttgacatggttatcttccccaattatgaaagcagcattgactgtatgacattaaggatccttttactgaggtatagaactactgttatctgtaacatatattcaaaagaaagggaaaaatgctctgtatcctattgatgatccactggcttgagaaacaaagtgccacctgtacgtaactggatatagtttcactgtctagaaaaaaactatagtttagcaaacactacacataactactctcattaatgcattgcaggaattgataggattggtcggattatcgttggctgtgtttgataggttgcatgttttataaattcttttgtgcctgcaggtttccatgtttaagaaatatctttacgatttcatttttcacaatatgcatatggtatcataactctcgaaatgctcacggaaattgtcatgagtggaaacgatttcatttttcgcatatgcatgtagtatcttttttttaactgaaattgtatgacaggatgtagttatgtctgaatcagatacaatattttaccttcttcatgtgccttgtactcatcacagaaatgtttcctcatggtccattctccagcatacaatgtatagccagccatgccagagaaccatataggtgtcttttgaatggcccctttcttactgtgcattggtggctaactggataactgactcggagagctaatgagtaatgaatcctcccgtgtattgtgtcatggcaggcctttataattgcatcgacagcaactgaggaggagatggggaactggtaccgggaacataactatgccccatggctatcattcgtggcctcaaggaacccgacgtctttaccaatgcagtaacatcagcgaaagcacagtcgaaaacgaagccgtcaaacatgggtctcggaaacaaggaggctatggccatccaaccgaacgtaactgctggtcagtccacactggaaggtggtcacgagaggttacaggcaaccgtaagaaagatcttggaaatggtggacgcccaggaacaggaagaagcaatgccgccgaggccgtcccctggtttgctcgagctctcggaacgcgccactgctttgtcatgacgacttgacgacgctgtgaggttctggaggcgttattaagcatggactcgggttgtttaaccatgctaggtgatacagcgcccgatagggcgctattttttctagtttctttaatgtagcctgcagtctgcacgctgtgccattgtggatagatcgatcgagcctggtgcatatgccccaccatatatatgtttaattaaccttgcacgttaaagagtccctttccataatcaagggaaaaaacttaaaaaatgacggtcaaattttctactattgagcgtgggtttaactctgacggatctagaatgtcacatgccaacggtgttttttttttgaagtggtctaagagttgatagattttatatgtatccacgatggctttgccaatctaaaaaatctgacgattcagtctatcggggttaatatgcacaaatgtatgttagggctatatattcttttagtaaatggatatcaagctcacaataagctggtctattaagggcttgtttgattagctctcaatctatatagattgagtg

SEQ ID NO: 80560 - DNA, 1730 bp, Zea Mays
ggtcgcagttttgcacaaagatcctctgtcttttcgcgatttagctcgtgctcctccctcgacgtggtctccggaatccaggtgcaaatccctccctccctcccagtccccctccccacctccctctccgcgcggcggctgccgtcaaagccgccggggctgtccctccctccctcccagcccccctccccacctccctctccgcgcggcggctgccgtcgaagccgccggggccgtccaccaccaacccctacccgctcttcgccaaccctcgcctcctgcgccgccgcctggcgctctccggcgctggcgccgaccaagccccgcgccgcgccgcgccgaccccagccgccgcgggtgagggcccctccgccctcctccaccgaggacccggtccttgtccgcgtcgccgacgaaggcgtgccgctcgagggcgtcatccagattgagaagctcggggatgcggccgccgagtccaagctcgtctcctacggatctgtatcacgggaagcacatctgctggcctacaccagattcttccatggttgtattatcacaatgtcattggtgtttcacatttctttctattagttgaaggagaggctgcaaagccagctgtcacctctgttcttgaatctattcaggatgctagaatggattggatcattcacctcgatactgatgagttgattcatccagctggtgcccgagagtactccctgaggcgattgcttttagatgttcctgacaacgttgacatggttatcttccccaattatgaaagcagcattgactgtatgacattaaggatccttttactgaggcctttataattgcatcgacagcaactgaggaggagatggggaactggtaccgggaacataactatgccccatggctatcattcgtggcctcaaggaacccgacgtctttaccaatgcagtaacatcagcgaaagcacagtcgaaaacgaagccgtcaaacatgggtctcggaaacaaggaggctatggccatccaaccgaacgtaactgctggtcagtccacactggaaggtggtcacgagaggttacaggcaaccgtaagaaagatcttggaaatggtggacgcccaggaacaggaagaagcaatgccgccgaggccgtcccctggtttgctcgagctctcggaacgcgccactgctttgtcatgacgacttgacgacgctgtgaggttctggaggcgttattaagcatggactcgggttgtttaaccatgctaggtgatacagcgcccgatagggcgctattttttctagtttctttaatgtagcctgcagtctgcacgctgtgccattgtggatagatcgatcgagcctggtgcatatgccccaccatatatatgtttaattaaccttgcacgttaaagagtccctttccataatcaagggaaaaaacttaaaaaatgacggtcaaattttctactattgagcgtgggtttaactctgacggatctagaatgtcacatgccaacggtgttttttttttgaagtggtctaagagttgatagattttatatgtatccacgatggctttgccaatctaaaaaatctgacgattcagtctatcggggttaatatgcacaaatgtatgttagggctatatattcttttagtaaatggatatcaagctcacaataagctggtctattaagggcttgtttgattagctctcaatctatatagattgagtg

SEQ ID NO: 80561 - DNA, 2056 bp, Zea Mays
ggtcgcagttttgcacaaagatcctctgtcttttcgcgatttagctcgtgctcctccctcgacgtggtctccggaatccagatctgtatcacgggaagcacatctgctggcctacaccagattcttccatggttgtattatcacaatgtcattggtgtttcacatttctttctattagttgaaggagaggctgcaaagccagctgtcacctctgttcttgaatctattcaggatgctagaatggattggatcattcacctcgatactgatgagttgattcatccagctggtgcccgagagtactccctgaggcgattgcttttagatgttcctgacaacgttgacatggttatcttccccaattatgaaagcagcattgactgtatgacattaaggatccttttactgaggtatagaactactgttatctgtaacatatattcaaaagaaagggaaaaatgctctgtatcctattgatgatccactggcttgagaaacaaagtgccacctgtacgtaactggatatagtttcactgtctagaaaaaaactatagtttagcaaacactacacataactactctcattaatgcattgcaggaattgataggattggtcggattatcgttggctgtgtttgataggttgcatgttttataaattcttttgtgcctgcaggtttccatgtttaagaaatatctttacgatttcatttttcacaatatgcatatggtatcataactctcgaaatgctcacggaaattgtcatgagtggaaacgatttcatttttcgcatatgcatgtagtatcttttttttaactgaaattgtatgacaggatgtagttatgtctgaatcagatacaatattttaccttcttcatgtgccttgtactcatcacagaaatgtttcctcatggtccattctccagcatacaatgtatagccagccatgccagagaaccatataggtgtcttttgaatggcccctttcttactgtgcattggtggctaactggataactgactcggagagctaatgagtaatgaatcctcccgtgtattgtgtcatggcaggcctttataattgcatcgacagcaactgaggaggagatggggaactggtaacacccttagccctccgtgtaccaagcatcgaccattcctccctatcctacctgaattaagagagatcatcacattggtctgatgattacctttgttcaggctatcattcgtggcctcaaggaacccgacgtctttaccaatgcagtaacatcagcgaaagcacagtcgaaaacgaagccgtcaaacatgggtctcggaaacaaggaggctatggccatccaaccgaacgtaactgctggtcagtccacactggaaggtggtcacgagaggttacaggcaaccgtaagaaagatcttggaaatggtggacgcccaggaacaggaagaagcaatgccgccgaggccgtcccctggtttgctcgagctctcggaacgcgccactgctttgtcatgacgacttgacgacgctgtgaggttctggaggcgttattaagcatggactcgggttgtttaaccatgctaggtgatacagcgcccgatagggcgctattttttctagtttctttaatgtagcctgcagtctgcacgctgtgccattgtggatagatcgatcgagcctggtgcatatgccccaccatatatatgtttaattaaccttgcacgttaaagagtccctttccataatcaagggaaaaaacttaaaaaatgacggtcaaattttctactattgagcgtgggtttaactctgacggatctagaatgtcacatgccaacggtgttttttttttgaagtggtctaagagttgatagattttatatgtatccacgatggctttgccaatctaaaaaatctgacgattcagtctatcggggttaatatgcacaaatgtatgttagggctatatattcttttagtaaatggatatcaagctcacaataagctggtctattaagggcttgtttgattagctctcaatctatatagattgagtg

SEQ ID NO: 80562 - DNA, 1980 bp, Zea Mays
ggtcgcagttttgcacaaagatcctctgtcttttcgcgatttagctcgtgctcctccctcgacgtggtctccggaatccagatctgtatcacgggaagcacatctgctggcctacaccagattcttccatggttgtattatcacaatgtcattggtgtttcacatttctttctattagttgaaggagaggctgcaaagccagctgtcacctctgttcttgaatctattcaggatgctagaatggattggatcattcacctcgatactgatgagttgattcatccagctggtgcccgagagtactccctgaggcgattgcttttagatgttcctgacaacgttgacatggttatcttccccaattatgaaagcagcattgactgtatgacattaaggatccttttactgaggtatagaactactgttatctgtaacatatattcaaaagaaagggaaaaatgctctgtatcctattgatgatccactggcttgagaaacaaagtgccacctgtacgtaactggatatagtttcactgtctagaaaaaaactatagtttagcaaacactacacataactactctcattaatgcattgcaggaattgataggattggtcggattatcgttggctgtgtttgataggttgcatgttttataaattcttttgtgcctgcaggtttccatgtttaagaaatatctttacgatttcatttttcacaatatgcatatggtatcataactctcgaaatgctcacggaaattgtcatgagtggaaacgatttcatttttcgcatatgcatgtagtatcttttttttaactgaaattgtatgacaggatgtagttatgtctgaatcagatacaatattttaccttcttcatgtgccttgtactcatcacagaaatgtttcctcatggtccattctccagcatacaatgtatagccagccatgccagagaaccatataggtgtcttttgaatggcccctttcttactgtgcattggtggctaactggataactgactcggagagctaatgagtaatgaatcctcccgtgtattgtgtcatggcaggcctttataattgcatcgacagcaactgaggaggagatggggaactggtaccgggaacataactatgccccatggctatcattcgtggcctcaaggaacccgacgtctttaccaatgcagtaacatcagcgaaagcacagtcgaaaacgaagccgtcaaacatgggtctcggaaacaaggaggctatggccatccaaccgaacgtaactgctggtcagtccacactggaaggtggtcacgagaggttacaggcaaccgtaagaaagatcttggaaatggtggacgcccaggaacaggaagaagcaatgccgccgaggccgtcccctggtttgctcgagctctcggaacgcgccactgctttgtcatgacgacttgacgacgctgtgaggttctggaggcgttattaagcatggactcgggttgtttaaccatgctaggtgatacagcgcccgatagggcgctattttttctagtttctttaatgtagcctgcagtctgcacgctgtgccattgtggatagatcgatcgagcctggtgcatatgccccaccatatatatgtttaattaaccttgcacgttaaagagtccctttccataatcaagggaaaaaacttaaaaaatgacggtcaaattttctactattgagcgtgggtttaactctgacggatctagaatgtcacatgccaacggtgttttttttttgaagtggtctaagagttgatagattttatatgtatccacgatggctttgccaatctaaaaaatctgacgattcagtctatcggggttaatatgcacaaatgtatgttagggctatatattcttttagtaaatggatatcaagctcacaataagctggtctattaagggcttgtttgattagctctcaatctatatagattgagtg

SEQ ID NO: 80563 - DNA, 1420 bp, Zea Mays
ggtcgcagttttgcacaaagatcctctgtcttttcgcgatttagctcgtgctcctccctcgacgtggtctccggaatccagatctgtatcacgggaagcacatctgctggcctacaccagattcttccatggttgtattatcacaatgtcattggtgtttcacatttctttctattagttgaaggagaggctgcaaagccagctgtcacctctgttcttgaatctattcaggatgctagaatggattggatcattcacctcgatactgatgagttgattcatccagctggtgcccgagagtactccctgaggcgattgcttttagatgttcctgacaacgttgacatggttatcttccccaattatgaaagcagcattgactgtatgacattaaggatccttttactgaggcctttataattgcatcgacagcaactgaggaggagatggggaactggtaacacccttagccctccgtgtaccaagcatcgaccattcctccctatcctacctgaattaagagagatcatcacattggtctgatgattacctttgttcaggtaccgggaacataactatgccccatggctatcattcgtggcctcaaggaacccgacgtctttaccaatgcagtaacatcagcgaaagcacagtcgaaaacgaagccgtcaaacatgggtctcggaaacaaggaggctatggccatccaaccgaacgtaactgctggtcagtccacactggaaggtggtcacgagaggttacaggcaaccgtaagaaagatcttggaaatggtggacgcccaggaacaggaagaagcaatgccgccgaggccgtcccctggtttgctcgagctctcggaacgcgccactgctttgtcatgacgacttgacgacgctgtgaggttctggaggcgttattaagcatggactcgggttgtttaaccatgctaggtgatacagcgcccgatagggcgctattttttctagtttctttaatgtagcctgcagtctgcacgctgtgccattgtggatagatcgatcgagcctggtgcatatgccccaccatatatatgtttaattaaccttgcacgttaaagagtccctttccataatcaagggaaaaaacttaaaaaatgacggtcaaattttctactattgagcgtgggtttaactctgacggatctagaatgtcacatgccaacggtgttttttttttgaagtggtctaagagttgatagattttatatgtatccacgatggctttgccaatctaaaaaatctgacgattcagtctatcggggttaatatgcacaaatgtatgttagggctatatattcttttagtaaatggatatcaagctcacaataagctggtctattaagggcttgtttgattagctctcaatctatatagattgagtg

SEQ ID NO: 80564 - DNA, 2074 bp, Zea Mays
tacgtgcagctggccgactcgaagatcgtagagatctggtcacaatgggcgacgagcaggcttgagatggggacggaggttcttgtcgcgatcacctctcgtcgcgtccccatctccccaccaaccccaaatcccaagatctggttatctccgtcgtcgccctctcgaggaggcgacgagcaggcttctctccccgcacggcctcctccccactaggcagccggatccccacgtgtggtgccgcgattctgcttgcgcgttgaagcaacagttgcctcctccccactagcgctcgttctatgttcgatctgtatcacgggaagcacatctgctggcctacaccagattcttccatggttgtattatcacaatgtcattggtgtttcacatttctttctattagttgaaggagaggctgcaaagccagctgtcacctctgttcttgaatctattcagccgcatttggaatgagacttggctagcaggtttcttttacaagccgtgtaattacgaactatttgtcaagcaatcactaaacatggaaatggctattattatggcaagggatgctagaatggattggatcattcacctcgatactgatgagttgattcatccagctggtgcccgagagtactccctgaggcgattgcttttagatgttcctgacaacgttgacatggttatcttccccaattatgaaagcagcattgactgtatgacattaaggatccttttactgaggtatagaactactgttatctgtaacatatattcaaaagaaagggaaaaatgctctgtatcctattgatgatccactggcttgagaaacaaagtgccacctgtacgtaactggatatagtttcactgtctagaaaaaaactatagtttagcaaacactacacataactactctcattaatgcattgcaggaattgataggattggtcggattatcgttggctgtgtttgataggttgcatgttttataaattcttttgtgcctgcaggtttccatgtttaagaaatatctttacgatttcatttttcacaatatgcatatggcctttataattgcatcgacagcaactgaggaggagatggggaactggtaacacccttagccctccgtgtaccaagcatcgaccattcctccctatcctacctgaattaagagagatcatcacattggtctgatgattacctttgttcaggtaccgggaacataactatgccccatggctatcattcgtggcctcaaggaacccgacgtctttaccaatgcagtaacatcagcgaaagcacagtcgaaaacgaagccgtcaaacatgggtctcggaaacaaggaggctatggccatccaaccgaacgtaactgctggtcagtccacactggaaggtggtcacgagaggttacaggcaaccgtaagaaagatcttggaaatggtggacgcccaggaacaggaagaagcaatgccgccgaggccgtcccctggtttgctcgagctctcggaacgcgccactgctttgtcatgacgacttgacgacgctgtgaggttctggaggcgttattaagcatggactcgggttgtttaaccatgctaggtgatacagcgcccgatagggcgctattttttctagtttctttaatgtagcctgcagtctgcacgctgtgccattgtggatagatcgatcgagcctggtgcatatgccccaccatatatatgtttaattaaccttgcacgttaaagagtccctttccataatcaagggaaaaaacttaaaaaatgacggtcaaattttctactattgagcgtgggtttaactctgacggatctagaatgtcacatgccaacggtgttttttttttgaagtggtctaagagttgatagattttatatgtatccacgatggctttgccaatctaaaaaatctgacgattcagtctatcggggttaatatgcacaaatgtatgttagggctatatattcttttagtaaatggatatcaagctcacaataagctggtctattaagggcttgtttgattagctctcaatctatatagattgagtg

SEQ ID NO: 80565 - DNA, 1710 bp, Zea Mays
ctcgaagatcgtagagatctggtcacaatgggcgacgagcaggcttgagatggggacggaggttcttgtcgcgatcacctctcgtcgcgtccccatctccccaccaaccccaaatcccaagatctggttatctccgtcgtcgccctctcgaggaggcgacgagcaggcttctctccccgcacggcctcctccccactaggcagccggatccccacgtgtggtgccgcgattctgcttgcgcgttgaagcaacagttgcctcctccccactagcgctcgttctatgttcgatctgtatcacgggaagcacatctgctggcctacaccagattcttccatggttgtattatcacaatgtcattggtgtttcacatttctttctattagttgaaggagaggctgcaaagccagctgtcacctctgttcttgaatctattcagccgcatttggaatgagacttggctagcaggtttcttttacaagccgtgtaattacgaactatttgtcaagcaatcactaaacatggaaatggctattattatggcaagggatgctagaatggattggatcattcacctcgatactgatgagttgattcatccagctggtgcccgagagtactccctgaggcgattgcttttagatgttcctgacaacgttgacatggttatcttccccaattatgaaagcagcattgactgtatgacattaaggatccttttactgaggcctttataattgcatcgacagcaactgaggaggagatggggaactggtaacacccttagccctccgtgtaccaagcatcgaccattcctccctatcctacctgaattaagagagatcatcacattggtctgatgattacctttgttcaggctatcattcgtggcctcaaggaacccgacgtctttaccaatgcagtaacatcagcgaaagcacagtcgaaaacgaagccgtcaaacatgggtctcggaaacaaggaggctatggccatccaaccgaacgtaactgctggtcagtccacactggaaggtggtcacgagaggttacaggcaaccgtaagaaagatcttggaaatggtggacgcccaggaacaggaagaagcaatgccgccgaggccgtcccctggtttgctcgagctctcggaacgcgccactgctttgtcatgacgacttgacgacgctgtgaggttctggaggcgttattaagcatggactcgggttgtttaaccatgctaggtgatacagcgcccgatagggcgctattttttctagtttctttaatgtagcctgcagtctgcacgctgtgccattgtggatagatcgatcgagcctggtgcatatgccccaccatatatatgtttaattaaccttgcacgttaaagagtccctttccataatcaagggaaaaaacttaaaaaatgacggtcaaattttctactattgagcgtgggtttaactctgacggatctagaatgtcacatgccaacggtgttttttttttgaagtggtctaagagttgatagattttatatgtatccacgatggctttgccaatctaaaaaatctgacgattcagtctatcggggttaatatgcacaaatgtatgttagggctatatattcttttagtaaatggatatcaagctcacaataagctggtctattaagggcttgtttgattagctctcaatctatatagattgagtg

SEQ ID NO: 80566 - DNA, 969 bp, Zea Mays
agggcggcaaagcaccgtggaggctccggacaatgaattccttcgccggtagctgctggttttcaccgggcaagtcatcaggcagataagctggaggcactcgcattgacgtcgctcatcgacgactagaagaagcttggtgactgccagttcaacctctagaagcagtactacgtggccgtatgcgccgctatgtacgacaagctccggcgcagccgccgctttgacgcggtccaaagcggctgtaccgcgctgtccatcgtcaaggagggggacctcatggtcgtcgatgactctcgggttgttctagggaccgcatacgacgccgccgccatcacgccgtccagctcatcgtccacctgaagcccaacctgccacgtaagtcgccactgatcggccatgaattcttgtgcgctgggacgacggccgttgctgacgttgtgtgagtgtcctcgaacatgatgtatgtagagcagtagcgtatccgatggtgcaacggccaggggtactacctcgctgatgagcccaggtgcacttcgtttggcagtccagccaagagtcatcggtactcaccatgtcgcgcgtgtttgacgactactatattgaggattgtagcgtcatattgacgccgagatgacgccgaggaggaccgacaacaatgaccagttcgtcatcctcaccaccgtcggggtagcttttgtgacggtctgcctttaattctcttcgcaaacacacgcatttgtctttttgtttaagcaagagcgtatggtggtgtgtgcctgatgactaacaatgtatgggggaatttcttctggcatatgtggaacgtgctctccaatgatgagaccatgcaaatcatggcatatatcgaagtctgcatgatactgatggttgcaatgtagtggtgaaacaactaaattaaaataacaaaatttatgtatgaccaggatcacaaattgattatgaaac

SEQ ID NO: 80567 - DNA, 824 bp, Zea Mays
ggcggcaaagcaccgtggaggctccggacaatgaattccttcgccggaggcactcgcattgacgtcgctcatcgacgactagaagaagcttggtgactgccagttcaacctctagaagcagtactacgtggccgtatgcgccgctatgtacgacaagctccggcgcagccgccgctttgacgcggtccaaagcggctgtaccgcgctgtccatcgtcaaggagggggacctcatggtcgtcgatgactctcgggttgttctagggaccgcatacgacgccgccgccatcacgccgtccagctcatcgtccacctgaagcccaacctgccactagcgtatccgatggtgcaacggccaggggtactacctcgctgatgagcccaggtgcacttcgtttggcagtccagccaagagtcatcggtactcaccatgtcgcgcgtgtttgacgactactatattgaggattgtagcgtcatattgacgccgagatgacgccgaggaggaccgacaacaatgaccagttcgtcatcctcaccaccgtcggggtagcttttgtgacggtctgcctttaattctcttcgcaaacacacgcatttgtctttttgtttaagcaagagcgtatggtggtgtgtgcctgatgactaacaatgtatgggggaatttcttctggcatatgtggaacgtgctctccaatgatgagaccatgcaaatcatggcatatatcgaagtctgcatgatactgatggttgcaatgtagtggtgaaacaactaaattaaaataacaaaatttatgtatgaccaggatcacaaattgattatgaaac

SEQ ID NO: 80568 - DNA, 970 bp, Zea Mays
ggcggcaaagcaccgtggaggctccggacaatgaattccttcgccggtagctgctggttttcaccgggcaagtcatcaggcagataagctgcaggaggcactcgcattgacgtcgctcatcgacgactagaagaagcttggtgactgccagttcaacctctagaagcagtactacgtggccgtatgcgccgctatgtacgacaagctccggcgcagccgccgctttgacgcggtccaaagcggctgtaccgcgctgtccatcgtcaaggagggggacctcatggtcgtcgatgactctcgggttgttctagggaccgcatacgacgccgccgccatcacgccgtccagctcatcgtccacctgaagcccaacctgccacgtaagtcgccactgatcggccatgaattcttgtgcgctgggacgacggccgttgctgacgttgtgtgagtgtcctcgaacatgatgtatgtagagcagtagcgtatccgatggtgcaacggccaggggtactacctcgctgatgagcccaggtgcacttcgtttggcagtccagccaagagtcatcggtactcaccatgtcgcgcgtgtttgacgactactatattgaggattgtagcgtcatattgacgccgagatgacgccgaggaggaccgacaacaatgaccagttcgtcatcctcaccaccgtcggggtagcttttgtgacggtctgcctttaattctcttcgcaaacacacgcatttgtctttttgtttaagcaagagcgtatggtggtgtgtgcctgatgactaacaatgtatgggggaatttcttctggcatatgtggaacgtgctctccaatgatgagaccatgcaaatcatggcatatatcgaagtctgcatgatactgatggttgcaatgtagtggtgaaacaactaaattaaaataacaaaatttatgtatgaccaggatcacaaattgattatgaaac

SEQ ID NO: 80569 - DNA, 2019 bp, Zea Mays
ggcggcaaagcaccgtggaggctccggacaatgaattccttcgccggtagctgctggttttcaccgggcaagtcatcaggcagataagctggtaatgcaggctttagaatgtatactattactcattcgttttttcccatctctttctactaaagaaagtttaatgcttaaccacaagcagaaattgaacggcggatacatgtcaaatattcagtttttcaaaccaacaattgttttttctttgcgtttgcctgtatatttgcaaagattcagttagtagctaggcttctatccacctttgcttcggtgcgttttaaattaggatatcatacacaggaaaatagagattttttgtagaccataataattgttatggtcttttacccatagaaatggatcgattttcattcgctaatacttatttctgtgtgctgaaaaaacaccagacggccaaacaagcagaaatcaattctaaaaaaatatttttaaatgtaagtaaattagatttaaacttagtaaaaaaatattccgtccttttttgttgaccaaaaaggcatatcaaaattatttattttcttcacttttcatgccaataaaaattaataatttcaattagccagaccaatttcgtgccaccattctatgttctgttattctcattctcttctccccgcacaactaatttccatgttctgccaccattctatgttctgccattctcgttcattgttctgtctttcctattcccccctcaccgcaaagctcattcccatttccattctccattctcctgtacaacacacgtctagttaaaataaaaaacagacatgttcgtaagagtgtaagagaatttgaacccacaacctctcaaacaaatacaagttgtagctatcgctacaacacatgtgtgtttatgtctacatctatgacagaaaacacatctactacatctctcttcaagcccaccggctactcttgcacaaagcgtagtagtaaataagtatcaccgagattcttgaattatatttttggatgaagggagtagtatttaaagaagagctttgcatgcaatttcttttgtttgaataatattttctacttaaattcctttttgcatgcgtgacatttattcttcgtaatatttttttcatggatctgacttgtgagtcattttcataaaaccaacgccaagcatgaattcatatttcttacttggaaacccgaataaacaccattagcaggaggcactcgcattgacgtcgctcatcgacgactagaagaagcttggtgactgccagttcaacctctagaagcagtactacgtggccgtatgcgccgctatgtacgacaagctccggcgcagccgccgctttgacgcggtccaaagcggctgtaccgcgctgtccatcgtcaaggagggggacctcatggtcgtcgatgactctcgggttgttctagggaccgcatacgacgccgccgccatcacgccgtccagctcatcgtccacctgaagcccaacctgccactagcgtatccgatggtgcaacggccaggggtactacctcgctgatgagcccaggtgcacttcgtttggcagtccagccaagagtcatcggtactcaccatgtcgcgcgtgtttgacgactactatattgaggattgtagcgtcatattgacgccgagatgacgccgaggaggaccgacaacaatgaccagttcgtcatcctcaccaccgtcggggtagcttttgtgacggtctgcctttaattctcttcgcaaacacacgcatttgtctttttgtttaagcaagagcgtatggtggtgtgtgcctgatgactaacaatgtatgggggaatttcttctggcatatgtggaacgtgctctccaatgatgagaccatgcaaatcatggcatatatcgaagtctgcatgatactgatggttgcaatgtagtggtgaaacaactaaattaaaataacaaaatttatgtatgaccaggatcacaaattgattatgaaac

SEQ ID NO: 80570 - DNA, 804 bp, Zea Mays
ccggacaatgaattccttcgccgcaggaggcactcgcattgacgtcgctcatcgacgactagaagaagcttggtgactgccagttcaacctctagaagcagtactacgtggccgtatgcgccgctatgtacgacaagctccggcgcagccgccgctttgacgcggtccaaagcggctgtaccgcgctgtccatcgtcaaggagggggacctcatggtcgtcgatgactctcgggttgttctagggaccgcatacgacgccgccgccatcacgccgtccagctcatcgtccacctgaagcccaacctgccactagcgtatccgatggtgcaacggccaggggtactacctcgctgatgagcccaggtgcacttcgtttggcagtccagccaagagtcatcggtactcaccatgtcgcgcgtgtttgacgactactatattgaggattgtagcgtcatattgacgccgagatgacgccgaggaggaccgacaacaatgaccagttcgtcatcctcaccaccgtcggggtagcttttgtgacggtctgcctttaattctcttcgcaaacacacgcatttgtctttttgtttaagcaagagcgtatggtggtgtgtgcctgatgactaacaatgtatgggggaatttcttctggcatatgtggaacgtgctctccaatgatgagaccatgcaaatcatggcatatatcgaagtctgcatgatactgatggttgcaatgtagtggtgaaacaactaaattaaaataacaaaatttatgtatgaccaggatcacaaattgattatgaaac

SEQ ID NO: 80571 - DNA, 292 bp, Zea Mays
gccggatcttgcagaccagatgggtagtagggaggtcgagctggcttgcaccatcagatttgatcagatcacggacctggtccctcggggtggagacgcaggcgtggaaggtagacaggaatggagggattggcatcgagagcgcagagaggacattgtttaggtactcaatgtcagcagcgagctgctgtgaacctcggtcggtgatgtagtggattcctcggagctgctccatgaacaaagcagtggcaccttcggcgacctggtacatggaagcagagatgataatcaa

SEQ ID NO: 80572 - DNA, 1248 bp, Zea Mays
ctatactctcgtgggtgtttacgaaaatgtggctgacttaagggcgtgactaccattttcgcaagaattgagcccgacagcaaaaagaaaggtgacgtttctctttcttggttccggcgccccaccgggagagtgagctgctgcctgcgcaactcgagcgccgcttgtcgcgagcaccgcggcctcgatccgtcaagctacatgtctggacagcaggaccacgctagtaaaagctctagctcaagcatcagcagcagtactcaagagagcgaggaggaagcacctgtccgaagcgtcaccattggtagcctccttgcccaagcaaatagcaccagtggacatagtcttgggaagcgcctgtcccatttggggtcaatcccgtatactccccgagttaatggaaaaatccccaatgttggtaatgcaacactggaccacgaacgattgctggaaaggttgggcacttatggtctagctgaatttcagatagagggggatgggaattgtcagttccgagctttggctgatcagatatatcacaatcctgactatcataagcatgtgagaaaagctgtcatgaaacagctgaaggaattcagaaaacaatatgaaagttacgtaccgatggaatataaggtgtacttgaagaaaatgaaaagatctggggaatggggagatcatctgaccttacaagcagctgcagatcggtttggtgccaaaatttgtttgctgacatcatttaaagacacctgtttaattgagatagtccctagggatctaactcccacaaaagagctttggctaagcttctggtgtgaagtacactacaattccttgtatggaatcgacgatctcctgacccgcaagacgaagaagaagcactggctgttctaggagggttctgaaggatccaaattctttcagcagctcctgctctgtccagccagcgcagcctctgtcttagtacttactagttggccaacactgtatcatatcctaagttgagtctaggctttacgcttttatgtacagtcgatctagatcttgtaaaattccctcaaggagcaacaggaactgtacaactcttagatccatgagattttggtgatctctcctccatgggaatgatagtgcttgggtgtatgtacattataaaagctaccaggggcattttgacgtgggcgtttggatgccattctccataatttttattctgaattcgtagagtggccatttccaggcatgggg

SEQ ID NO: 80573 - DNA, 1104 bp, Zea Mays
cgcaagaattgagcccgacagcaaaaagaaaggtgacgtttctctttcttggttccggcgccccaccgggagagtgagctgctgcctgcgcaactcgagcgccgcttgtcgcgagcaccgcggcctcgatccgtcaagctacatgtctggacagcaggaccacgctagtaaaagctctagctcaagcatcagcagcagtactcaagagagcgaggaggaagcacctgtccgaagcgtcaccattggtagcctccttgcccaagcaaatagcaccagtggacatagtcttgggaagcgcctgtcccatttggggtcaatcccgtatactccccgagttaatggaaaaatccccaatgttggtaatgcaacactggaccacgaacgattgctggaaaggttgggcacttatggtctagctgaatttcagatagagggggatgggaattgtcagttccgagctttggctgatcagatatatcacaatcctgactatcataagcatgtgagaaaagctgtcatgaaacagctgaaggaattcagaaaacaatatgaaagttacgtaccgatggaatataaggtgtacttgaagaaaatgaaaagatctggggaatggggagatcatctgaccttacaagcagctgcagatcggagctttggctaagcttctggtgtgaagtacactacaattccttgtatggaatcgacgatctcctgacccgcaagacgaagaagaagcactggctgttctaggagggttctgaaggatccaaattctttcagcagctcctgctctgtccagccagcgcagcctctgtcttagtacttactagttggccaacactgtatcatatcctaagttgagtctaggctttacgcttttatgtacagtcgatctagatcttgtaaaattccctcaaggagcaacaggaactgtacaactcttagatccatgagattttggtgatctctcctccatgggaatgatagtgcttgggtgtatgtacattataaaagctaccaggggcattttgacgtgggcgtttggatgccattctccataatttttattctgaattcgtagagtggccatttccaggcatgggg

SEQ ID NO: 80574 - DNA, 1810 bp, Zea Mays
caagaattgagcccgacagcaaaaagaaaggtgacgtttctctttcttggttccggcgccccaccgggagagtgagctgctgcctgcgcaactcgagcgccgcttgtcgcgagcaccgcggcctcgatccgtcaagctagaccacgctagtaaaagctctagctcaagcatcagcagcagtactcaagagagcgaggaggaagcacctgtccgaagcgtcaccattggtagcctccttgcccaagcaaatagcaccagtggacatagtcttgggaagcgcctgtcccatttggggtcaatcccgtatactccccgagttaatggaaaaatccccaatgttggtaatgcaacactggaccacgaacgattgctggaaaggttgggcacttatggtctagctgaatttcagatagagggggatgggaattgtcaggtttatttacaattccgagctttggctgatcagatatatcacaatcctgactatcataagcatgtgagaaaagctgtcatgaaacagctgaaggaattcagaaaacaatatgaaagttacgtaccgatggaatataaggtgtacttgaagaaaatgaaaagatctggggaatggggagatcatctgaccttacaagcagctgcagatcgggtaaaatagcactttcagtttcatgatggtttattggtttctttgagtaaattaaatgcatgtttttatacataaattaccttaatcttttcctaattcttattataccttaaccaacacgacccttttcccctatgaatccaactcttagtcatgatactaaaaaaagcccggtggatatgaagtgtgtactgtcaatttgtttaggaatccttgtcctggaaaattttgtctgttataattcgttgaattatgaaggttaaacttcaaacatgagccattggttgattagtcaacttttcatttgcatttatgttcctgtagagatatgttgttctgatcaattatgccattgctgcatcagtattatctaatgtctgtatactgtaaattaactaacaccttatgtatcttaaatcctcacagtttggtgccaaaatttgtttgctgacatcatttaaagacacctgtttaattgagatagtccctagggatctaactcccacaaaaggtaagggcttggctaccctgctgctcagttatcagatgcttggttccatatcgaacttctctggcaccagcattgcagcatctattctgctcttgagacaattctgcattcaaccattgcaagatgcaaaccacaatagtatatttaggttctgcaggaatcattaccacctaatcccagtgatggtacacatttttgcagagctttggctaagcttctggtgtgaagtacactacaattccttgtatggaatcgacgatctcctgacccgcaagacgaagaagaagcactggctgttctaggagggttctgaaggatccaaattctttcagcagctcctgctctgtccagccagcgcagcctctgtcttagtacttactagttggccaacactgtatcatatcctaagttgagtctaggctttacgcttttatgtacagtcgatctagatcttgtaaaattccctcaaggagcaacaggaactgtacaactcttagatccatgagattttggtgatctctcctccatgggaatgatagtgcttgggtgtatgtacattataaaagctaccaggggcattttgacgtgggcgtttggatgccattctccataatttttattctgaattcgtagagtggccatttccaggcatgggg

SEQ ID NO: 80575 - DNA, 1199 bp, Zea Mays
caagaattgagcccgacagcaaaaagaaaggtgacgtttctctttcttggttccggcgccccaccgggagagtgagctgctgcctgcgcaactcgagcgccgcttgtcgcgagcaccgcggcctcgatccgtcaagctacatgtctggacagcaggaccacgctagtaaaagctctagctcaagcatcagcagcagtactcaagagagcgaggaggaagcacctgtccgaagcgtcaccattggtagcctccttgcccaagcaaatagcaccagtggacatagtcttgggaagcgcctgtcccatttggggtcaatcccgtatactccccgagttaatggaaaaatccccaatgttggtaatgcaacactggaccacgaacgattgctggaaaggttgggcacttatggtctagctgaatttcagatagagggggatgggaattgtcaggtttatttacaattccgagctttggctgatcagatatatcacaatcctgactatcataagcatgtgagaaaagctgtcatgaaacagctgaaggaattcagaaaacaatatgaaagttacgtaccgatggaatataaggtgtacttgaagaaaatgaaaagatctggggaatggggagatcatctgaccttacaagcagctgcagatcggtttggtgccaaaatttgtttgctgacatcatttaaagacacctgtttaattgagatagtccctagggatctaactcccacaaaagagctttggctaagcttctggtgtgaagtacactacaattccttgtatggaatcgacgatctcctgacccgcaagacgaagaagaagcactggctgttctaggagggttctgaaggatccaaattctttcagcagctcctgctctgtccagccagcgcagcctctgtcttagtacttactagttggccaacactgtatcatatcctaagttgagtctaggctttacgcttttatgtacagtcgatctagatcttgtaaaattccctcaaggagcaacaggaactgtacaactcttagatccatgagattttggtgatctctcctccatgggaatgatagtgcttgggtgtatgtacattataaaagctaccaggggcattttgacgtgggcgtttggatgccattctccataatttttattctgaattcgtagagtggccatttccaggcatgggg

SEQ ID NO: 80576 - DNA, 1370 bp, Zea Mays
attgagcccgacagcaaaaagaaaggtgacgtttctctttcttggttccggcgccccaccgggagagtgagctgctgcctgcgcaactcgagcgccgcttgtcgcgagcaccgcggcctcgatccgtcaagctacaggaccacgctagtaaaagctctagctcaagcatcagcagcagtactcaagagagcgaggaggaagcacctgtccgaagcgtcaccattggtagcctccttgcccaagcaaatagcaccagtggacatagtcttgggaagcgcctgtcccatttggggtcaatcccgtatactccccgagttaatggaaaaatccccaatgttggtaatgcaacactggaccacgaacgattgctggaaaggttgggcacttatggtctagctgaatttcagatagagggggatgggaattgtcagttccgagctttggctgatcagatatatcacaatcctgactatcataagcatgtgagaaaagctgtcatgaaacagctgaaggaattcagaaaacaatatgaaagttacgtaccgatggaatataaggtgtacttgaagaaaatgaaaagatctggggaatggggagatcatctgaccttacaagcagctgcagatcggtttggtgccaaaatttgtttgctgacatcatttaaagacacctgtttaattgagatagtccctagggatctaactcccacaaaaggtaagggcttggctaccctgctgctcagttatcagatgcttggttccatatcgaacttctctggcaccagcattgcagcatctattctgctcttgagacaattctgcattcaaccattgcaagatgcaaaccacaatagtatatttaggttctgcaggaatcattaccacctaatcccagtgatggtacacatttttgcagagctttggctaagcttctggtgtgaagtacactacaattccttgtatggaatcgacgatctcctgacccgcaagacgaagaagaagcactggctgttctaggagggttctgaaggatccaaattctttcagcagctcctgctctgtccagccagcgcagcctctgtcttagtacttactagttggccaacactgtatcatatcctaagttgagtctaggctttacgcttttatgtacagtcgatctagatcttgtaaaattccctcaaggagcaacaggaactgtacaactcttagatccatgagattttggtgatctctcctccatgggaatgatagtgcttgggtgtatgtacattataaaagctaccaggggcattttgacgtgggcgtttggatgccattctccataatttttattctgaattcgtagagtggccatttccaggcatgggg

SEQ ID NO: 80577 - DNA, 1387 bp, Zea Mays
attgagcccgacagcaaaaagaaaggtgacgtttctctttcttggttccggcgccccaccgggagagtgagctgctgcctgcgcaactcgagcgccgcttgtcgcgagcaccgcggcctcgatccgtcaagctaaaagcatgtctggacagcaggaccacgctagtaaaagctctagctcaagcatcagcagcagtactcaagagagcgaggaggaagcacctgtccgaagcgtcaccattggtagcctccttgcccaagcaaatagcaccagtggacatagtcttgggaagcgcctgtcccatttggggtcaatcccgtatactccccgagttaatggaaaaatccccaatgttggtaatgcaacactggaccacgaacgattgctggaaaggttgggcacttatggtctagctgaatttcagatagagggggatgggaattgtcagttccgagctttggctgatcagatatatcacaatcctgactatcataagcatgtgagaaaagctgtcatgaaacagctgaaggaattcagaaaacaatatgaaagttacgtaccgatggaatataaggtgtacttgaagaaaatgaaaagatctggggaatggggagatcatctgaccttacaagcagctgcagatcggtttggtgccaaaatttgtttgctgacatcatttaaagacacctgtttaattgagatagtccctagggatctaactcccacaaaaggtaagggcttggctaccctgctgctcagttatcagatgcttggttccatatcgaacttctctggcaccagcattgcagcatctattctgctcttgagacaattctgcattcaaccattgcaagatgcaaaccacaatagtatatttaggttctgcaggaatcattaccacctaatcccagtgatggtacacatttttgcagagctttggctaagcttctggtgtgaagtacactacaattccttgtatggaatcgacgatctcctgacccgcaagacgaagaagaagcactggctgttctaggagggttctgaaggatccaaattctttcagcagctcctgctctgtccagccagcgcagcctctgtcttagtacttactagttggccaacactgtatcatatcctaagttgagtctaggctttacgcttttatgtacagtcgatctagatcttgtaaaattccctcaaggagcaacaggaactgtacaactcttagatccatgagattttggtgatctctcctccatgggaatgatagtgcttgggtgtatgtacattataaaagctaccaggggcattttgacgtgggcgtttggatgccattctccataatttttattctgaattcgtagagtggccatttccaggcatgggg

SEQ ID NO: 80578 - DNA, 1813 bp, Zea Mays
attgagcccgacagcaaaaagaaaggtgacgtttctctttcttggttccggcgccccaccgggagagtgagctgctgcctgcgcaactcgagcgccgcttgtcgcgagcaccgcggcctcgatccgtcaagctaaaagcatgtctggacagcaggaccacgctagtaaaagctctagctcaagcatcagcagcagtactcaagagagcgaggaggaagcacctgtccgaagcgtcaccattggtagcctccttgcccaagcaaatagcaccagtggacatagtcttgggaagcgcctgtcccatttggggtcaatcccgtatactccccgagttaatggaaaaatccccaatgttggtaatgcaacactggaccacgaacgattgctggaaaggttgggcacttatggtctagctgaatttcagatagagggggatgggaattgtcagttccgagctttggctgatcagatatatcacaatcctgactatcataagcatgtgagaaaagctgtcatgaaacagctgaaggaattcagaaaacaatatgaaagttacgtaccgatggaatataaggtgtacttgaagaaaatgaaaagatctggggaatggggagatcatctgaccttacaagcagctgcagatcgggtaaaatagcactttcagtttcatgatggtttattggtttctttgagtaaattaaatgcatgtttttatacataaattaccttaatcttttcctaattcttattataccttaaccaacacgacccttttcccctatgaatccaactcttagtcatgatactaaaaaaagcccggtggatatgaagtgtgtactgtcaatttgtttaggaatccttgtcctggaaaattttgtctgttataattcgttgaattatgaaggttaaacttcaaacatgagccattggttgattagtcaacttttcatttgcatttatgttcctgtagagatatgttgttctgatcaattatgccattgctgcatcagtattatctaatgtctgtatactgtaaattaactaacaccttatgtatcttaaatcctcacagtttggtgccaaaatttgtttgctgacatcatttaaagacacctgtttaattgagatagtccctagggatctaactcccacaaaaggtaagggcttggctaccctgctgctcagttatcagatgcttggttccatatcgaacttctctggcaccagcattgcagcatctattctgctcttgagacaattctgcattcaaccattgcaagatgcaaaccacaatagtatatttaggttctgcaggaatcattaccacctaatcccagtgatggtacacatttttgcagagctttggctaagcttctggtgtgaagtacactacaattccttgtatggaatcgacgatctcctgacccgcaagacgaagaagaagcactggctgttctaggagggttctgaaggatccaaattctttcagcagctcctgctctgtccagccagcgcagcctctgtcttagtacttactagttggccaacactgtatcatatcctaagttgagtctaggctttacgcttttatgtacagtcgatctagatcttgtaaaattccctcaaggagcaacaggaactgtacaactcttagatccatgagattttggtgatctctcctccatgggaatgatagtgcttgggtgtatgtacattataaaagctaccaggggcattttgacgtgggcgtttggatgccattctccataatttttattctgaattcgtagagtggccatttccaggcatgggg

SEQ ID NO: 80579 - DNA, 1592 bp, Zea Mays
attgagcccgacagcaaaaagaaaggtgacgtttctctttcttggttccggcgccccaccgggagagtgagctgctgcctgcgcaactcgagcgccgcttgtcgcgagcaccgcggcctcgatccgtcaagctagaccacgctagtaaaagctctagctcaagcatcagcagcagtactcaagagagcgaggaggaagcacctgtccgaagcgtcaccattggtagcctccttgcccaagcaaatagcaccagtggacatagtcttgggaagcgcctgtcccatttggggtcaatcccgtatactccccgagttaatggaaaaatccccaatgttggtaatgcaacactggaccacgaacgattgctggaaaggttgggcacttatggtctagctgaatttcagatagagggggatgggaattgtcagttccgagctttggctgatcagatatatcacaatcctgactatcataagcatgtgagaaaagctgtcatgaaacagctgaaggaattcagaaaacaatatgaaagttacgtaccgatggaatataaggtgtacttgaagaaaatgaaaagatctggggaatggggagatcatctgaccttacaagcagctgcagatcgggtaaaatagcactttcagtttcatgatggtttattggtttctttgagtaaattaaatgcatgtttttatacataaattaccttaatcttttcctaattcttattataccttaaccaacacgacccttttcccctatgaatccaactcttagtcatgatactaaaaaaagcccggtggatatgaagtgtgtactgtcaatttgtttaggaatccttgtcctggaaaattttgtctgttataattcgttgaattatgaaggttaaacttcaaacatgagccattggttgattagtcaacttttcatttgcatttatgttcctgtagagatatgttgttctgatcaattatgccattgctgcatcagtattatctaatgtctgtatactgtaaattaactaacaccttatgtatcttaaatcctcacagtttggtgccaaaatttgtttgctgacatcatttaaagacacctgtttaattgagatagtccctagggatctaactcccacaaaagagctttggctaagcttctggtgtgaagtacactacaattccttgtatggaatcgacgatctcctgacccgcaagacgaagaagaagcactggctgttctaggagggttctgaaggatccaaattctttcagcagctcctgctctgtccagccagcgcagcctctgtcttagtacttactagttggccaacactgtatcatatcctaagttgagtctaggctttacgcttttatgtacagtcgatctagatcttgtaaaattccctcaaggagcaacaggaactgtacaactcttagatccatgagattttggtgatctctcctccatgggaatgatagtgcttgggtgtatgtacattataaaagctaccaggggcattttgacgtgggcgtttggatgccattctccataatttttattctgaattcgtagagtggccatttccaggcatgggg

SEQ ID NO: 80580 - DNA, 1001 bp, Zea Mays
attgagcccgacagcaaaaagaaaggtgacgtttctctttcttggttccggcgccccaccgggagagtgagctgctgcctgcgcaactcgagcgccgcttgtcgcgagcaccgcggcctcgatccgtcaagctatatactccccgagttaatggaaaaatccccaatgttggtaatgcaacactggaccacgaacgattgctggaaaggttgggcacttatggtctagctgaatttcagatagagggggatgggaattgtcagttccgagctttggctgatcagatatatcacaatcctgactatcataagcatgtgagaaaagctgtcatgaaacagctgaaggaattcagaaaacaatatgaaagttacgtaccgatggaatataaggtgtacttgaagaaaatgaaaagatctggggaatggggagatcatctgaccttacaagcagctgcagatcggtttggtgccaaaatttgtttgctgacatcatttaaagacacctgtttaattgagatagtccctagggatctaactcccacaaaagagctttggctaagcttctggtgtgaagtacactacaattccttgtatggaatcgacgatctcctgacccgcaagacgaagaagaagcactggctgttctaggagggttctgaaggatccaaattctttcagcagctcctgctctgtccagccagcgcagcctctgtcttagtacttactagttggccaacactgtatcatatcctaagttgagtctaggctttacgcttttatgtacagtcgatctagatcttgtaaaattccctcaaggagcaacaggaactgtacaactcttagatccatgagattttggtgatctctcctccatgggaatgatagtgcttgggtgtatgtacattataaaagctaccaggggcattttgacgtgggcgtttggatgccattctccataatttttattctgaattcgtagagtggccatttccaggcatgggg

SEQ ID NO: 80581 - DNA, 1081 bp, Zea Mays
attgagcccgacagcaaaaagaaaggtgacgtttctctttcttggttccggcgccccaccgggagagtgagctgctgcctgcgcaactcgagcgccgcttgtcgcgagcaccgcggcctcgatccgtcaagctagaccacgctagtaaaagctctagctcaagcatcagcagcagtactcaagagagcgaggaggaagcacctgtccgaagcgtcaccattggtagcctccttgcccaagcaaatagcaccagtggacatagtcttgggaagcgcctgtcccatttggggtcaatcccgtatactccccgagttaatggaaaaatccccaatgttggtaatgcaacactggaccacgaacgattgctggaaaggttgggcacttatggtctagctgaatttcagatagagggggatgggaattgtcagttccgagctttggctgatcagatatatcacaatcctgactatcataagcatgtgagaaaagctgtcatgaaacagctgaaggaattcagaaaacaatatgaaagttacgtaccgatggaatataaggtgtacttgaagaaaatgaaaagatctggggaatggggagatcatctgaccttacaagcagctgcagatcggagctttggctaagcttctggtgtgaagtacactacaattccttgtatggaatcgacgatctcctgacccgcaagacgaagaagaagcactggctgttctaggagggttctgaaggatccaaattctttcagcagctcctgctctgtccagccagcgcagcctctgtcttagtacttactagttggccaacactgtatcatatcctaagttgagtctaggctttacgcttttatgtacagtcgatctagatcttgtaaaattccctcaaggagcaacaggaactgtacaactcttagatccatgagattttggtgatctctcctccatgggaatgatagtgcttgggtgtatgtacattataaaagctaccaggggcattttgacgtgggcgtttggatgccattctccataatttttattctgaattcgtagagtggccatttccaggcatgggg

SEQ ID NO: 80582 - DNA, 805 bp, Zea Mays
cgacgacatgttcgctgcggctcaggatgcggacaaggaagctgccaatgcacacattcgtgtccagttccgagctttggctgatcagatatatcacaatcctgactatcataagcatgtgagaaaagctgtcatgaaacagctgaaggaattcagaaaacaatatgaaagttacgtaccgatggaatataaggtgtacttgaagaaaatgaaaagatctggggaatggggagatcatctgaccttacaagcagctgcagatcggtttggtgccaaaatttgtttgctgacatcatttaaagacacctgtttaattgagatagtccctagggatctaactcccacaaaagagctttggctaagcttctggtgtgaagtacactacaattccttgtatggaatcgacgatctcctgacccgcaagacgaagaagaagcactggctgttctaggagggttctgaaggatccaaattctttcagcagctcctgctctgtccagccagcgcagcctctgtcttagtacttactagttggccaacactgtatcatatcctaagttgagtctaggctttacgcttttatgtacagtcgatctagatcttgtaaaattccctcaaggagcaacaggaactgtacaactcttagatccatgagattttggtgatctctcctccatgggaatgatagtgcttgggtgtatgtacattataaaagctaccaggggcattttgacgtgggcgtttggatgccattctccataatttttattctgaattcgtagagtggccatttccaggcatgggg

SEQ ID NO: 80583 - DNA, 792 bp, Zea Mays
caggaatacatatcagcttggtcgggttcaggacgatacatacacaagtactatttccgagctttggctgatcagatatatcacaatcctgactatcataagcatgtgagaaaagctgtcatgaaacagctgaaggaattcagaaaacaatatgaaagttacgtaccgatggaatataaggtgtacttgaagaaaatgaaaagatctggggaatggggagatcatctgaccttacaagcagctgcagatcggtttggtgccaaaatttgtttgctgacatcatttaaagacacctgtttaattgagatagtccctagggatctaactcccacaaaagagctttggctaagcttctggtgtgaagtacactacaattccttgtatggaatcgacgatctcctgacccgcaagacgaagaagaagcactggctgttctaggagggttctgaaggatccaaattctttcagcagctcctgctctgtccagccagcgcagcctctgtcttagtacttactagttggccaacactgtatcatatcctaagttgagtctaggctttacgcttttatgtacagtcgatctagatcttgtaaaattccctcaaggagcaacaggaactgtacaactcttagatccatgagattttggtgatctctcctccatgggaatgatagtgcttgggtgtatgtacattataaaagctaccaggggcattttgacgtgggcgtttggatgccattctccataatttttattctgaattcgtagagtggccatttccaggcatgggg

SEQ ID NO: 80584 - DNA, 1713 bp, Zea Mays
cagaaaacggaagctcccctatgccctatggcctatggccgctccattgaccgtggaggtggtgtggaatattgcgttgcttgcgcgagctcttacgcatcttcttctcttcgagccttccacagttctacctcccgcccgctggtccctagccgtcaagagattccacgctactggctttcttgccccacgccgtatggttatcgtccagcacgagcggagaaactgaaacacgatcccaaccaattcagaacccgatttggtgatcacctccattctcggtagcacttaattccagggacagcaataagaattgctcctctccaagttcttttggagcgtaatcttatccgtttgggtcggattgatatttgataacttgattgccatttggggagttgcgggagagagagagagatgggccagagcaaggcggagttcttgaagcagttcggtggggactacggttacccggacgcgcctaggggcatcgacgagctgcgggccgccgagttcaagcgcctggaagggatggtttacctggaccatgctggtgcgacactgtactcagaggcacagatgacggatgttgctagagaccttatgtctaatgtctatgggaatcctcatagccagaacgattcaagcatggctacaatcgatgctgttacttctgtgcggcatcaggtcctaaaatacttcaatgcatctccaagggactacaaatgtatatttacatcaggggcaacagcagccctaaaacttgttggtgaatgttttccatggagtagagacagttgctatatgtacacaatggaaaatcataatagtgttcttgggataagagaatatgctctgagcaaaggagctactgtatcagcagttgatgttgaagaggttgttgatccatcaaagaatcatgagagtgatagtttatttaaggtttcaaaacgctcaaaccaaagaagaggtgacaatgtgcttttgcacaattatcagaatggaagcctgtcagctatttcaggaaacaatttaaatctatttgcattcccttcagagtgcaatttctcagggcataagttcaacctcagcttggtcaagctcatcaaggaaggaaaatttatggatttctcatcacaacagcagggccagtggatggttctgatagatgctgcaaaaggatgtgcaactgaaccaccaaacttgaccctgtatcccgctgattttgttgtctgttcattttacaagatatttggctatccaactggtcttggtgccttaattgtaaaaaatgaggctgctagtttactgaacaagacatacttcagtggagaaaagaaaaggcattgagcaaactcttgaggatggaacaatctcattcttgagcatatcttctcttcgatatggctttaagataattgatatcctaactatctcagctattgcacggcatactgcatctcttgctacttatgtgagaaacaaaatgctggaattgaagcatagcaatgagaaaaatgtttgcataatctatggacaagattttaaggtaatcaacggccttgaggaagaacaagtgttgacactggtgtcgctggacgtgtggctcatcgcagttataggaaagcccttgccgtggcgctcgaccatctcggtcggggtgggctaaggggtgcaggcagtgttggggtaggcgctgccagcgcgcgtggg

SEQ ID NO: 80585 - DNA, 1553 bp, Zea Mays
ggaagctcccctatgccctatggcctatggccgctccattgaccgtggaggtggtgtggaatattgcgttgcttgcgcgagctcttacgcatcttcttctcttcgagccttccacagttctacctcccgcccgctggtccctagccgtcaagagattccacgctactggctttcttgccccacgccgtatggttatcgtccagcacgagcggagaaactgaaacacgatcccaaccaattcagaacccgatttggtgatcacctccattctcggtagcacttaattccagggacagcaataagaattgctcctctccaagttcttttggagcgtaatcttatccgtttgggtcggattgatatttgataacttgattgccatttggggagttgcgggagagagagagagatgggccagagcaaggcggagttcttgaagcagttcggtggggactacggttacccggacgcgcctaggggcatcgacgagctgcgggccgccgagttcaagcgcctggaagggatggtttacctggaccatgctggtgcgacactgtactcagaggcacagatgacggatgttgctagagaccttatgtctaatgtctatgggaatcctcatagccagaacgattcaagcatggctacaatcgatgctgttacttctgtgcggcatcagcagttgatgttgaagaggttgttgatccatcaaagaatcatgagagtgatagtttatttaaggtttcaaaacgctcaaaccaaagaagaggtgacaatgtgcttttgcacaattatcagaatggaagcctgtcagctatttcaggaaacaatttaaatctatttgcattcccttcagagtgcaatttctcagggcataagttcaacctcagcttggtcaagctcatcaaggaaggaaaatttatggatttctcatcacaacagcagggccagtggatggttctgatagatgctgcaaaaggatgtgcaactgaaccaccaaacttgaccctgtatcccgctgattttgttgtctgttcattttacaagatatttggctatccaactggtcttggtgccttaattgtaaaaaatgaggctgctagtttactgaacaagacatacttcagtggaggaacggtagctgcttcaattgctgacatcgactttgttcagaaaagaaaaggcattgagcaaactcttgaggatggaacaatctcattcttgagcatatcttctcttcgatatggctttaagataattgatatcctaactatctcagctattgcacggcatactgcatctcttgctacttatgtgagaaacaaaatgctggaattgaagcatagcaatgagaaaaatgtttgcataatctatggacaagattttaaggtaatcaacggccttgaggaagaacaagtgttgacactggtgtcgctggacgtgtggctcatcgcagttataggaaagcccttgccgtggcgctcgaccatctcggtcggggtgggctaaggggtgcaggcagtgttggggtaggcgctgccagcgcgcgtggg

SEQ ID NO: 80586 - DNA, 1779 bp, Zea Mays
aagctcccctatgccctatggcctatggccgctccattgaccgtggaggtggtgtggaatattgcgttgcttgcgcgagctcttacgcatcttcttctcttcgagccttccacagttctacctcccgcccgctggtccctagccgtcaagagattccacgctactggctttcttgccccacgccgtatggttatcgtccagcacgagcggagaaactgaaacacgatcccaaccaattcagaacccgatttggtgatcacctccattctcggtagcacttaattccagggacagcaataagaattgctcctctccaagttcttttggagcgtaatcttatccgtttgggtcggattgatatttgataacttgattgccatttggggagttgcgggagagagagagagatgggccagagcaaggcggagttcttgaagcagttcggtggggactacggttacccggacgcgcctaggggcatcgacgagctgcgggccgccgagttcaagcgcctggaagggatggtttacctggaccatgctggtgcgacactgtactcagaggcacagatgacggatgttgctagagaccttatgtctaatgtctatgggaatcctcatagccagaacgattcaagcatggctacaatcgatgctgttacttctgtgcggcatcaggtcctaaaatacttcaatgcatctccaagggactacaaatgtatatttacatcaggggcaacagcagccctaaaacttgttggtgaatgttttccatggagtagagacagttgctatatgtacacaatggaaaatcataatagtgttcttgggataagagaatatgctctgagcaaaggagctactgtatcagcagttgatgttgaagaggttgttgatccatcaaagaatcatgagagtgatagtttatttaaggtttcaaaacgctcaaaccaaagaagaggtgacaatgtgcttttgcacaattatcagaatggaagcctgtcagctatttcaggaaacaatttaaatctatttgcattcccttcagagtgcaatttctcagggcataagttcaacctcagcttggtcaagctcatcaaggaaggaaaatttatggatttctcatcacaacagcagtaagatatttgatgcatacggctgtactagacaagggccagtggatggttctgatagatgctgcaaaaggatgtgcaactgaaccaccaaacttgaccctgtatcccgctgattttgttgtctgttcattttacaagatatttggctatccaactggtcttggtgccttaattgtaaaaaatgaggctgctagtttactgaacaagacatacttcagtggaggaacggtagctgcttcaattgctgacatcgactttgttcagaaaagaaaaggcattgagcaaactcttgaggatggaacaatctcattcttgagcatatcttctcttcgatatggctttaagataattgatatcctaactatctcagctattgcacggcatactgcatctcttgctacttatgtgagaaacaaaatgctggaattgaagcatagcaatgagaaaaatgtttgcataatctatggacaagattttaaggtaatcaacggccttgaggaagaacaagtgttgacactggtgtcgctggacgtgtggctcatcgcagttataggaaagcccttgccgtggcgctcgaccatctcggtcggggtgggctaaggggtgcaggcagtgttggggtaggcgctgccagcgcgcgtggg

SEQ ID NO: 80587 - DNA, 1522 bp, Zea Mays
gctcccctatgccctatggcctatggccgctccattgaccgtggaggtggtgtggaatattgcgttgcttgcgcgagctcttacgcatcttcttctcttcgagccttccacagttctacctcccgcccgctggtccctagccgtcaagagattccacgctactggctttcttgccccacgccgtatggttatcgtccagcacgagcggagaaactgaaacacgatcccaaccaattcagaacccgatttggtgatcacctccattctcggtagcacttaattccagggacagcaataagaattgctcctctccaagttcttttggagcgtaatcttatccgtttgggtcggattgatatttgataacttgattgccatttggggagttgcgggagagagagagagatgggccagagcaaggcggagttcttgaagcagttcggtggggactacggttacccggacgcgcctaggggcatcgacgagctgcgggccgccgagttcaagcgcctggaagggatggtttacctggaccatgctggtgcgacactgtactcagaggcacagatgacggatgttgctagagaccttatgtctaatgtctatgggaatcctcatatgctctgagcaaaggagctactgtatcagcagttgatgttgaagaggttgttgatccatcaaagaatcatgagagtgatagtttatttaaggtttcaaaacgctcaaaccaaagaagaggtgacaatgtgcttttgcacaattatcagaatggaagcctgtcagctatttcaggaaacaatttaaatctatttgcattcccttcagagtgcaatttctcagggcataagttcaacctcagcttggtcaagctcatcaaggaaggaaaatttatggatttctcatcacaacagcagggccagtggatggttctgatagatgctgcaaaaggatgtgcaactgaaccaccaaacttgaccctgtatcccgctgattttgttgtctgttcattttacaagatatttggctatccaactggtcttggtgccttaattgtaaaaaatgaggctgctagtttactgaacaagacatacttcagtggaggaacggtagctgcttcaattgctgacatcgactttgttcagaaaagaaaaggcattgagcaaactcttgaggatggaacaatctcattcttgagcatatcttctcttcgatatggctttaagataattgatatcctaactatctcagctattgcacggcatactgcatctcttgctacttatgtgagaaacaaaatgctggaattgaagcatagcaatgagaaaaatgtttgcataatctatggacaagattttaaggtaatcaacggccttgaggaagaacaagtgttgacactggtgtcgctggacgtgtggctcatcgcagttataggaaagcccttgccgtggcgctcgaccatctcggtcggggtgggctaaggggtgcaggcagtgttggggtaggcgctgccagcgcgcgtggg

SEQ ID NO: 80588 - DNA, 1733 bp, Zea Mays
ctcccctatgccctatggcctatggccgctccattgaccgtggaggtggtgtggaatattgcgttgcttgcgcgagctcttacgcatcttcttctcttcgagccttccacagttctacctcccgcccgctggtccctagccgtcaagagattccacgctactggctttcttgccccacgccgtatggttatcgtccagcacgagcggagaaactgaaacacgatcccaaccaattcagaacccgatttggtgatcacctccattctcggtagcacttaattccagggacagcaataagaattgctcctctccaagttcttttggagcgtaatcttatccgtttgggtcggattgatatttgataacttgattgccatttggggagttgcgggagagagagagagatgggccagagcaaggcggagttcttgaagcagttcggtggggactacggttacccggacgcgcctaggggcatcgacgagctgcgggccgccgagttcaagcgcctggaagggatggtttacctggaccatgctggtgcgacactgtactcagaggcacagatgacggatgttgctagagaccttatgtctaatgtctatgggaatcctcaacgattcaagcatggctacaatcgatgctgttacttctgtgcggcatcaggtcctaaaatacttcaatgcatctccaagggactacaaatgtatatttacatcaggggcaacagcagccctaaaacttgttggtgaatgttttccatggagtagagacagttgctatatgtacacaatggaaaatcataatagtgttcttgggataagagaatatgctctgagcaaaggagctactgtatcagcagttgatgttgaagaggttgttgatccatcaaagaatcatgagagtgatagtttatttaaggtttcaaaacgctcaaaccaaagaagaggtgacaatgtgcttttgcacaattatcagaatggaagcctgtcagctatttcaggaaacaatttaaatctatttgcattcccttcagagtgcaatttctcagggcataagttcaacctcagcttggtcaagctcatcaaggaaggaaaatttatggatttctcatcacaacagcagggccagtggatggttctgatagatgctgcaaaaggatgtgcaactgaaccaccaaacttgaccctgtatcccgctgattttgttgtctgttcattttacaagatatttggctatccaactggtcttggtgccttaattgtaaaaaatgaggctgctagtttactgaacaagacatacttcagtggaggaacggtagctgcttcaattgctgacatcgactttgttcagaaaagaaaaggcattgagcaaactcttgaggatggaacaatctcattcttgagcatatcttctcttcgatatggctttaagataattgatatcctaactatctcagctattgcacggcatactgcatctcttgctacttatgtgagaaacaaaatgctggaattgaagcatagcaatgagaaaaatgtttgcataatctatggacaagattttaaggtaatcaacggccttgaggaagaacaagtgttgacactggtgtcgctggacgtgtggctcatcgcagttataggaaagcccttgccgtggcgctcgaccatctcggtcggggtgggctaaggggtgcaggcagtgttggggtaggcgctgccagcgcgcgtggg

SEQ ID NO: 80589 - DNA, 1654 bp, Zea Mays
ctcccctatgccctatggcctatggccgctccattgaccgtggaggtggtgtggaatattgcgttgcttgcgcgagctcttacgcatcttcttctcttcgagccttccacagttctacctcccgcccgctggtccctagccgtcaagagattccacgctactggctttcttgccccacgccgtatggttatcgtccagcacgagcggagaaactgaaacacgatcccaaccaattcagaacccgatttggtgatcacctccattctcggtagcacttaattccagggacagcaataagaattgctcctctccaagttcttttggagcgtaatcttatccgtttgggtcggattgatatttgataacttgattgccatttggggagttgcgggagagagagagagatgggccagagcaaggcggagttcttgaagcagttcggtggggactacggttacccggacgcgcctaggggcatcgacgagctgcgggccgccgagttcaagcgcctggaagggatggtttacctggaccatgctggtgcgacactgtactcagaggcacagatgacggatgttgctagagaccttatgtctaatgtctatgggaatcctcatagccagaacgattcaagcatggctacaatcgatgctgttacttctgtgcggcatcaggtcctaaaatacttcaatgcatctccaagggactacaaatgtatatttacatcaggggcaacagcagccctaaaacttgttggtgaatgttttccatggagtagagacagttgctatatgtacacaatggaaaatcataatagtgttcttgggataagagaatatgctctgagcaaaggagctactgtatcagcagttgatgttgaagaggttgttgatccatcaaagaatcatgagagtgatagtttatttaaggtttcaaaacgctcaaaccaaagaagagagtgcaatttctcagggcataagttcaacctcagcttggtcaagctcatcaaggaaggaaaatttatggatttctcatcacaacagcagggccagtggatggttctgatagatgctgcaaaaggatgtgcaactgaaccaccaaacttgaccctgtatcccgctgattttgttgtctgttcattttacaagatatttggctatccaactggtcttggtgccttaattgtaaaaaatgaggctgctagtttactgaacaagacatacttcagtggaggaacggtagctgcttcaattgctgacatcgactttgttcagaaaagaaaaggcattgagcaaactcttgaggatggaacaatctcattcttgagcatatcttctcttcgatatggctttaagataattgatatcctaactatctcagctattgcacggcatactgcatctcttgctacttatgtgagaaacaaaatgctggaattgaagcatagcaatgagaaaaatgtttgcataatctatggacaagattttaaggtaatcaacggccttgaggaagaacaagtgttgacactggtgtcgctggacgtgtggctcatcgcagttataggaaagcccttgccgtggcgctcgaccatctcggtcggggtgggctaaggggtgcaggcagtgttggggtaggcgctgccagcgcgcgtggg

SEQ ID NO: 80590 - DNA, 1711 bp, Zea Mays
ggccgctccattgaccgtggaggtggtgtggaatattgcgttgcttgcgcgagctcttacgcatcttcttctcttcgagccttccacagttctacctcccgcccgctggtccctagccgtcaagagattccacgctactggctttcttgccccacgccgtatggttatcgtccagcacgagcggagaaactgaaacacgatcccaaccaattcagaacccgatttggtgatcacctccattctcggtagcacttaattccagggacagcaataagaattgctcctctccaagttcttttggagcgtaatcttatccgtttgggtcggattgatatttgataacttgattgccatttggggagttgcgggagagagagagagatgggccagagcaaggcggagttcttgaagcagttcggtggggactacggttacccggacgcgcctaggggcatcgacgagctgcgggccgccgagttcaagcgcctggaagggatggtttacctggaccatgctggtgcgacactgtactcagaggcacagatgacggatgttgctagagaccttatgtctaatgtctatgggaatcctcatagccagaacgattcaagcatggctacaatcgatgctgttacttctgtgcggcatcaggtcctaaaatacttcaatgcatctccaagggactacaaatgtatatttacatcaggggcaacagcagccctaaaacttgttggtgaatgttttccatggagtagagacagttgctatatgtacacaatggaaaatcataatagtgttcttgggataagagaatatgctctgagcaaaggagctactgtatcagcagttgatgttgaagaggttgttgatccatcaaagaatcatgagagtgatagtttatttaaggtttcaaaacgctcaaaccaaagaagaggtgacaatgtgcttttgcacaattatcagaatggaagcctgtcagctatttcaggaaacaatttaaatctatttgcattcccttcagagtgcaatttctcagggcataagttcaacctcagcttggtcaagctcatcaaggaaggaaaatttatggatttctcatcacaacagcatggatggttctgatagatgctgcaaaaggatgtgcaactgaaccaccaaacttgaccctgtatcccgctgattttgttgtctgttcattttacaagatatttggctatccaactggtcttggtgccttaattgtaaaaaatgaggctgctagtttactgaacaagacatacttcagtggaggaacggtagctgcttcaattgctgacatcgactttgttcagaaaagaaaaggcattgagcaaactcttgaggatggaacaatctcattcttgagcatatcttctcttcgatatggctttaagataattgatatcctaactatctcagctattgcacggcatactgcatctcttgctacttatgtgagaaacaaaatgctggaattgaagcatagcaatgagaaaaatgtttgcataatctatggacaagattttaaggtaatcaacggccttgaggaagaacaagtgttgacactggtgtcgctggacgtgtggctcatcgcagttataggaaagcccttgccgtggcgctcgaccatctcggtcggggtgggctaaggggtgcaggcagtgttggggtaggcgctgccagcgcgcgtggg

SEQ ID NO: 80591 - DNA, 1340 bp, Zea Mays
ggccgctccattgaccgtggaggtggtgtggaatattgcgttgcttgcgcgagctcttacgcatcttcttctcttcgagccttccacagttctacctcccgcccgctggtccctagccgtcaagagattccacgctactggctttcttgccccacgccgtatggttatcgtccagcacgagcggagaaactgaaacacgatcccaaccaattcagaacccgatttggtgatcacctccattctcgttgcgggagagagagagagatgggccagagcaaggcggagttcttgaagcagttcggtggggactacggttacccggacgcgcctaggggcatcgacgagctgcgggccgccgagttcaagcgcctggaagggatggtttacctggaccatgctggtgcgacactgtactcagaggcacagatgacggatgttgctagagaccttatgtctaatgtctatgggaatcctcatatgctctgagcaaaggagctactgtatcagcagttgatgttgaagaggttgttgatccatcaaagaatcatgagagtgatagtttatttaaggtttcaaaacgctcaaaccaaagaagaggtgacaatgtgcttttgcacaattatcagaatggaagcctgtcagctatttcaggaaacaatttaaatctatttgcattcccttcagagtgcaatttctcagggcataagttcaacctcagcttggtcaagctcatcaaggaaggaaaatttatggatttctcatcacaacagcagggccagtggatggttctgatagatgctgcaaaaggatgtgcaactgaaccaccaaacttgaccctgtatcccgctgattttgttgtctgttcattttacaagatatttggctatccaactggtcttggtgccttaattgtaaaaaatgaggctgctagtttactgaacaagacatacttcagtggagaaaagaaaaggcattgagcaaactcttgaggatggaacaatctcattcttgagcatatcttctcttcgatatggctttaagataattgatatcctaactatctcagctattgcacggcatactgcatctcttgctacttatgtgagaaacaaaatgctggaattgaagcatagcaatgagaaaaatgtttgcataatctatggacaagattttaaggtaatcaacggccttgaggaagaacaagtgttgacactggtgtcgctggacgtgtggctcatcgcagttataggaaagcccttgccgtggcgctcgaccatctcggtcggggtgggctaaggggtgcaggcagtgttggggtaggcgctgccagcgcgcgtggg

SEQ ID NO: 80592 - DNA, 354 bp, Zea Mays
gcaagtcacccgcggtctcagcttaatcttttaacccgaaaacttggtacctggcagaggtacatcttttctgatgttgaatccatcacggccgtgatggattcaccatcaagttttattttcgaaaacgaccctcccactttgccaaacatcttttgtaaaacaaattcttttgtttttctaaagcaatactaagcatagtaaaacctttttgtaaaaacagggtttcaaggagggtaatcaagatcaaggaaggtaatgcgggaattgtttaatcaatcaactcctatcacctaatgcagcaaacaagtgagaaagattttaaaaacatcaagggaggtggcaaatgcaccg

SEQ ID NO: 80593 - DNA, 617 bp, Zea Mays
ctagcttcgtcttcacctgattcttgggattacttgacgacgcacggaacggcgacgagattgtgtctggagcgagctggcgaagtggagatcgagctagggatgacgggtttgacgactcgacgataaacgcgagcacacgcaaaacctgatggacgaaaagcgagcgcacacgaggcaagcagtacggatttgaggcgtggaaaaattgcccacggcgaaatgagccgagcaaggagcgctcgtgaactttatggcggggtcggcagcagccgatgccagagcgcacggcgaggtaatttcgtcgatgcggacagcgaacaggcgatttgatgccgaacagagagcttcgcgcgcgcccaacagagaacttgcgcgcgcagggaagaacgacgagctgggaaagctgcacgtgatctcggcgaggaagtagagtgtgcacaagggagcaggccggacgcggctatggcagcaaggcgagatcgtgaccacgactaaccacgacgatgactctggggttgtaaacgatggagaggacctcgccgaggttaataaccggcgactacggatgagaatacagagttccaaggccgtggacaaggagcaatagggaaaac

SEQ ID NO: 80594 - DNA, 1798 bp, Zea Mays
tatggtgttcttgagctttggggttgaaatcgggacagcagtcaaattttcaaagtattttttttcttcttcacactctctgatcgactattttgatctttgagaagcaactattaaaacatacagacttcaaagctgataccactttacacactacagctactttcactctgaaccacctaccaacagttactggttacatgttaggttatggtctaatcatcgggtcgtcttccagttcgcccgtggacacagacactgcatgccattccacaaaactagaacagacatgtcccatccaacctaaggtgccgtttgattcacgaaatgtaacgtaaatggtaacgattcacacttgaataccggtggtaacaaatttgaataaggaggtatccatttgtagtgtgatatcgattacggttggacttaaataaacatatgatctaacgttattggttacccattacgttgccaatatgtgaaccaaacggcacctaagagactgacaatacgggagggacgtgtttgtcgcgagttgcttggccaaactctcaggcaaagggagatgagtgggtgtgttgttcggtggagaaaaaacaaatgaaactcgaggacgagtctgagcctgagttggtcattaatttcattagatgactttgtatctttagttgacttgacttggcaacgggacttggtatatagaagtcagatctagaactccttgaggctctccacccaaacaaccacagcttgctggcaagcctctgaatccatgcatccttcatcaccttccattctgcacttacagcagcagcagcagccgccgccacagcttgctgcgcttgttgtgcgacctcagctcgctccatggaccccttctgcttcagcttgcagataagcggatgtatgtcagttgcgtcatcatttatcactgtccaatgtccatagacatcacaacaagcactcgaagatttgggactgttccaacaagacatgcaccacaccaataccgggcaacaagccatgtaatgaccgccaaccggccggccacgctgctcggagcacgctgccggatcggaggttgccgcgtgaaagaaggcaggtcgagctcacgtagcatctactagcggagatgctctagttgcgtgccggactgccagttcaaacgtcaaacaaacaaaaaaaaaacttgaagataaaacaggttgccagtaaaaaaaaactagaaagggtagagaaaattttgcatgttgcatggccgtctattcttatgcacggagcgaaaaaggatgaaggaaaacggatcgaacccagctctacggcctgcggtgcacccaaagaagaggagaacgaagggggctagagcagtagagctcgaccttgaatcagcggatgtgcggcttcgcgtgtcgtcgtcgatccacatccacagcgcgaaggcgaccaggaaccacgcgggcgagacgggcggcgcggcgagaatctcggcgaagaggaggtagacggcggccgagatcatcacggcgacagctacgacacgcgacggagacgggaggacggcgacccggtcgcggtccggcaccgttcctgccttccatcgcagatgagatcgctatcttctcttctttccttgtctcgaaggggactggtgtgtgcgtgctgcaagcctcaggctctaaactgcagtcaccggctcacggcagcgacgagcccttacataaaatgtcctaatatactttttatggagggttagggcaaccgtacagtactttatacagtacagtactttatataaaat

SEQ ID NO: 80595 - DNA, 1192 bp, Zea Mays
tatggtgttcttgagctttggggttgaaatcgggacagcagtcaaattttcaaagtattttttttcttcttcacactctctgatcgactattttgatctttgagaagcaactattaaaacatacagacttcaaagctgataccactttacacactacagctactttcactctgaaccacctaccaacagttactggttacatgttaggttatggtctaatcatcgggtcgtcttccagttcgcccgtggacacagacactgcatgccattccacaaaactagaacagacatgtcccatccaacctaaggtgccgtttgattcacgaaatgtaacgtaaatggtaacgattcacacttgaataccggtggtaacaaatttgaataaggaggtatccatttgtagtgtgatatcgattacggttggacttaaataaacatatgatctaacgttattggttacccattacgttgccaatatgtgaaccaaacggcacctaagagactgacaatacgggagggacgtgtttgtcgcgagttgcttggccaaactctcaggcaaagggagatgagtgggtgtgttgttcggtggagaaaaaacaaatgaaactcgaggacgagtctgagcctgagttggtcattaatttcattagatgactttgtatctttagttgacttgacttggcaacgggacttggtatatagaagtcagatctagaactccttgaggctctccacccaaacaaccacagcttgctggcaagcctctgaatccatgcatccttcatcaccttccattctgcacttacagcagcagcagcagccgccgccacagcttgctgcgcttgttgtgcgacctcagctcgctccatggaccccttctgcttcagcttgcagataagcggatgtatgtcagttgcgtcatcatttatcactgtccaatgtccatagacatcacaacaagcactcgaagatttgggactgttccaacaagacatgcaccacaccaataccgggcaacaagccatgtaatgaccgccaaccggccggccacgctgctcggagcacgctgccggatcggaggttgccgcgtgaaagaaggcaggtcgagctcacgtaggtccatggagtctggagaccggagggaataacgccaagaggtcgtagcttggtgcttcccatccgctaaaataac

SEQ ID NO: 80596 - DNA, 1937 bp, Zea Mays
aaattttcaaagtattttttttcttcttcacactctctgatcgactattttgatctttgagaagcaactattaaaacatacagacttcaaagctgataccactttacacactacagctactttcactctgaaccacctaccaacagttactggttacatgttaggttatggtctaatcatcgggtcgtcttccagttcgcccgtggacacagacactgcatgccattccacaaaactagaacagacatgtcccatccaacctaaggtgccgtttgattcacgaaatgtaacgtaaatggtaacgattcacacttgaataccggtggtaacaaatttgaataaggaggtatccatttgtagtgtgatatcgattacggttggacttaaataaacatatgatctaacgttattggttacccattacgttgccaatatgtgaaccaaacggcacctaagagactgacaatacgggagggacgtgtttgtcgcgagttgcttggccaaactctcaggcaaagggagatgagtgggtgtgttgttcggtggagaaaaaacaaatgaaactcgaggacgagtctgagcctgagttggtcattaatttcattagatgactttgtatctttagttgacttgacttggcaacgggacttggtatatagaagtcagatctagaactccttgaggctctccacccaaacaaccacagcttgctggcaagcctctgaatccatgcatccttcatcaccttccattctgcacttacagcagcagcagcagccgccgccacagcttgctgcgcttgttgtgcgacctcagctcgctccatggaccccttctgcttcagcttgcagataagcggatgtatgtcagttgcgtcatcatttatcactgtccaatgtccatagacatcacaacaagcactcgaagatttgggactgttccaacaaggtatgttctggtctttccatggctttgtagcttctataggcgtataccatatattaccatctcagtaaaagacatttcagcttcctggcccaactcagatgccctgcaggttcccaaaactcatcaaactctgaccatggacattatattgttatttagctatttaggctggtcatcatcatcctgtcacttgttttgaaaagcatgggttcacgatactaaaatatttaatgccatttttttttagcaccgagctgttcaaaacgacaagcacttgagaagagttctccctgcatttatgaatacttgtgaaactctgaccatgaatgtaaccttagatattaaatatacatgatggaatgttcaaacttttgtcttctccaaaaatttgagtagacgtttcatttgtggaacctattggtaaaaattcgagttttgaaggccaagctttcgagagcagggttcccaatttcgggcagaaatctccgaaattttcttgagttttggtgggtccgaaatatatatatttccgaaattggcattttaatatgaattataccgctttttaaaaccctatttgcttttgaactagaattcccgacatttcggaaattccctggttttcgctgggggcgaattttttcttttctgaaattgtacactcaaaattttgatttcacaattcacccaagagttttgttccaaacatttttgaaaatgcccagttatcgccggtccaaactcagtatcagccctcaggcttaggaaattcagttggccgggctcttttgtcaaacacttctaccataacgtctgcgaccaagtcaactccttcacaaacagagctgaaaaataaagttatactagtagaatatatatgcgttgcgacggtatataaattatttgataaaatattaacgcacaacggttatatggaaacgaaagcgcaccactggttggaaaaatagggttacctgtctagttccttt

SEQ ID NO: 80597 - DNA, 1690 bp, Zea Mays
aaattttcaaagtattttttttcttcttcacactctctgatcgactattttgatctttgagaagcaactattaaaacatacagacttcaaagctgataccactttacacactacagctactttcactctgaaccacctaccaacagttactggttacatgttaggttatggtctaatcatcgggtcgtcttccagttcgcccgtggacacagacactgcatgccattccacaaaactagaacagacatgtcccatccaacctaaggtgccgtttgattcacgaaatgtaacgtaaatggtaacgattcacacttgaataccggtggtaacaaatttgaataaggaggtatccatttgtagtgtgatatcgattacggttggacttaaataaacatatgatctaacgttattggttacccattacgttgccaatatgtgaaccaaacggcacctaagagactgacaatacgggagggacgtgtttgtcgcgagttgcttggccaaactctcaggcaaagggagatgagtgggtgtgttgttcggtggagaaaaaacaaatgaaactcgaggacgagtctgagcctgagttggtcattaatttcattagatgactttgtatctttagttgacttgacttggcaacgggacttggtatatagaagtcagatctagaactccttgaggctctccacccaaacaaccacagcttgctggcaagcctctgaatccatgcatccttcatcaccttccattctgcacttacagcagcagcagcagccgccgccacagcttgctgcgcttgttgtgcgacctcagctcgctccatggaccccttctgcttcagcttgcagataagcggatgtatgtcagttgcgtcatcatttatcactgtccaatgtccatagacatcacaacaagcactcgaagatttgggactgttccaacaagcaccgagctgttcaaaacgacaagcacttgagaagagttctccctgcatttatgaatacttgtgaaactctgaccatgaatgtaaccttagatattaaatatacatgatggaatgttcaaacttttgtcttctccaaaaatttgagtagacgtttcatttgtggaacctattggtaaaaattcgagttttgaaggccaagctttcgagagcagggttcccaatttcgggcagaaatctccgaaattttcttgagttttggtgggtccgaaatatatatatttccgaaattggcattttaatatgaattataccgctttttaaaaccctatttgcttttgaactagaattcccgacatttcggaaattccctggttttcgctgggggcgaattttttcttttctgaaattgtacactcaaaattttgatttcacaattcacccaagagttttgttccaaacatttttgaaaatgcccagttatcgccggtccaaactcagtatcagccctcaggcttaggaaattcagttggccgggctcttttgtcaaacacttctaccataacgtctgcgaccaagtcaactccttcacaaacagagctgaaaaataaagttatactagtagaatatatatgcgttgcgacggtatataaattatttgataaaatattaacgcacaacggttatatggaaacgaaagcgcaccactggttggaaaaatagggttacctgtctagttccttt

SEQ ID NO: 80598 - DNA, 281 bp, Zea Mays
ccacccaaacaaccacagcttgctggcaagcctctgaatccatgcatccttcatcaccttccattctgcacttacagcagcagcagcagccgccgccacagcttgctgcgcttgttgtgcgacctcagctcgctccatggaccccttctgcttcagcttgcagataagcggatgtatgtcagttgcgtcatcatttatcactgtccaatgtccatagacatcacaacaagcactcgaagatttgggactgttccaacaaggctgagggtgagcatccccgg

SEQ ID NO: 80599 - DNA, 2373 bp, Zea Mays
ctcgtcgacgccatccccgtgagcattttgttactctaaaagaaaagggaaaaaactatatccttttataactaactatatattagctaaaaagcctattgtgatccttgaaacaaaatactctctccacatgtaaatatattttaggacagattaatggggtggaaaaagtttaatgcttctagttaaagcaaccaggctatctagctcttgattggatactaaaaagttcttatatttgtggacaaaatttagacacacgaagtccttatatttatagatagcgggggtagcaaaggttgcaaaccaaaaagaatcatagggctgcctttattatgtccggggaaacgagaagtattgcatgcgaggaaaataaatcaaattgtttttactactattttaacaatatggaaagaaacttgttcgtgtgttcaatttagttagtacacgtaggtatattaattagctattcggagcatgtttggcacttgcaatgtttgattgacttatgtagcagagccatcatgtatctcaactcgatgtttctttgcatgagttgaaatatatatatgagtacatataagggctccttcagatgatgagggaacaaatgcacatgggtttcaagcacaaggggaattttctacctgcacatgcatgacgcctctccttccgaccggagaaaaacatttccacatatccaattgagaggccatgtggggattaaaatctcaaccaactaaaaaatcagaagaaaaaaaaagaattcgaaaatattgtagcagtttagaacatcagcaccaatgctaagtttactagaacaagtggcagaagctacaggttatcgtgtactcattgaaaacggtagcttagctacacaatcttaaacagggctatgcaaaaaggtgaagtagcgggaatatagctagcactgataattacagtataaatgtgagaagtaacaaagttaagacaccaatgccatgagacaatagataaaaataatcatttgattttgtctgctcacatgccattataatgatccagtagacagactttgcattgccttgaactaagaaatcagagtcagcaagatatacattggacttggagacaaacacacagaatgctagccaaatcatttgacctatatatgcttcggtacacaaaggctaccaccagctccattatccaatgacattctgcagctaagtggcaactgtaacaagcagaggaccacagcagcagcaggcatgcaagcacacattccgacattccgtagtgttggtttttttctatagttgcacacaagttctgttctgaatactactgtaggggtggagctgcaaaatagcgctaggttatttcagaataaagacaaacagacagacataattttagtcctagtgtcttatgttcttgtgcgtgccatgtgatgacgtgtctcctccatagccattattattaggtatacaactctacaagccaatgccaatgctttgatatttcagtctctgcaagtatatgctaatagtaccgaattccactagattcacatttgtgcttaattggagtctcgaactaatgtgttgataattgacaaactttttgtcagacatgcaccacaccaataccgggcaacaagccatgtaatgaccgccaaccggccggccacgctgctcggagcacgctgccggatcggaggttgccgcgtgaaagaaggcaggtcgagctcacgtaggtcagtagaatgacaaatttctgtcttccttcccgcgtggaaactggttggatctctcacttactcccgtgcgtaatccacgagctgtttgcagcatctactagcggagatgctctagttgcgtgccggactgccagttcaaacgtcaaacaaacaaaaaaaaaacttgaagataaaacaggttgccagtaaaaaaaaactagaaagggtagagaaaattttgcatgttgcatggccgtctattcttatgcacggagcgaaaaaggatgaaggaaaacggatcgaacccagctctacggcctgcggtgcacccaaagaagaggagaacgaagggggctagagcagtagagctcgaccttgaatcagcggatgtgcggcttcgcgtgtcgtcgtcgatccacatccacagcgcgaaggcgaccaggaaccacgcgggcgagacgggcggcgcggcgagaatctcggcgaagaggaggtagacggcggccgagatcatcacggcgacagctacgacacgcgacggagacgggaggacggcgacccggtcgcggtccggcaccgttcctgccttccatcgcagatgagatcgctatcttctcttctttccttgtctcgaaggggactggtgtgtg

SEQ ID NO: 80600 - DNA, 2558 bp, Zea Mays
taaacccctctctctggattcctcctcccgtcctccggtcctcccgtttccccccttccccttccgcttcgccattccttctcggtcagaacgacgcgcatccccgcccgcacgttcccgtgctctcgcttctccggaggcgaccagggttgggacttgggaggctagcgagaaggtgctacccgggccaactcctccgatcgcccgcaggagaaggggatctctccgcctccccgccctcgtcgggcctttcccatcgccacccgcgaggccacgcgctccagctcttgtgaaccggaagggttctggatttctgagccaagcgaccagcacggtggctcggccgggctgacactcccctcccctgtcgcccggtctcttccttcccgagcagaactcccctgcgtcttgccgcttctagcatcggggagaaaaattatagaggaaggatatgcgggatccatttgatgcaccggttgatctcattaacccggaccataatggtgggaacaaactttctaggactggtgcagtgtctgctggggactatggtttacaaaatggacccaaatcctttgccccaaactccgacaccctagtcaggcatcaagtccaggttgcatccttgcacaaagacttagttttggaagatcccaatactcgtatcatggatcctgagaccaaggaactttactttagatcacaatcacaaggggacgagatcttgttgcttcgcaagaaaattgctgaggcatctctcaaggagctgagattactgggtgaaaaacatattctggagaggaggctcacagacttgaggatggctgttgacgagaagcaggaagaagctatatctggtgctttgcaacaattgaaccagaagaaaacccatcttgaggacaatatgagactggcaaatgaactaaaagttgaggaagaagagctatacttttttacttcttcattgcttagcatgctagcagaatacaatattcgcccacctcaaataaatgcttccatcattacaactgttacaaagcgtttgtaccaacagatgcatttgaagctcagatctttaaatgacaatttaggtgatatgactcaacctggaaatatatataatcccaatcttcagcaagtaaccctatcaagaaatgaaccttccccatcttataatttggattcaaataggaacactcttcaacagtatgctcaaggtccaagtgaccgacatatggatcaaatgtaccatggatccaattttcagcaggatactggcggtactactccctctaattattttgagggagacagaagagtagatggtgactcacagttataccaacctgatggtgacgctttacctggtattgaggggtttcaaattgctggtgaacctagaccaggatttcaattaacagcatgcggttttcctactaatggtactaccctttgcaatttccagtgggttcgccatcttgaaaatggtaccagacagtctatcgaaggtgccacgatgtatgactatgtggtcactgcagatgatgttggtacttttcttgctgtagactgtacacctatggatgataatggccgccagggtgatttggtgacagaatttgctaacaatgggaataagataacctgtgatccagagatgcagagtcatattgatgcatatatttctaatgggagagctgaatttgaagtttttgtcctgcaggcttattctcctgaggagtgggaattggctacattggtgctaacacgacctaactatcagattaagttcaaaaagaccggtgaagctataattgatgagaagtactcacaaagtctacagatgaaaattccaaatgggcgcacaactcaatttgttttagtaactgcgggtgcaactctcccatttaacacacagggaatatcagagccaaacaatgaggattacgatgttaggttacgcgatctaatcgtattagtcatgagaactttccagaaaaaggctttagatgccaaaaggaaagtcaacacttagaatccatgttgatctgttacaaaagattctatgtaaaaccgtagaaaattttcctatttttgattgttttgtgcagtattcgatgatttttgttcttgagatggaatgagctctcgatcaaagttttgctaggtgctagacggaatctaggcgatgacccttagcctagggactagtccaagcctaggcgatgctagacgttttgccaacttatataatatatacatttatagataaaaaagagggaaggaccagtagacataccttttgtccttgcagatctgctaatcactgaattctcaagcactgctgcaatagaagtggacaacacttttagatgtaattgagcatcaatacaagtgataaaaaaataggaaatagcaagttaggtacttatctgatgtctgacccttctcccatccattaagtactgatcagcagcataggatggtctttagaaatcacaaacatgaagggatagtaggcaacaacacatataaaatgcagcaacacgaaataaaat

SEQ ID NO: 80601 - DNA, 2484 bp, Zea Mays
taaacccctctctctggattcctcctcccgtcctccggtcctcccgtttccccccttccccttccgcttcgccattccttctcggtcagaacgacgcgcatccccgcccgcacgttcccgtgctctcgcttctccggaggcgaccagggttgggacttgggaggctagcgagaaggtgctacccgggccaactcctccgatcgcccgcaggagaaggggatctctccgcctccccgccctcgtcgggcctttcccatcgccacccgcgaggccacgcgctccagctcttgtgaaccggaagggttctggatttctgagccaagcgaccagcacggtggctcggccgggctgacactcccctcccctgtcgcccggtctcttccttcccgagcagaactcccctgcgtcttgccgcttctagcatcggggagaaaaattatagaggaaggatatgcgggatccatttgatgcaccggttgatctcattaacccggaccataatggtgggaacaaactttctaggactggtgcagtgtctgctggggactatggtttacaaaatggacccaaatcctttgccccaaactccgacaccctagtcaggcatcaagtccaggttgcatccttgcacaaagacttagttttggaagatcccaatactcgtatcatggatcctgagaccaaggaactttactttagatcacaatcacaaggggacgagatcttgttgcttcgcaagaaaattgctgaggcatctctcaaggagctgagattactgggtgaaaaacatattctggagaggaggctcacagacttgaggatggctgttgacgagaagcaggaagaagctatatctggtgctttgcaacaattgaaccagaagaaaacccatcttgaggacaatatgagactggcaaatgaactaaaagttgaggaagaagagctatacttttttacttcttcattgcttagcatgctagcagaatacaatattcgcccacctcaaataaatgcttccatcattacaactgttacaaagcgtttgtaccaacagatgcatttgaagctcagatctttaaatgacaatttaggtgatatgactcaacctggaaatatatataatcccaatcttcagcaagtaaccctatcaagaaatgaaccttccccatcttataatttggattcaaataggaacactcttcaacagtatgctcaaggtccaagtgaccgacatatggatcaaatggatactggcggtactactccctctaattattttgagggagacagaagagtagatggtgactcacagttataccaacctgatggtgacgctttacctggtattgaggggtttcaaattgctggtgaacctagaccaggatttcaattaacagcatgcggttttcctactaatggtactaccctttgcaatttccagtgggttcgccatcttgaaaatggtaccagacagtctatcgaaggtgccacgatgtatgactatgtggtcactgcagatgatgttgggtgatttggtgacagaatttgctaacaatgggaataagataacctgtgatccagagatgcagagtcatattgatgcatatatttctaatgggagagctgaatttgaagtttttgtcctgcaggcttattctcctgaggagtgggaattggctacattggtgctaacacgacctaactatcagattaagttcaaaaagaccggtgaagctataattgatgagaagtactcacaaagtctacagatgaaaattccaaatgggcgcacaactcaatttgttttagtaactgcgggtgcaactctcccatttaacacacagggaatatcagagccaaacaatgaggattacgatgttaggttacgcgatctaatcgtattagtcatgagaactttccagaaaaaggctttagatgccaaaaggaaagtcaacacttagaatccatgttgatctgttacaaaagattctatgtaaaaccgtagaaaattttcctatttttgattgttttgtgcagtattcgatgatttttgttcttgagatggaatgagctctcgatcaaagttttgctaggtgctagacggaatctaggcgatgacccttagcctagggactagtccaagcctaggcgatgctagacgttttgccaacttatataatatatacatttatagataaaaaagagggaaggaccagtagacataccttttgtccttgcagatctgctaatcactgaattctcaagcactgctgcaatagaagtggacaacacttttagatgtaattgagcatcaatacaagtgataaaaaaataggaaatagcaagttaggtacttatctgatgtctgacccttctcccatccattaagtactgatcagcagcataggatggtctttagaaatcacaaacatgaagggatagtaggcaacaacacatataaaatgcagcaacacgaaataaaat

SEQ ID NO: 80602 - DNA, 2531 bp, Zea Mays
taaacccctctctctggattcctcctcccgtcctccggtcctcccgtttccccccttccccttccgcttcgccattccttctcggtcagaacgacgcgcatccccgcccgcacgttcccgtgctctcgcttctccggaggcgaccagggttgggacttgggaggctagcgagaaggtgctacccgggccaactcctccgatcgcccgcaggagaaggggatctctccgcctccccgccctcgtcgggcctttcccatcgccacccgcgaggccacgcgctccagctcttgtgaaccggaagggttctggatttctgagccaagcgaccagcacggtggctcggccgggctgacactcccctcccctgtcgcccggtctcttccttcccgagcagaactcccctgcgtcttgccgcttctagcatcggggagaaaaattatagaggaaggatatgcgggatccatttgatgcaccggttgatctcattaacccggaccataatggtgggaacaaactttctaggactggtgcagtgtctgctggggactatggtttacaaaatggacccaaatcctttgccccaaactccgacaccctagtcaggcatcaagtccaggttgcatccttgcacaaagacttagttttggaagatcccaatactcgtatcatggatcctgagaccaaggaactttactttagatcacaatcacaaggggacgagatcttgttgcttcgcaagaaaattgctgaggcatctctcaaggagctgagattactgggtgaaaaacatattctggagaggaggctcacagacttgaggatggctgttgacgagaagcaggaagaagctatatctggtgctttgcaacaattgaaccagaagaaaacccatcttgaggacaatatgagactggcaaatgaactaaaagttgaggaagaagagctatacttttttacttcttcattgcttagcatgctagcagaatacaatattcgcccacctcaaataaatgcttccatcattacaactgttacaaagcgtttgtaccaacagatgcatttgaagctcagatctttaaatgacaatttaggtgatatgactcaacctggaaatatatataatcccaatcttcagcaagtaaccctatcaagaaatgaaccttccccatcttataatttggattcaaataggaacactcttcaacagtatgctcaaggtccaagtgaccgacatatggatcaaatggatactggcggtactactccctctaattattttgagggagacagaagagtagatggtgactcacagttataccaacctgatggtgacgctttacctggtattgaggggtttcaaattgctggtgaacctagaccaggatttcaattaacagcatgcggttttcctactaatggtactaccctttgcaatttccagtgggttcgccatcttgaaaatggtaccagacagtctatcgaaggtgccacgatgtatgactatgtggtcactgcagatgatgttggtacttttcttgctgtagactgtacacctatggatgataatggccgccagggtgatttggtgacagaatttgctaacaatgggaataagataacctgtgatccagagatgcagagtcatattgatgcatatatttctaatgggagagctgaatttgaagtttttgtcctggcttattctcctgaggagtgggaattggctacattggtgctaacacgacctaactatcagattaagttcaaaaagaccggtgaagctataattgatgagaagtactcacaaagtctacagatgaaaattccaaatgggcgcacaactcaatttgttttagtaactgcgggtgcaactctcccatttaacacacagggaatatcagagccaaacaatgaggattacgatgttaggttacgcgatctaatcgtattagtcatgagaactttccagaaaaaggctttagatgccaaaaggaaagtcaacacttagaatccatgttgatctgttacaaaagattctatgtaaaaccgtagaaaattttcctatttttgattgttttgtgcagtattcgatgatttttgttcttgagatggaatgagctctcgatcaaagttttgctaggtgctagacggaatctaggcgatgacccttagcctagggactagtccaagcctaggcgatgctagacgttttgccaacttatataatatatacatttatagataaaaaagagggaaggaccagtagacataccttttgtccttgcagatctgctaatcactgaattctcaagcactgctgcaatagaagtggacaacacttttagatgtaattgagcatcaatacaagtgataaaaaaataggaaatagcaagttaggtacttatctgatgtctgacccttctcccatccattaagtactgatcagcagcataggatggtctttagaaatcacaaacatgaagggatagtaggcaacaacacatataaaatgcagcaacacgaaataaaat

SEQ ID NO: 80603 - DNA, 2548 bp, Zea Mays
taaacccctctctctggattcctcctcccgtcctccggtcctcccgtttccccccttccccttccgcttcgccattccttctcggtcagaacgacgcgcatccccgcccgcacgttcccgtgctctcgcttctccggaggcgaccagggttgggacttgggaggctagcgagaaggtgctacccgggccaactcctccgatcgcccgcaggagaaggggatctctccgcctccccgccctcgtcgggcctttcccatcgccacccgcgaggccacgcgctccagctcttgtgaaccggaagggttctggatttctgagccaagcgaccagcacggtggctcggccgggctgacactcccctcccctgtcgcccggtctcttccttcccgagcagaactcccctgcgtcttgccgcttctagcatcggggagaaaaattatagaggaaggatatgcgggatccatttgatgcaccggttgatctcattaacccggaccataatggtgggaacaaactttctaggactggtgcagtgtctgctggggactatggtttacaaaatggacccaaatcctttgccccaaactccgacaccctagtcaggcatcaagtccaggttgcatccttgcacaaagacttagttttggaagatcccaatactcgtatcatggatcctgagaccaaggaactttactttagatcacaatcacaaggggacgagatcttgttgcttcgcaagaaaattgctgaggcatctctcaagttatttcattgcggcaggagctgagattactgggtgaaaaacatattctggagaggaggctcacagacttgaggatggctgttgacgagaagcaggaagaagctatatctggtgctttgcaacaattgaaccagaagaaaacccatcttgaggacaatatgagactggcaaatgaactaaaagttgaggaagaagagctatacttttttacttcttcattgcttagcatgctagcagaatacaatattcgcccacctcaaataaatgcttccatcattacaactgttacaaagcgtttgtaccaacagatgcatttgaagctcagatctttaaatgacaatttaggtgatatgactcaacctggaaatatatataatcccaatcttcagcaagtaaccctatcaagaaatgaaccttccccatcttataatttggattcaaataggaacactcttcaacagtatgctcaaggtccaagtgaccgacatatggatcaaatggatactggcggtactactccctctaattattttgagggagacagaagagtagatggtgactcacagttataccaacctgatggtgacgctttacctggtattgaggggtttcaaattgctggtgaacctagaccaggatttcaattaacagcatgcggttttcctactaatggtactaccctttgcaatttccagtgggttcgccatcttgaaaatggtaccagacagtctatcgaaggtgccacgatgtatgactatgtggtcactgcagatgatgttggtacttttcttgctgtagactgtacacctatggatgataatggccgccagggtgatttggtgacagaatttgctaacaatgggaataagataacctgtgatccagagatgcagagtcatattgatgcatatatttctaatgggagagctgaatttgaagtttttgtcctggcttattctcctgaggagtgggaattggctacattggtgctaacacgacctaactatcagattaagttcaaaaagaccggtgaagctataattgatgagaagtactcacaaagtctacagatgaaaattccaaatgggcgcacaactcaatttgttttagtaactgcgggtgcaactctcccatttaacacacagggaatatcagagccaaacaatgaggattacgatgttaggttacgcgatctaatcgtattagtcatgagaactttccagaaaaaggctttagatgccaaaaggaaagtcaacacttagaatccatgttgatctgttacaaaagattctatgtaaaaccgtagaaaattttcctatttttgattgttttgtgcagtattcgatgatttttgttcttgagatggaatgagctctcgatcaaagttttgctaggtgctagacggaatctaggcgatgacccttagcctagggactagtccaagcctaggcgatgctagacgttttgccaacttatataatatatacatttatagataaaaaagagggaaggaccagtagacataccttttgtccttgcagatctgctaatcactgaattctcaagcactgctgcaatagaagtggacaacacttttagatgtaattgagcatcaatacaagtgataaaaaaataggaaatagcaagttaggtacttatctgatgtctgacccttctcccatccattaagtactgatcagcagcataggatggtctttagaaatcacaaacatgaagggatagtaggcaacaacacatataaaatgcagcaacacgaaataaaat

SEQ ID NO: 80604 - DNA, 2044 bp, Zea Mays
taaacccctctctctggattcctcctcccgtcctccggtcctcccgtttccccccttccccttccgcttcgccattccttctcggtcagaacgacgcgcatccccgcccgcacgttcccgtgctctcgcttctccggaggcgaccagggttgggacttgggaggctagcgagaaggtgctacccgggccaactcctccgatcgcccgcaggagaaggggatctctccgcctccccgccctcgtcgggcctttcccatcgccacccgcgaggccacgcgctccagctcttgtgaaccggaagggttctggatttctgagccaagcgaccagcacggtggctcggccgggctgacactcccctcccctgtcgcccggtctcttccttcccgagcagaactcccctgcgtcttgccgcttctagcatcggggagaaaaattatagaggaaggatatgcgggatccatttgatgcaccggttgatctcattaacccggaccataatggtgggaacaaactttctaggactggtgcagtgtctgctggggactatggtttacaaaatggacccaaatcctttgccccaaactccgacaccctagtcaggcatcaagtccaggttgcatccttgcacaaagacttagttttggaagatcccaatactcgtatcatggatcctgagaccaaggaactttactttagatcacaatcacaaggggacgagatcttgttgcttcgcaagaaaattgctgaggcatctctcaaggagctgagattactgggtgaaaaacatattctggagaggaggctcacagacttgaggatggctgttgacgagaagcaggaagaagctatatctggtgctttgcaacaattgaaccagaagaaaacccatcttgaggacaatatgagactggcaaatgaactaaaagttgaggaagaagagctatacttttttacttcttcattgcttagcatgctagcagaatacaatattcgcccacctcaaataaatgcttccatcattacaactgttacaaagcgtttgtaccaacagatgcatttgaagctcagatctttaaatgacaatttaggtgatatgactcaacctggaaatatatataatcccaatcttcagcaagtaaccctatcaagaaatgaaccttccccatcttataatttggattcaaataggaacactcttcaacagtatgctcaaggtccaagtgaccgacatatggatcaaatggatactggcggtactactccctctaattattttgagggagacagaagagtagatggtgactcacagttataccaacctgatggtgacgctttacctggtattgaggggtttcaaattgctggtgaacctagaccaggatttcaattaacagcatgcggttttcctactaatggtactaccctttgcaatttccagtgggttcgccatcttgaaaatggtaccagacagtctatcgaaggtaaagtggggaatttatcctagatcctatggcatattattgttcacagataatttaattttgttgactagttctttgtattttgaaatttaggtgccacgatgtatgactatgtggtcactgcagatgatgttggtacttttcttgctgtagactgtacacctatggatgataatggccgccagggtgatttggtgacagaatttgctaacaatgggaataagataacctgtgatccagagatgcagagtcatattgatgcatatatttctaatgggagagctgaatttgaagtttttgtcctgcaggcttattctcctgaggagtgggaattggctacattggtgctaacacgacctaactatcagattaagttcaaaaagaccggtgaagctataattgatgagaagtactcacaaagtctacagatgaaaattccaaatgggcgcacaactcaatttgttttagtaactgcgggtgcaactctcccatttaacacacagggaatatcagagccaaacaatgaggattacgatgttagggacaattcatgaaaggct

SEQ ID NO: 80605 - DNA, 2554 bp, Zea Mays
aaacccctctctctggattcctcctcccgtcctccggtcctcccgtttccccccttccccttccgcttcgccattccttctcggtcagaacgacgcgcatccccgcccgcacgttcccgtgctctcgcttctccggaggcgaccagggttgggacttgggaggctagcgagaaggtgctacccgggccaactcctccgatcgcccgcaggagaaggggatctctccgcctccccgccctcgtcgggcctttcccatcgccacccgcgaggccacgcgctccagctcttgtgaaccggaagggttctggatttctgagccaagcgaccagcacggtggctcggccgggctgacactcccctcccctgtcgcccggtctcttccttcccgagcagaactcccctgcgtcttgccgcttctagcatcggggagaaaaattatagaggaaggatatgcgggatccatttgatgcaccggttgatctcattaacccggaccataatggtgggaacaaactttctaggactggtgcagtgtctgctggggactatggtttacaaaatggacccaaatcctttgccccaaactccgacaccctagtcaggcatcaagtccaggttgcatccttgcacaaagacttagttttggaagatcccaatactcgtatcatggatcctgagaccaaggaactttactttagatcacaatcacaaggggacgagatcttgttgcttcgcaagaaaattgctgaggcatctctcaaggagctgagattactgggtgaaaaacatattctggagaggaggctcacagacttgaggatggctgttgacgagaagcaggaagaagctatatctggtgctttgcaacaattgaaccagaagaaaacccatcttgaggacaatatgagactggcaaatgaactaaaagttgaggaagaagagctatacttttttacttcttcattgcttagcatgctagcagaatacaatattcgcccacctcaaataaatgcttccatcattacaactgttacaaagcgtttgtaccaacagatgcatttgaagctcagatctttaaatgacaatttaggtgatatgactcaacctggaaatatatataatcccaatcttcagcaagtaaccctatcaagaaatgaaccttccccatcttataatttggattcaaataggaacactcttcaacagtatgctcaaggtccaagtgaccgacatatggatcaaatgtaccatggatccaattttcagcaggatactggcggtactactccctctaattattttgagggagacagaagagtagatggtgactcacagttataccaacctgatggtgacgctttacctggtattgaggggtttcaaattgctggtgaacctagaccaggatttcaattaacagcatgcggttttcctactaatggtactaccctttgcaatttccagtgggttcgccatcttgaaaatggtaccagacagtctatcgaaggtgccacgatgtatgactatgtggtcactgcagatgatgttggtacttttcttgctgtagactgtacacctatggatgataatggccgccagggtgatttggtgacagaatttgctaacaatgggaataagataacctgtgatccagagatgcagagtcatattgatgcatatatttctaatgggagagctgaatttgaagtttttgtcctggcttattctcctgaggagtgggaattggctacattggtgctaacacgacctaactatcagattaagttcaaaaagaccggtgaagctataattgatgagaagtactcacaaagtctacagatgaaaattccaaatgggcgcacaactcaatttgttttagtaactgcgggtgcaactctcccatttaacacacagggaatatcagagccaaacaatgaggattacgatgttaggttacgcgatctaatcgtattagtcatgagaactttccagaaaaaggctttagatgccaaaaggaaagtcaacacttagaatccatgttgatctgttacaaaagattctatgtaaaaccgtagaaaattttcctatttttgattgttttgtgcagtattcgatgatttttgttcttgagatggaatgagctctcgatcaaagttttgctaggtgctagacggaatctaggcgatgacccttagcctagggactagtccaagcctaggcgatgctagacgttttgccaacttatataatatatacatttatagataaaaaagagggaaggaccagtagacataccttttgtccttgcagatctgctaatcactgaattctcaagcactgctgcaatagaagtggacaacacttttagatgtaattgagcatcaatacaagtgataaaaaaataggaaatagcaagttaggtacttatctgatgtctgacccttctcccatccattaagtactgatcagcagcataggatggtctttagaaatcacaaacatgaagggatagtaggcaacaacacatataaaatgcagcaacacgaaataaaat

SEQ ID NO: 80606 - DNA, 2564 bp, Zea Mays
ctctggattcctcctcccgtcctccggtcctcccgtttccccccttccccttccgcttcgccattccttctcggtcagaacgacgcgcatccccgcccgcacgttcccgtgctctcgcttctccggaggcgaccagggttgggacttgggaggctagcgagaaggtgctacccgggccaactcctccgatcgcccgcaggagaaggggatctctccgcctccccgccctcgtcgggcctttcccatcgccacccgcgaggccacgcgctccagctcttgtgaaccggaagggttctggatttctgagccaagcgaccagcacggtggctcggccgggctgacactcccctcccctgtcgcccggtctcttccttcccgagcagaactcccctgcgtcttgccgcttctagcatcggggagaaaaattatagaggaaggatatgcgggatccatttgatgcaccggttgatctcattaacccggaccataatggtgggaacaaactttctaggactggtgcagtgtctgctggggactatggtttacaaaatggacccaaatcctttgccccaaactccgacaccctagtcaggcatcaagtccaggttgcatccttgcacaaagacttagttttggaagatcccaatactcgtatcatggatcctgagaccaaggaactttactttagatcacaatcacaaggggacgagatcttgttgcttcgcaagaaaattgctgaggcatctctcaagttatttcattgcggcaggagctgagattactgggtgaaaaacatattctggagaggaggctcacagacttgaggatggctgttgacgagaagcaggaagaagctatatctggtgctttgcaacaattgaaccagaagaaaacccatcttgaggacaatatgagactggcaaatgaactaaaagttgaggaagaagagctatacttttttacttcttcattgcttagcatgctagcagaatacaatattcgcccacctcaaataaatgcttccatcattacaactgttacaaagcgtttgtaccaacagatgcatttgaagctcagatctttaaatgacaatttaggtgatatgactcaacctggaaatatatataatcccaatcttcagcaagtaaccctatcaagaaatgaaccttccccatcttataatttggattcaaataggaacactcttcaacagtatgctcaaggtccaagtgaccgacatatggatcaaatgtaccatggatccaattttcagcaggatactggcggtactactccctctaattattttgagggagacagaagagtagatggtgactcacagttataccaacctgatggtgacgctttacctggtattgaggggtttcaaattgctggtgaacctagaccaggatttcaattaacagcatgcggttttcctactaatggtactaccctttgcaatttccagtgggttcgccatcttgaaaatggtaccagacagtctatcgaaggtgccacgatgtatgactatgtggtcactgcagatgatgttggtacttttcttgctgtagactgtacacctatggatgataatggccgccagggtgatttggtgacagaatttgctaacaatgggaataagataacctgtgatccagagatgcagagtcatattgatgcatatatttctaatgggagagctgaatttgaagtttttgtcctgcaggcttattctcctgaggagtgggaattggctacattggtgctaacacgacctaactatcagattaagttcaaaaagaccggtgaagctataattgatgagaagtactcacaaagtctacagatgaaaattccaaatgggcgcacaactcaatttgttttagtaactgcgggtgcaactctcccatttaacacacagggaatatcagagccaaacaatgaggattacgatgttaggttacgcgatctaatcgtattagtcatgagaactttccagaaaaaggctttagatgccaaaaggaaagtcaacacttagaatccatgttgatctgttacaaaagattctatgtaaaaccgtagaaaattttcctatttttgattgttttgtgcagtattcgatgatttttgttcttgagatggaatgagctctcgatcaaagttttgctaggtgctagacggaatctaggcgatgacccttagcctagggactagtccaagcctaggcgatgctagacgttttgccaacttatataatatatacatttatagataaaaaagagggaaggaccagtagacataccttttgtccttgcagatctgctaatcactgaattctcaagcactgctgcaatagaagtggacaacacttttagatgtaattgagcatcaatacaagtgataaaaaaataggaaatagcaagttaggtacttatctgatgtctgacccttctcccatccattaagtactgatcagcagcataggatggtctttagaaatcacaaacatgaagggatagtaggcaacaacacatataaaatgcagcaacacgaaataaaat

SEQ ID NO: 80607 - DNA, 2615 bp, Zea Mays
ccggtcctcccgtttccccccttccccttccgcttcgccattccttctcggtcagaacgacgcgcatccccgcccgcacgttcccgtgctctcgcttctccggaggcgaccagggttgggacttgggaggctagcgagaaggtgctacccgggccaactcctccgatcgcccgcaggagaaggggatctctccgcctccccgccctcgtcgggcctttcccatcgccacccgcgaggccacgcgctccagctcttgtgaaccggaagggttctggatttctgagccaagcgaccagcacggtggctcggccgggctgacactcccctcccctgtcgcccggtctcttccttcccgagcagaactcccctgcgtcttgccgcttctagcatcggggagaaaaattatagaggaaggatatgcgggatccatttgatgcaccggttgatctcattaacccggaccataatggtgggaacaaactttctaggactggtgcagtgtctgctggggactatggtttacaaaatggacccaaatcctttgccccaaactccgacaccctagtcaggcatcaagtccaggttgcatccttgcacaaagacttagttttggaagatcccaatactcgtatcatggatcctgagaccaaggaactttactttagatcacaatcacaaggggacgagatcttgttgcttcgcaagaaaattgctgaggcatctctcaaggagctgagattactgggtgaaaaacatattctggagaggaggctcacagacttgaggatggctgttgacgagaagcaggaagaagctatatctggtgctttgcaacaattgaaccagaagaaaacccatcttgaggacaatatgagactggcaaatgaactaaaagttgaggaagaagagctatacttttttacttcttcattgcttagcatgctagcagaatacaatattcgcccacctcaaataaatgcttccatcattacaactgttacaaagcgtttgtaccaacagatgcatttgaagctcagatctttaaatgattcaaataggaacactcttcaacagtatgctcaaggtccaagtgaccgacatatggatcaaatgtaccatggatccaattttcagcaggatactggcggtactactccctctaattattttgagggagacagaagagtagatggtgactcacagttataccaacctgatggtgacgctttacctggtattgaggggtttcaaattgctggtgaacctagaccaggatttcaattaacagcatgcggttttcctactaatggtactaccctttgcaatttccaggtatattgttttctgaacttttgttgctattctttataattgctataggtgttaaatcttgtaaataaaacctttcatcccattgatgttgctgttctagtgggttcgccatcttgaaaatggtaccagacagtctatcgaaggtaaagtggggaatttatcctagatcctatggcatattattgttcacagataatttaattttgttgactagttctttgtattttgaaatttaggtgccacgatgtatgactatgtggtcactgcagatgatgttggtacttttcttgctgtagactgtacacctatggatgataatggccgccagggtgatttggtgacagaatttgctaacaatgggaataagataacctgtgatccagagatgcagagtcatattgatgcatatatttctaatgggagagctgaatttgaagtttttgtcctggcttattctcctgaggagtgggaattggctacattggtgctaacacgacctaactatcagattaagttcaaaaagaccggtgaagctataattgatgagaagtactcacaaagtctacagatgaaaattccaaatgggcgcacaactcaatttgttttagtaactgcgggtgcaactctcccatttaacacacagggaatatcagagccaaacaatgaggattacgatgttaggttacgcgatctaatcgtattagtcatgagaactttccagaaaaaggctttagatgccaaaaggaaagtcaacacttagaatccatgttgatctgttacaaaagattctatgtaaaaccgtagaaaattttcctatttttgattgttttgtgcagtattcgatgatttttgttcttgagatggaatgagctctcgatcaaagttttgctaggtgctagacggaatctaggcgatgacccttagcctagggactagtccaagcctaggcgatgctagacgttttgccaacttatataatatatacatttatagataaaaaagagggaaggaccagtagacataccttttgtccttgcagatctgctaatcactgaattctcaagcactgctgcaatagaagtggacaacacttttagatgtaattgagcatcaatacaagtgataaaaaaataggaaatagcaagttaggtacttatctgatgtctgacccttctcccatccattaagtactgatcagcagcataggatggtctttagaaatcacaaacatgaagggatagtaggcaacaacacatataaaatgcagcaacacgaaataaaat

SEQ ID NO: 80608 - DNA, 2114 bp, Zea Mays
gtcctcccgtttccccccttccccttccgcttcgccattccttctcggtcagaacgacgcgcatccccgcccgcacgttcccgtgctctcgcttctccggaggcgaccagggttgggacttgggaggctagcgagaaggtgctacccgggccaactcctccgatcgcccgcaggagaaggggatctctccgcctccccgccctcgtcgggcctttcccatcgccacccgcgaggccacgcgctccagctcttgtgaaccggaagggttctggatttctgagccaagcgaccagcacggtggctcggccgggctgacactcccctcccctgtcgcccggtctcttccttcccgagcagaactcccctgcgtcttgccgcttctagcatcggggagaaaaattatagaggaaggatatgcgggatccatttgatgcaccggttgatctcattaacccggaccataatggtgggaacaaactttctaggactggtgcagtgtctgctggggactatggtttacaaaatggacccaaatcctttgccccaaactccgacaccctagtcaggcatcaagtccaggttgcatccttgcacaaagacttagttttggaagatcccaatactcgtatcatggatcctgagaccaaggaactttactttagatcacaatcacaaggggacgagatcttgttgcttcgcaagaaaattgctgaggcatctctcaaggagctgagattactgggtgaaaaacatattctggagaggaggctcacagacttgaggatggctgttgacgagaagcaggaagaagctatatctggtgctttgcaacaattgaaccagaagaaaacccatcttgaggacaatatgagactggcaaatgaactaaaagttgaggaagaagagctatacttttttacttcttcattgcttagcatgctagcagaatacaatattcgcccacctcaaataaatgcttccatcattacaactgttacaaagcgtttgtaccaacagatgcatttgaagctcagatctttaaatgtgatatgactcaacctggaaatatatataatcccaatcttcagcaagtaaccctatcaagaaatgaaccttccccatcttataatttggattcaaataggaacactcttcaacagtatgctcaaggtccaagtgaccgacatatggatcaaatgtaccatggatccaattttcagcagtaattcaagatttgccattatggcattatctaattattgtttgtagtcatccagtctaatctctgatctatacaaaaatatctttgacatatgtttcttgtctgctttattctttcagggatactggcggtactactccctctaattattttgagggagacagaagagtagatggtgactcacagttataccaacctgatggtgacgctttacctggtattgaggggtttcaaattgctggtgaacctagaccaggatttcaattaacagcatgcggttttcctactaatggtactaccctttgcaatttccagtgggttcgccatcttgaaaatggtaccagacagtctatcgaaggtgccacgatgtatgactatgtggtcactgcagatgatgttggtacttttcttgctgtagactgtacacctatggatgataatggccgccagggtgatttggtgacagaatttgctaacaatgggaataagataacctgtgatccagagatgcagagtcatattgatgcatatatttctaatgggagagctgaatttgaagtttttgtcctggcttattctcctgaggagtgggaattggctacattggtgctaacacgacctaactatcagattaagttcaaaaagaccggtgaagctataattgatgagaagtactcacaaagtctacagatgaaaattccaaatgggcgcacaactcaatttgttttagtaactgcgggtgcaactctcccatttaacacacagggaatatcagagccaaacaatgaggattacgatgttaggttacgcgatctaatcgtattagtcatgagaactttccagaaaaagctcaaggaatgtagctcaaagaacctgttgttgtgcagatctc

SEQ ID NO: 80609 - DNA, 1998 bp, Zea Mays
gtcctcccgtttccccccttccccttccgcttcgccattccttctcggtcagaacgacgcgcatccccgcccgcacgttcccgtgctctcgcttctccggaggcgaccagggttgggacttgggaggctagcgagaaggtgctacccgggccaactcctccgatcgcccgcaggagaaggggatctctccgcctccccgccctcgtcgggcctttcccatcgccacccgcgaggccacgcgctccagctcttgtgaaccggaagggttctggatttctgagccaagcgaccagcacggtggctcggccgggctgacactcccctcccctgtcgcccggtctcttccttcccgagcagaactcccctgcgtcttgccgcttctagcatcggggagaaaaattatagaggaaggatatgcgggatccatttgatgcaccggttgatctcattaacccggaccataatggtgggaacaaactttctaggactggtgcagtgtctgctggggactatggtttacaaaatggacccaaatcctttgccccaaactccgacaccctagtcaggcatcaagtccaggttgcatccttgcacaaagacttagttttggaagatcccaatactcgtatcatggatcctgagaccaaggaactttactttagatcacaatcacaaggggacgagatcttgttgcttcgcaagaaaattgctgaggcatctctcaaggagctgagattactgggtgaaaaacatattctggagaggaggctcacagacttgaggatggctgttgacgagaagcaggaagaagctatatctggtgctttgcaacaattgaaccagaagaaaacccatcttgaggacaatatgagactggcaaatgaactaaaagttgaggaagaagagctatacttttttacttcttcattgcttagcatgctagcagaatacaatattcgcccacctcaaataaatgcttccatcattacaactgttacaaagcgtttgtaccaacagatgcatttgaagctcagatctttaaatgtgatatgactcaacctggaaatatatataatcccaatcttcagcaagtaaccctatcaagaaatgaaccttccccatcttataatttggattcaaataggaacactcttcaacagtatgctcaaggtccaagtgaccgacatatggatcaaatgtaccatggatccaattttcagcaggatactggcggtactactccctctaattattttgagggagacagaagagtagatggtgactcacagttataccaacctgatggtgacgctttacctggtattgaggggtttcaaattgctggtgaacctagaccaggatttcaattaacagcatgcggttttcctactaatggtactaccctttgcaatttccagtgggttcgccatcttgaaaatggtaccagacagtctatcgaaggtgccacgatgtatgactatgtggtcactgcagatgatgttggtacttttcttgctgtagactgtacacctatggatgataatggccgccagggtgatttggtgacagaatttgctaacaatgggaataagataacctgtgatccagagatgcagagtcatattgatgcatatatttctaatgggagagctgaatttgaagtttttgtcctgcaggcttattctcctgaggagtgggaattggctacattggtgctaacacgacctaactatcagattaagttcaaaaagaccggtgaagctataattgatgagaagtactcacaaagtctacagatgaaaattccaaatgggcgcacaactcaatttgttttagtaactgcgggtgcaactctcccatttaacacacagggaatatcagagccaaacaatgaggattacgatgttaggttacgcgatctaatcgtattagtcatgagaactttccagaaaaagctcaaggaatgtagctcaaagaacctgttgttgtgcagatctc

SEQ ID NO: 80610 - DNA, 2556 bp, Zea Mays
cccgtttccccccttccccttccgcttcgccattccttctcggtcagaacgacgcgcatccccgcccgcacgttcccgtgctctcgcttctccggaggcgaccagggttgggacttgggaggctagcgagaaggtgctacccgggccaactcctccgatcgcccgcaggagaaggggatctctccgcctccccgccctcgtcgggcctttcccatcgccacccgcgaggccacgcgctccagctcttgtgaaccggaagggttctggatttctgagccaagcgaccagcacggtggctcggccgggctgacactcccctcccctgtcgcccggtctcttccttcccgagcagaactcccctgcgtcttgccgcttctagcatcggggaggactggtgcagtgtctgctggggactatggtttacaaaatggacccaaatcctttgccccaaactccgacaccctagtcaggcatcaagtccaggttgcatccttgcacaaagacttagttttggaagatcccaatactcgtatcatggatcctgagaccaaggaactttactttagatcacaatcacaaggggacgagatcttgttgcttcgcaagaaaattgctgaggcatctctcaagttatttcattgcggcaggagctgagattactgggtgaaaaacatattctggagaggaggctcacagacttgaggatggctgttgacgagaagcaggaagaagctatatctggtgctttgcaacaattgaaccagaagaaaacccatcttgaggacaatatgagactggcaaatgaactaaaagttgaggaagaagagctatacttttttacttcttcattgcttagcatgctagcagaatacaatattcgcccacctcaaataaatgcttccatcattacaactgttacaaagcgtttgtaccaacagatgcatttgaagctcagatctttaaatgacaatttaggtgatatgactcaacctggaaatatatataatcccaatcttcagcaagtaaccctatcaagaaatgaaccttccccatcttataatttggattcaaataggaacactcttcaacagtatgctcaaggtccaagtgaccgacatatggatcaaatgtaccatggatccaattttcagcaggatactggcggtactactccctctaattattttgagggagacagaagagtagatggtgactcacagttataccaacctgatggtgacgctttacctggtattgaggggtttcaaattgctggtgaacctagaccaggatttcaattaacagcatgcggttttcctactaatggtactaccctttgcaatttccagtgggttcgccatcttgaaaatggtaccagacagtctatcgaaggtgccacgatgtatgactatgtggtcactgcagatgatgttggtacttttcttgctgtagactgtacacctatggatgataatggccgccagggtgatttggtgacagaatttgctaacaatgggaataagataacctgtgatccagagatgcagagtcatattgatgcatatatttctaatgggagagctgaatttgaagtttttgtcctggcttattctcctgaggagtgggaattggctacattggtgctaacacgacctaactatcagattaagttcaaaaagaccggtgaagctataattgatgagaagtactcacaaagtctacagatgaaaattccaaatgggcgcacaactcaatttgttttagtaactgcgggtgcaactctcccatttaacacacagggaatatcagagccaaacaatgaggattacgatgttaggtatcaactgtgacagcttacttcattatcagccttctttgtggatattttttttgcatttttgcaaataaagtaaaaaaataaaatctagatatatctgattatctgactttttaggttacgcgatctaatcgtattagtcatgagaactttccagaaaaaggctttagatgccaaaaggaaagtcaacacttagaatccatgttgatctgttacaaaagattctatgtaaaaccgtagaaaattttcctatttttgattgttttgtgcagtattcgatgatttttgttcttgagatggaatgagctctcgatcaaagttttgctaggtgctagacggaatctaggcgatgacccttagcctagggactagtccaagcctaggcgatgctagacgttttgccaacttatataatatatacatttatagataaaaaagagggaaggaccagtagacataccttttgtccttgcagatctgctaatcactgaattctcaagcactgctgcaatagaagtggacaacacttttagatgtaattgagcatcaatacaagtgataaaaaaataggaaatagcaagttaggtacttatctgatgtctgacccttctcccatccattaagtactgatcagcagcataggatggtctttagaaatcacaaacatgaagggatagtaggcaacaacacatataaaatgcagcaacacgaaataaaat

SEQ ID NO: 80611 - DNA, 2341 bp, Zea Mays
cccgtttccccccttccccttccgcttcgccattccttctcggtcagaacgacgcgcatccccgcccgcacgttcccgtgctctcgcttctccggaggcgaccagggttgggacttgggaggctagcgagaaggtgctacccgggccaactcctccgatcgcccgcaggagaaggggatctctccgcctccccgccctcgtcgggcctttcccatcgccacccgcgaggccacgcgctccagctcttgtgaaccggaagggttctggatttctgagccaagcgaccagcacggtggctcggccgggctgacactcccctcccctgtcgcccggtctcttccttcccgagcagaactcccctgcgtcttgccgcttctagcatcggggaggcatcaagtccaggttgcatccttgcacaaagacttagttttggaagatcccaatactcgtatcatggatcctgagaccaaggaactttactttagatcacaatcacaaggggacgagatcttgttgcttcgcaagaaaattgctgaggcatctctcaaggagctgagattactgggtgaaaaacatattctggagaggaggctcacagacttgaggatggctgttgacgagaagcaggaagaagctatatctggtgctttgcaacaattgaaccagaagaaaacccatcttgaggacaatatgagactggcaaatgaactaaaagttgaggaagaagagctatacttttttacttcttcattgcttagcatgctagcagaatacaatattcgcccacctcaaataaatgcttccatcattacaactgttacaaagcgtttgtaccaacagatgcatttgaagctcagatctttaaatgacaatttaggtgatatgactcaacctggaaatatatataatcccaatcttcagcaagtaaccctatcaagaaatgaaccttccccatcttataatttggattcaaataggaacactcttcaacagtatgctcaaggtccaagtgaccgacatatggatcaaatgtaccatggatccaattttcagcaggatactggcggtactactccctctaattattttgagggagacagaagagtagatggtgactcacagttataccaacctgatggtgacgctttacctggtattgaggggtttcaaattgctggtgaacctagaccaggatttcaattaacagcatgcggttttcctactaatggtactaccctttgcaatttccagtgggttcgccatcttgaaaatggtaccagacagtctatcgaaggtgccacgatgtatgactatgtggtcactgcagatgatgttggtacttttcttgctgtagactgtacacctatggatgataatggccgccagggtgatttggtgacagaatttgctaacaatgggaataagataacctgtgatccagagatgcagagtcatattgatgcatatatttctaatgggagagctgaatttgaagtttttgtcctggcttattctcctgaggagtgggaattggctacattggtgctaacacgacctaactatcagattaagttcaaaaagaccggtgaagctataattgatgagaagtactcacaaagtctacagatgaaaattccaaatgggcgcacaactcaatttgttttagtaactgcgggtgcaactctcccatttaacacacagggaatatcagagccaaacaatgaggattacgatgttaggttacgcgatctaatcgtattagtcatgagaactttccagaaaaaggctttagatgccaaaaggaaagtcaacacttagaatccatgttgatctgttacaaaagattctatgtaaaaccgtagaaaattttcctatttttgattgttttgtgcagtattcgatgatttttgttcttgagatggaatgagctctcgatcaaagttttgctaggtgctagacggaatctaggcgatgacccttagcctagggactagtccaagcctaggcgatgctagacgttttgccaacttatataatatatacatttatagataaaaaagagggaaggaccagtagacataccttttgtccttgcagatctgctaatcactgaattctcaagcactgctgcaatagaagtggacaacacttttagatgtaattgagcatcaatacaagtgataaaaaaataggaaatagcaagttaggtacttatctgatgtctgacccttctcccatccattaagtactgatcagcagcataggatggtctttagaaatcacaaacatgaagggatagtaggcaacaacacatataaaatgcagcaacacgaaataaaat

SEQ ID NO: 80612 - DNA, 2343 bp, Zea Mays
cgcttcgccattccttctcggtcagaacgacgcgcatccccgcccgcacgttcccgtgctctcgcttctccggaggcgaccagggttgggacttgggaggctagcgagaaggtgctacccgggccaactcctccgatcgcccgcaggagaaggggatctctccgcctccccgccctcgtcgggcctttcccatcgccacccgcgaggccacgcgctccagctcttgtgaaccggaagggttctggatttctgagccaagcgaccagcacggtggctcggccgggctgacactcccctcccctgtcgcccggtctcttccttcccgagcagaactcccctgcgtcttgccgcttctagcatcggggagaaaaattatagaggaaggatatgcgggatccatttgatgcaccggttgatctcattaacccggaccataatggtgggaacaaactttctaggactggtgcagtgtctgctggggactatggtttacaaaatggacccaaatcctttgccccaaactccgacaccctagtcaggcatcaagtccaggttgcatccttgcacaaagacttagttttggaagatcccaatactcgtatcatggatcctgagaccaaggaactttactttagatcacaatcacaaggggacgagatcttgttgcttcgcaagaaaattgctgaggcatctctcaaggagctgagattactgggtgaaaaacatattctggagaggaggctcacagacttgaggatggctgttgacgagaagcaggaagaagctatatctggtgctttgcaacaattgaaccagaagaaaacccatcttgaggacaatatgagactggcaaatgaactaaaagttgaggaagaagagctatacttttttacttcttcattgcttagcatgctagcagaatacaatattcgcccacctcaaataaatgcttccatcattacaactgttacaaagcgtttgtaccaacagatgcatttgaagctcagatctttaaatgattcaaataggaacactcttcaacagtatgctcaagggatactggcggtactactccctctaattattttgagggagacagaagagtagatggtgactcacagttataccaacctgatggtgacgctttacctggtattgaggggtttcaaattgctggtgaacctagaccaggatttcaattaacagcatgcggttttcctactaatggtactaccctttgcaatttccagtgggttcgccatcttgaaaatggtaccagacagtctatcgaaggtgccacgatgtatgactatgtggtcactgcagatgatgttggtacttttcttgctgtagactgtacacctatggatgataatggccgccagggtgatttggtgacagaatttgctaacaatgggaataagataacctgtgatccagagatgcagagtcatattgatgcatatatttctaatgggagagctgaatttgaagtttttgtcctgcaggcttattctcctgaggagtgggaattggctacattggtgctaacacgacctaactatcagattaagttcaaaaagaccggtgaagctataattgatgagaagtactcacaaagtctacagatgaaaattccaaatgggcgcacaactcaatttgttttagtaactgcgggtgcaactctcccatttaacacacagggaatatcagagccaaacaatgaggattacgatgttaggttacgcgatctaatcgtattagtcatgagaactttccagaaaaaggctttagatgccaaaaggaaagtcaacacttagaatccatgttgatctgttacaaaagattctatgtaaaaccgtagaaaattttcctatttttgattgttttgtgcagtattcgatgatttttgttcttgagatggaatgagctctcgatcaaagttttgctaggtgctagacggaatctaggcgatgacccttagcctagggactagtccaagcctaggcgatgctagacgttttgccaacttatataatatatacatttatagataaaaaagagggaaggaccagtagacataccttttgtccttgcagatctgctaatcactgaattctcaagcactgctgcaatagaagtggacaacacttttagatgtaattgagcatcaatacaagtgataaaaaaataggaaatagcaagttaggtacttatctgatgtctgacccttctcccatccattaagtactgatcagcagcataggatggtctttagaaatcacaaacatgaagggatagtaggcaacaacacatataaaatgcagcaacacgaaataaaat

SEQ ID NO: 80613 - DNA, 204 bp, Zea Mays
aattaaattagaagacaatcatatcgagagcacactgccactgcaagtaggaaagctagcgcatcacaatggcggccagaaccagcgtggttgtgctttgcttcgttgtcgcctccgcccttctcgtggcctcgtcatttgctgcccgtactccaacctttgttctcgccatcaattacaccatcaccatgcatgcatgctgcg

SEQ ID NO: 80614 - DNA, 8953 bp, Zea Mays
gttcttactcgttcttatctgtttgattataaaatataaacagaacatcttatatagagggggaaaagtaacgcgaagaaaaacttcattcgtgctgaagccaaacacggaagccggccggtcctatgttgtcttgaacgatccctccccctataaattaaagcttcgaagacagaggataatagaagtgagatcgtaagcacaagcaacagcttgaaaacgggcagaaaatagaacattctttgaaaaggagccaacgaaccgatcgatcgatcaagcaccaagagaactcgcgcaacacaaaatctctgcaaggattttccggccgctgcgccggcgagcaccatcctctggcaaccggcggggcagcagcagcatcaataaggggatccttgtctcgcttcgtgatcgtccgccgcgctggggtcgactcactcgcgccactcttcccgttccctaccgtggtggcggaaccctaatgcgggcccgagtctagcctccatggactttgccagccgccacgccgcagcggaggctgccacatcgtctgctgcatccgcctccgcccccgcggcggtcgctgaggagcctgagtacctcgcccggtacatcgtcgtcaagcactcgtggaggggaaggtatcgccgggtcctttgcatcgcctcttcctgcgtcgtcacgctcgaccccaccactctcaacctcaccaactcctacgatgtcggctccaagttcgaccatgctgaggctctcactgccaccgacgagttcacgctcgcagtccgcaccgatgcccgcggcaagttcaagcctatgcgcttctcatccccgctccgcccggggatcctcaccgaactccaccgcctccgcccggtccaggactccttcgacttccccgtcctccatctccgccgacgcacccacgagtgggcccccttcaaacttaaggttactcctgtgggtgttgagctccttgaggcttctggttatatgcgctggtgcttggaattcagagatatgaattctccagcaattattctcttggggaatagctatgggagcaagactactgaaggtggagggtttgtgctatgcccgctttatggtcggaagtcaaaagcttttatggctgcttcaggaactacaaacactgcaattatatcgcatctgacgaaaactgccaaattaaagattggattatcactatctgtggataattcacaatcaatgaaagcggacgagttcatagcaaaaagagctatggaggcagttggagctgctgaaacacgacatggagagtggtcagtaacaagattacgttctgctgcacatggcactgcttatattgagagcttaagtttgggtgttggaccaaggggtgggcttggagaacagggcgattctgtctcttgtctgcttgttcttacaagcacttcacttgttgaaagacgtccagagaactatgaggctgtcatagtacgaccactctcagcagtaagtgctcttgttcgatttgtagaagaaccacagatatttgcatttgaattcaatgatggctgcccaattcatgtatatgcaagcacttcccgtgataatctacttgcaacagttcttgatgttttagaaacccagagacagtgtgcaattccagtgctaccaaggttaacaatgtctggtcatcgcatagatccgccttgtggggtagcacatcttgagatgccctatcatggttctgttgacatggagtcagcttccatgcacacaaaacatttggccgcaattgctaaagaggctgtagtgtcatctgacactgttcctggagcaaaaatcagattgtggcgtagaataagggagtttaatgcatgtgtaccatacactggagtgcccgtcaatattgaagtacctgaagtggtcgtactggccttgatcagtcttcttccaaccataccacatagccttcctgctgatgctcctcctcttctgcctccatctccaaaagcagcagcaacaataatgggttttgttgcatgcttacgcaggctacttacatcaagaagtgtggcatcacatgtgatgtcgtttcctgtcgctgttgggagaataatgggtttgcttaggaatggttcggaaggagtagcagctgaagctgctggacttgtggctatgctaattggtggtggtcccggtgattcatccatcttaatggatgcaaggggagaatcccatgccacctacatgcatgcaaagtctgtactgttctcgcaaccaatgtatgttccgatccttgttaacaggttgaggccaatatcggtgtcaccgttgttatctttgtctgttgtggaagtccttgaagctatgctttgtgaaccccatggtgaaacaacccaacatgctacatttgttgagctactgcgtcaagttgctggtttgcgccgtcgtttgtttgcattatttgcacatccagctgaaagtgtgcgagagactatttctgttataatgcggacaattgctgaggaagatgcaatagcagcagagttcatgcgtgatgctgccttgaaggatggtgctcttctgaggcatttactaaatgctttcttcttgcctgctggagaacagcgtgatgttagtcggcaacttgttgctctttgggctgattcctatcaacctgcacttgatttgctatcaagaatacttcctcctggacttgttgcttacctccatacacgttcagatgaagaatcacagagccagtatgatgaagcaccgttgagcagaaggcagagacgaatacttcagcagaggagggtccgtggtagtaaaagtatgtcagtacaagaacaaggggtaccccccaatggtgttgaggatggggaacccttcaggcacaccagtgcgggcacttatggagtagcagatgttcatcagaggcatgttggcccatactcttccacccactctcctttgccaggtataagcattgatccttcttgtgcagttacagtgccacatggttttgtacctgaggccctttctgaaaataatcatcaaattggggaaccacagctggattcacatgtttattcagtggactccaatgccaatggtgatcttgtgagctcatcgcattcagatttttcagtccctgcacaggttgtggtggaaaacactcctgtgggatctggcaggctcctgtgcaattggtatggattttggagggcattcagtctagatcacaacagagcagatttgatatggaatgaacgcaccagacaggaactgagggaagcattgcaagctgaagttcataacctggatgtcgagaaagcaagaacaaatgatattgtccctggaagttcagtcactgaggacgctggtggtagtgacaacttacctcgaatgtcatggaattatgctgaatttttagtgagctacccaagcttgtccaaagaagtctgtgtggggcaatactatttgcgactgctgcttgaaattggaagcaactatcgagcacacaattttccactacgagatccggttgccttttttagggctctgtaccatcaatttttgtgtgatgcagatattggtcttactgtggatggtgcagtacctgacgagttgggatcatctgatgattggtgtgacattgggagattagatggctttggtggtggtggagggtcttctgtaagagaactctgttcaagggcaatgactatagtttatgagcaacattataaagttattggggcttttgatggcactccacatattactgtcctcttagaccgaaccgatgatagggttttgaggcatcgtttgttactacttttaaaggtcttgatgaatgacctttcaaatgttgaagcatgtgttttggttggaggctgtgttttggctgttgatttgcttactgttgcacatgaaacatctgagcggactgctattcctttgcaatctaacctcatcgcggcaactgcatttatggaaccttcaaaagaatggatgtacattgataaagatggcacacaagttgggccacttgaaaaagatgcaataagaaggctgtggtcaaagaagtcaattgattggacaacaaaatgttgggcttctggcatgtcagactggaaagggctacgggatatacgggaactgcgatgggcactttctgtaagagtgcctgttttgactcccactcagattggggatgctgcattatctatattacacagtatgacatctgcacggtccgatcttgatgatgcaggtgaaatagtaactccaactcctagggtgaaacgtatattgtcaagtccaagatgccttcctcatgtggcccaggttatgcttactggggaaccaagcattgttgaagcagctgcctcattgcttatggctattgttacaagaaaccctaaagctatgattcgattatacattactggtgccttttactttgcattggcatatcctggttcaaatctcctatcaattgcacatttgttttcggccacacatactcatcaagcttttcatggtggtgaagaggcagcactatcttcatctttgcctttggcaaagcgtagtgtactgggtggactcctcccagaatctttgctgtatgtcttggagcgcagtggcccttctgcttttgccggtgcaatggtgtctgattctgacacaccagaaattatatggacccacaagatgcgagcagaaaaccttatttgtcaggttctgcagcatctcggtgaatttcctcagaaattggcacagcattgccattcattgtatgattatgctcctatgccacctgtgacttacccgaatctgaaagatgagatgtggtgccatcgttactacctccgcaacctatgtgatgagattaggtttcctaactggcccattgtagaacatgtggagtttttgcagtcattgttggtgatgtggcgtgaagagttaactcgtcgtccaatggatttatctgaagaagaagtctgtaagatactcgagatttctcttgatgatcttgtgcttggtgagaacggtagcatcaagcagtcatctgacttaagtttggctaattccggaaacaaaattgaaaacattgatgaggagaagcttaagcgccaataccgaaagctagcaataaaatatcatccagacaagaaccctgaaggaagggagaaatttgttgctgtgcaaaaggcttatgagcgattgcaggctagtatgcagggattgcagggaccacaagtctggaggctgctactcttgctgaaggcacaacgcatcttgtacaagagatatggagatgtcttgggaccattcaaatatgctggttatcctatgttgctaaatgcagttactgtagataaagatgacagcaattttctttcatttgataggacccctcttctgatagctgcttcggagctaatttggttgacatgtgcatcatcttcattaaatggagaagaacttataagggatggtggtatccccttgttggcaacacttctttctcgctgtatgtgtgttgttcagccaactacaccagcaaatgaaccagctgcaagaatagtcaccaacataatgcataccttctctgttctcagtcagtttgaatcaggaagagttgagattcttaagtttggtggccttgccgatggcattgtgcattgcacagaacttgagtttgttccctcagctgtggatgctgcgctgctgacagctgcgaatgttttggtttcatctgagttgcaaaatgctctgctcagggctggatttttatggtatgtgctacccctgctgcttcaatacgattcgacagcagaagagaatgagacatgtgaagcacatggtgttggggcaagggtgcagattgccaaaaatctgcatgctgttcatgcaactcaagctttgtctaagctttgtggtctcagtggcgatgatatcctgtacccagataacaaacctgcatacaatgcactgaaggctcttcttactccaaagcttgctgacatgctgagaaaccacccacctaaagagttattatcaaatctaaattcaaatttggaatcaccagagatcatatggaattcatccaccagaggggagcttctcaaatttgttgaccagcagcgtgctagtcaaggccctgatggttcatatgatttgacagaatcacattctttcacctatgaagctttatctaaagaattgaacgttggtaatgtatacttgagagtttacaacaaccaaccggattttgaaataagtgaccaggaggaattttgcattgccctgcttaagtttatagtagagttagtactacagtggaattccattaatttggagacgattcatcaacatggttcagttactgaagcatctatgtctggaaatgatgaagtcagtgattcaactattgaaggaaaaatggataattcatcaggaaaacaaagtacagatggagattctgaagttattataaacctccaaagtggactaacatcacttcagaatcttcttacaagtaatccaggcttagctgctgtttttgcttccaaggagcgtctgattcctctttttgaatgccttgcactgcatgttccttctgaaagcaccagcccacaaatctgtttaagtgttctttctctgttgactaagcatgcttcttgtttggaggctatggttgcagaaaggatgagcctgattttgctatttcagatactccactgcaatcccccttgcagggacggagctcttgctgtactgtattctttagccagcacaccagagcttgcctgggcagctgccaagcatggtggtgttgtttacattcttgaacttatgttgccacttcaagaggaaatccctgtgcagcaaagagctgtagctgcatctttattgggcaaacttgttgggcaaccaatgcatggccccagggtagcaatcacccttgccaggttcctgcctgatggtttggtttctgccattaaagatggacctggtgaagcggttgtttcttctcttgagctgacaactgaaactcctgaactagtatggacacccgcaatggcagcttctctttctgcacagttggcaacaatggcatcagacctctatcaagagcagatgaaaggacgtgttgttgattgggatgtacctgaacaagcttccggacaacatgtaatgaaggatgaaccacaggttggtggaatttatgtaagactttttcttaaggatcccaagtttccactgagaaaccctaaaagattccttgaagggctcctagatcagtatgtctcctctgttgctgctacacatcatgaagcaattgctacagatccagagcttcctttgctactgtccgcggcattggtttccttactacgagttcatccagtgcttgctgaccatgttggctacctcggttatgttccaaagcttgttgcagctatggcttatgagggacaaagggaaactatggcatctgggcaggcttccagtggatcgcaggcagaacctggtgaacatgacaattcatctcactctgaggccactgtgcagactccacaagaacgtgtccgccttagttgtttgcgtgttctgcatcagcttgcgtctagcacaacctgtgcagaagctatggcatcaacaagtgcaggaactcctcaggtcataccactgcttatgaaagcaattggatggcaaggtggaagtatactggcattggagacattaaagcgtgtagtcggtgctggtaatcgggctcgtgatgctcttgttgcacaggggcttaaggttggtcttgttgaagtgctccttggtattcttgactggcgtgctggtggaagacagggactccgtaataaaatgaagtggaacgaatcagaggcttcaattgggcgtgttttggctgtggaggtgcttcatgcttttgcaaccgaaggtgcacactgtgctagagttcgtgaagtcctgaattcctctgatgtatggagtgcttacaaagaccagaagcacgaccttttccttccatccagtgcacaatcttctgctgctggagttgctgggctcattgagagctcgtcaagattcacttacgccctcgccgcaccgccatcttcttctctctctccaccatcagctccagcaaaccctagtggacggcaatattatcagcattcgtagtggaaaacgaaacacttaatctctgctccttggagtatgaccatgaaggcaccaccatggtaacgatttgtagagtgaggccaccttgagtgggcttgttactgtcaccaaatacagctcgtgtctccattcccaccaatgagcagctgatcagttgcccgcatttcagtacatagcatagcatagcataccattgtacagttttccattacataagggtcggggtcggttttgtgtgtgtgttttttttttgtaaagcatatgattttttttgggtaccatagatgtccatagaatacgcgagctgaatattgtatccattcattactgggttgatgcactcccttgttcggatcacacgacttacttgtgacgagagaaataaatgttttttttgcctttgtttgatgagcattttctggtgtcagttaaccttttacagtcatattgtcgtgtatgaccaccgagtgtgtgtaggttttatatagcctgtccgtcactacttttggttagagtttgctatttcatttgtaatgaagttgtttgctgacacctttgcgtgtaacaaaagaaaagcacacaaaaaataacatgctccctcagcctcggtgacacgatgcgtgacatacaaaaaaaacaaaatcctgctgcttcacatatagcctgtccgtcacaacttgtgggtagagtttgctatttcatctgtaatgaaagttttgcgtgtaacaaaagaaaagcacacaaaaaataacat

SEQ ID NO: 80615 - DNA, 8723 bp, Zea Mays
attaaagcttcgaagacagaggataatagaagtgagatcgtaagcacaagcaacagcttgaaaacgggcagaaaatagaacattctttgaaaaggagccaacgaaccgatcgatcgatcaagcaccaagagaactcgcgcaacacaaaatctctgcaaggattttccggccgctgcgccggcgagcaccatcctctggcaaccggcggggcagcagcagcatcaataaggggatccttgtctcgcttcgtgatcgtccgccgcgctggggtcgactcactcgcgccactcttcccgttccctaccgtggtggcggaaccctaatgcgggcccgagtctagcctccatggactttgccagccgccacgccgcagcggaggctgccacatcgtctgctgcatccgcctccgcccccgcggcggtcgctgaggagcctgagtacctcgcccggtacatcgtcgtcaagcactcgtggaggggaaggtatcgccgggtcctttgcatcgcctcttcctgcgtcgtcacgctcgaccccaccactctcaacctcaccaactcctacgatgtcggctccaagttcgaccatgctgaggctctcactgccaccgacgagttcacgctcgcagtccgcaccgatgcccgcggcaagttcaagcctatgcgcttctcatccccgctccgcccggggatcctcaccgaactccaccgcctccgcccggtccaggactccttcgacttccccgtcctccatctccgccgacgcacccacgagtgggcccccttcaaacttaaggttactcctgtgggtgttgagctccttgaggcttctggttatatgcgctggtgcttggaattcagagatatgaattctccagcaattattctcttggggaatagctatgggagcaagactactgaaggtggagggtttgtgctatgcccgctttatggtcggaagtcaaaagcttttatggctgcttcaggaactacaaacactgcaattatatcgcatctgacgaaaactgccaaattaaagattggattatcactatctgtggataattcacaatcaatgaaagcggacgagttcatagcaaaaagagctatggaggcagttggagctgctgaaacacgacatggagagtggtcagtaacaagattacgttctgctgcacatggcactgcttatattgagagcttaagtttgggtgttggaccaaggggtgggcttggagaacagggcgattctgtctcttgtctgcttgttcttacaagcacttcacttgttgaaagacgtccagagaactatgaggctgtcatagtacgaccactctcagcagtaagtgctcttgttcgatttgtagaagaaccacagatatttgcatttgaattcaatgatggctgcccaattcatgtatatgcaagcacttcccgtgataatctacttgcaacagttcttgatgttttagaaacccagagacagtgtgcaattccagtgctaccaaggttaacaatgtctggtcatcgcatagatccgccttgtggggtagcacatcttgagatgccctatcatggttctgttgacatggagtcagcttccatgcacacaaaacatttggccgcaattgctaaagaggctgtagtgtcatctgacactgttcctggagcaaaaatcagattgtggcgtagaataagggagtttaatgcatgtgtaccatacactggagtgcccgtcaatattgaagtacctgaagtggtcgtactggccttgatcagtcttcttccaaccataccacatagccttcctgctgatgctcctcctcttctgcctccatctccaaaagcagcagcaacaataatgggttttgttgcatgcttacgcaggctacttacatcaagaagtgtggcatcacatgtgatgtcgtttcctgtcgctgttgggagaataatgggtttgcttaggaatggttcggaaggagtagcagctgaagctgctggacttgtggctatgctaattggtggtggtcccggtgattcatccatcttaatggatgcaaggggagaatcccatgccacctacatgcatgcaaagtctgtactgttctcgcaaccaatgtatgttccgatccttgttaacaggttgaggccaatatcggtgtcaccgttgttatctttgtctgttgtggaagtccttgaagctatgctttgtgaaccccatggtgaaacaacccaacatgctacatttgttgagctactgcgtcaagttgctggtttgcgccgtcgtttgtttgcattatttgcacatccagctgaaagtgtgcgagagactatttctgttataatgcggacaattgctgaggaagatgcaatagcagcagagttcatgcgtgatgctgccttgaaggatggtgctcttctgaggcatttactaaatgctttcttcttgcctgctggagaacagcgtgatgttagtcggcaacttgttgctctttgggctgattcctatcaacctgcacttgatttgctatcaagaatacttcctcctggacttgttgcttacctccatacacgttcagatgaagaatcacagagccagtatgatgaagcaccgttgagcagaaggcagagacgaatacttcagcagaggagggtccgtggtagtaaaagtatgtcagtacaagaacaaggggtaccccccaatggtgttgaggatggggaacccttcaggcacaccagtgcgggcacttatggagtagcagatgttcatcagaggcatgttggcccatactcttccacccactctcctttgccaggtataagcattgatccttcttgtgcagttacagtgccacatggttttgtacctgaggccctttctgaaaataatcatcaaattggggaaccacagctggattcacatgtttattcagtggactccaatgccaatggtgatcttgtgagctcatcgcattcagatttttcagtccctgcacaggttgtggtggaaaacactcctgtgggatctggcaggctcctgtgcaattggtatggattttggagggcattcagtctagatcacaacagagcagatttgatatggaatgaacgcaccagacaggaactgagggaagcattgcaagctgaagttcataacctggatgtcgagaaagcaagaacaaatgatattgtccctggaagttcagtcactgaggacgctggtggtagtgacaacttacctcgaatgtcatggaattatgctgaatttttagtgagctacccaagcttgtccaaagaagtctgtgtggggcaatactatttgcgactgctgcttgaaattggaagcaactatcgagcacacaattttccactacgagatccggttgccttttttagggctctgtaccatcaatttttgtgtgatgcagatattggtcttactgtggatggtgcagtacctgacgagttgggatcatctgatgattggtgtgacattgggagattagatggctttggtggtggtggagggtcttctgtaagagaactctgttcaagggcaatgactatagtttatgagcaacattataaagttattggggcttttgatggcactccacatattactgtcctcttagaccgaaccgatgatagggttttgaggcatcgtttgttactacttttaaaggtcttgatgaatgacctttcaaatgttgaagcatgtgttttggttggaggctgtgttttggctgttgatttgcttactgttgcacatgaaacatctgagcggactgctattcctttgcaatctaacctcatcgcggcaactgcatttatggaaccttcaaaagaatggatgtacattgataaagatggcacacaagttgggccacttgaaaaagatgcaataagaaggctgtggtcaaagaagtcaattgattggacaacaaaatgttgggcttctggcatgtcagactggaaagggctacgggatatacgggaactgcgatgggcactttctgtaagagtgcctgttttgactcccactcagattggggatgctgcattatctatattacacagtatgacatctgcacggtccgatcttgatgatgcaggttatgcttactggggaaccaagcattgttgaagcagctgcctcattgcttatggctattgttacaagaaaccctaaagctatgattcgattatacattactggtgccttttactttgcattggcatatcctggttcaaatctcctatcaattgcacatttgttttcggccacacatactcatcaagcttttcatggtggtgaagaggcagcactatcttcatctttgcctttggcaaagcgtagtgtactgggtggactcctcccagaatctttgctgtatgtcttggagcgcagtggcccttctgcttttgccggtgcaatggtgtctgattctgacacaccagaaattatatggacccacaagatgcgagcagaaaaccttatttgtcaggttctgcagcatctcggtgaatttcctcagaaattggcacagcattgccattcattgtatgattatgctcctatgccacctgtgacttacccgaatctgaaagatgagatgtggtgccatcgttactacctccgcaacctatgtgatgagattaggtttcctaactggcccattgtagaacatgtggagtttttgcagtcattgttggtgatgtggcgtgaagagttaactcgtcgtccaatggatttatctgaagaagaagtctgtaagatactcgagatttctcttgatgatcttgtgcttggtgagaacggtagcatcaagcagtcatctgacttaagtttggctaattccggaaacaaaattgaaaacattgatgaggagaagcttaagcgccaataccgaaagctagcaataaaatatcatccagacaagaaccctgaaggaagggagaaatttgttgctgtgcaaaaggcttatgagcgattgcaggctagtatgcagggattgcagggaccacaagtctggaggctgctactcttgctgaaggcacaacgcatcttgtacaagagatatggagatgtcttgggaccattcaaatatgctggttatcctatgttgctaaatgcagttactgtagataaagatgacagcaattttctttcatttgataggacccctcttctgatagctgcttcggagctaatttggttgacatgtgcatcatcttcattaaatggagaagaacttataagggatggtggtatccccttgttggcaacacttctttctcgctgtatgtgtgttgttcagccaactacaccagcaaatgaaccagctgcaagaatagtcaccaacataatgcataccttctctgttctcagtcagtttgaatcaggaagagttgagattcttaagtttggtggccttgccgatggcattgtgcattgcacagaacttgagtttgttccctcagctgtggatgctgcgctgctgacagctgcgaatgttttggtttcatctgagttgcaaaatgctctgctcagggctggatttttatggtatgtgctacccctgctgcttcaatacgattcgacagcagaagagaatgagacatgtgaagcacatggtgttggggcaagggtgcagattgccaaaaatctgcatgctgttcatgcaactcaagctttgtctaagctttgtggtctcagtggcgatgatatcctgtacccagataacaaacctgcatacaatgcactgaaggctcttcttactccaaagcttgctgacatgctgagaaaccacccacctaaagagttattatcaaatctaaattcaaatttggaatcaccagagatcatatggaattcatccaccagaggggagcttctcaaatttgttgaccagcagcgtgctagtcaaggccctgatggttcatatgatttgacagaatcacattctttcacctatgaagctttatctaaagaattgaacgttggtaatgtatacttgagagtttacaacaaccaaccggattttgaaataagtgaccaggaggaattttgcattgccctgcttaagtttatagtagagttagtactacagtggaattccattaatttggagacgattcatcaacatggttcagttactgaagcatctatgtctggaaatgatgaagtcagtgattcaactattgaaggaaaaatggataattcatcaggaaaacaaagtacagatggagattctgaagttattataaacctccaaagtggactaacatcacttcagaatcttcttacaagtaatccaggcttagctgctgtttttgcttccaaggagcgtctgattcctctttttgaatgccttgcactgcatgttccttctgaaagcaccagcccacaaatctgtttaagtgttctttctctgttgactaagcatgcttcttgtttggaggctatggttgcagaaaggatgagcctgattttgctatttcagatactccactgcaatcccccttgcagggacggagctcttgctgtactgtattctttagccagcacaccagagcttgcctgggcagctgccaagcatggtggtgttgtttacattcttgaacttatgttgccacttcaagaggaaatccctgtgcagcaaagagctgtagctgcatctttattgggcaaacttgttgggcaaccaatgcatggccccagggtagcaatcacccttgccaggttcctgcctgatggtttggtttctgccattaaagatggacctggtgaagcggttgtttcttctcttgagctgacaactgaaactcctgaactagtatggacacccgcaatggcagcttctctttctgcacagttggcaacaatggcatcagacctctatcaagagcagatgaaaggacgtgttgttgattgggatgtacctgaacaagcttccggacaacatgtaatgaaggatgaaccacaggttggtggaatttatgtaagactttttcttaaggatcccaagtttccactgagaaaccctaaaagattccttgaagggctcctagatcagtatgtctcctctgttgctgctacacatcatgaagcaattgctacagatccagagcttcctttgctactgtccgcggcattggtttccttactacgagttcatccagtgcttgctgaccatgttggctacctcggttatgttccaaagcttgttgcagctatggcttatgagggacaaagggaaactatggcatctgggcaggcttccagtggatcgcaggcagaacctggtgaacatgacaattcatctcactctgaggccactgtgcagactccacaagaacgtgtccgccttagttgtttgcgtgttctgcatcagcttgcgtctagcacaacctgtgcagaagctatggcatcaacaagtgcaggaactcctcaggtcataccactgcttatgaaagcaattggatggcaaggtggaagtatactggcattggagacattaaagcgtgtagtcggtgctggtaatcgggctcgtgatgctcttgttgcacaggggcttaaggttggtcttgttgaagtgctccttggtattcttgactggcgtgctggtggaagacagggactccgtaataaaatgaagtggaacgaatcagaggcttcaattgggcgtgttttggctgtggaggtgcttcatgcttttgcaaccgaaggtgcacactgtgctagagttcgtgaagtcctgaattcctctgatgtatggagtgcttacaaagaccagaagcacgaccttttccttccatccagtgcacaatcttctgctgctggagttgctgggctcattgagagctcgtcaagattcacttacgccctcgccgcaccgccatcttcttctctctctccaccatcagctccagcaaaccctagtggacggcaatattatcagcattcgtagtggaaaacgaaacacttaatctctgctccttggagtatgaccatgaaggcaccaccatggtaacgatttgtagagtgaggccaccttgagtgggcttgttactgtcaccaaatacagctcgtgtctccattcccaccaatgagcagctgatcagttgcccgcatttcagtacatagcatagcatagcataccattgtacagttttccattacataagggtcggggtcggttttgtgtgtgtgttttttttttgtaaagcatatgattttttttgggtaccatagatgtccatagaatacgcgagctgaatattgtatccattcattactgggttgatgcactcccttgttcggatcacacgacttacttgtgacgagagaaataaatgttttttttgcctttgtttgatgagcattttctggtgtcagttaaccttttacagtcatattgtcgtgtatgaccaccgagtgtgtgtaggttttatatagcctgtccgtcactacttttggttagagtttgctatttcatttgtaatgaagttgtttgctgacacctttgcgtgtaacaaaagaaaagcacacaaaaaataacatgctccctcagcctcggtgacacgatgcgtgacatacaaaaaaaacaaaatcctgctgcttcacatatagcctgtccgtcacaacttgtgggtagagtttgctatttcatctgtaatgaaagttttgcgtgtaacaaaagaaaagcacacaaaaaataacat

SEQ ID NO: 80616 - DNA, 8636 bp, Zea Mays
aacagcttgaaaacgggcagaaaatagaacattctttgaaaaggagccaacgaaccgatcgatcgatcaagcaccaagagaactcgcgcaacacaaaatctctgcaaggattttccggccgctgcgccggcgagcaccatcctctggcaaccggcggggcagcagcagcatcaataaggggatccttgtctcgcttcgtgatcgtccgccgcgctggggtcgactcactcgcgccactcttcccgttccctaccgtggtggcggaaccctaatgcgggcccgagtctagcctccatggactttgccagccgccacgccgcagcggaggctgccacatcgtctgctgcatccgcctccgcccccgcggcggtcgctgaggagcctgagtacctcgcccggtacatcgtcgtcaagcactcgtggaggggaaggtatcgccgggtcctttgcatcgcctcttcctgcgtcgtcacgctcgaccccaccactctcaacctcaccaactcctacgatgtcggctccaagttcgaccatgctgaggctctcactgccaccgacgagttcacgctcgcagtccgcaccgatgcccgcggcaagttcaagcctatgcgcttctcatccccgctccgcccggggatcctcaccgaactccaccgcctccgcccggtccaggactccttcgacttccccgtcctccatctccgccgacgcacccacgagtgggcccccttcaaacttaaggttactcctgtgggtgttgagctccttgaggcttctggttatatgcgctggtgcttggaattcagagatatgaattctccagcaattattctcttggggaatagctatgggagcaagactactgaaggtggagggtttgtgctatgcccgctttatggtcggaagtcaaaagcttttatggctgcttcaggaactacaaacactgcaattatatcgcatctgacgaaaactgccaaattaaagattggattatcactatctgtggataattcacaatcaatgaaagcggacgagttcatagcaaaaagagctatggaggcagttggagctgctgaaacacgacatggagagtggtcagtaacaagattacgttctgctgcacatggcactgcttatattgagagcttaagtttgggtgttggaccaaggggtgggcttggagaacagggcgattctgtctcttgtctgcttgttcttacaagcacttcacttgttgaaagacgtccagagaactatgaggctgtcatagtacgaccactctcagcagtatatgcaagcacttcccgtgataatctacttgcaacagttcttgatgttttagaaacccagagacagtgtgcaattccagtgctaccaaggttaacaatgtctggtcatcgcatagatccgccttgtggggtagcacatcttgagatgccctatcatggttctgttgacatggagtcagcttccatgcacacaaaacatttggccgcaattgctaaagaggctgtagtgtcatctgacactgttcctggagcaaaaatcagattgtggcgtagaataagggagtttaatgcatgtgtaccatacactggagtgcccgtcaatattgaagtacctgaagtggtcgtactggccttgatcagtcttcttccaaccataccacatagccttcctgctgatgctcctcctcttctgcctccatctccaaaagcagcagcaacaataatgggttttgttgcatgcttacgcaggctacttacatcaagaagtgtggcatcacatgtgatgtcgtttcctgtcgctgttgggagaataatgggtttgcttaggaatggttcggaaggagtagcagctgaagctgctggacttgtggctatgctaattggtggtggtcccggtgattcatccatcttaatggatgcaaggggagaatcccatgccacctacatgcatgcaaagtctgtactgttctcgcaaccaatgtatgttccgatccttgttaacaggttgaggccaatatcggtgtcaccgttgttatctttgtctgttgtggaagtccttgaagctatgctttgtgaaccccatggtgaaacaacccaacatgctacatttgttgagctactgcgtcaagttgctggtttgcgccgtcgtttgtttgcattatttgcacatccagctgaaagtgtgcgagagactatttctgttataatgcggacaattgctgaggaagatgcaatagcagcagagttcatgcgtgatgctgccttgaaggatggtgctcttctgaggcatttactaaatgctttcttcttgcctgctggagaacagcgtgatgttagtcggcaacttgttgctctttgggctgattcctatcaacctgcacttgatttgctatcaagaatacttcctcctggacttgttgcttacctccatacacgttcagatgaagaatcacagagccagtatgatgaagcaccgttgagcagaaggcagagacgaatacttcagcagaggagggtccgtggtagtaaaagtatgtcagtacaagaacaaggggtaccccccaatggtgttgaggatggggaacccttcaggcacaccagtgcgggcacttatggagtagcagatgttcatcagaggcatgttggcccatactcttccacccactctcctttgccaggtataagcattgatccttcttgtgcagttacagtgccacatggttttgtacctgaggccctttctgaaaataatcatcaaattggggaaccacagctggattcacatgtttattcagtggactccaatgccaatggtgatcttgtgagctcatcgcattcagatttttcagtccctgcacaggttgtggtggaaaacactcctgtgggatctggcaggctcctgtgcaattggtatggattttggagggcattcagtctagatcacaacagagcagatttgatatggaatgaacgcaccagacaggaactgagggaagcattgcaagctgaagttcataacctggatgtcgagaaagcaagaacaaatgatattgtccctggaagttcagtcactgaggacgctggtggtagtgacaacttacctcgaatgtcatggaattatgctgaatttttagtgagctacccaagcttgtccaaagaagtctgtgtggggcaatactatttgcgactgctgcttgaaattggaagcaactatcgagcacacaattttccactacgagatccggttgccttttttagggctctgtaccatcaatttttgtgtgatgcagatattggtcttactgtggatggtgcagtacctgacgagttgggatcatctgatgattggtgtgacattgggagattagatggctttggtggtggtggagggtcttctgtaagagaactctgttcaagggcaatgactatagtttatgagcaacattataaagttattggggcttttgatggcactccacatattactgtcctcttagaccgaaccgatgatagggttttgaggcatcgtttgttactacttttaaaggtcttgatgaatgacctttcaaatgttgaagcatgtgttttggttggaggctgtgttttggctgttgatttgcttactgttgcacatgaaacatctgagcggactgctattcctttgcaatctaacctcatcgcggcaactgcatttatggaaccttcaaaagaatggatgtacattgataaagatggcacacaagttgggccacttgaaaaagatgcaataagaaggctgtggtcaaagaagtcaattgattggacaacaaaatgttgggcttctggcatgtcagactggaaagggctacgggatatacgggaactgcgatgggcactttctgtaagagtgcctgttttgactcccactcagattggggatgctgcattatctatattacacagtatgacatctgcacggtccgatcttgatgatgcaggtgaaatagtaactccaactcctagggtgaaacgtatattgtcaagtccaagatgccttcctcatgtggcccaggttatgcttactggggaaccaagcattgttgaagcagctgcctcattgcttatggctattgttacaagaaaccctaaagctatgattcgattatacattactggtgccttttactttgcattggcatatcctggttcaaatctcctatcaattgcacatttgttttcggccacacatactcatcaagcttttcatggtggtgaagaggcagcactatcttcatctttgcctttggcaaagcgtagtgtactgggtggactcctcccagaatctttgctgtatgtcttggagcgcagtggcccttctgcttttgccggtgcaatggtgtctgattctgacacaccagaaattatatggacccacaagatgcgagcagaaaaccttatttgtcaggttctgcagcatctcggtgaatttcctcagaaattggcacagcattgccattcattgtatgattatgctcctatgccacctgtgacttacccgaatctgaaagatgagatgtggtgccatcgttactacctccgcaacctatgtgatgagattaggtttcctaactggcccattgtagaacatgtggagtttttgcagtcattgttggtgatgtggcgtgaagagttaactcgtcgtccaatggatttatctgaagaagaagtctgtaagatactcgagatttctcttgatgatcttgtgcttggtgagaacggtagcatcaagcagtcatctgacttaagtttggctaattccggaaacaaaattgaaaacattgatgaggagaagcttaagcgccaataccgaaagctagcaataaaatatcatccagacaagaaccctgaaggaagggagaaatttgttgctgtgcaaaaggcttatgagcgattgcaggctagtatgcagggattgcagggaccacaagtctggaggctgctactcttgctgaaggcacaacgcatcttgtacaagagatatggagatgtcttgggaccattcaaatatgctggttatcctatgttgctaaatgcagttactgtagataaagatgacagcaattttctttcatttgataggacccctcttctgatagctgcttcggagctaatttggttgacatgtgcatcatcttcattaaatggagaagaacttataagggatggtggtatccccttgttggcaacacttctttctcgctgtatgtgtgttgttcagccaactacaccagcaaatgaaccagctgcaagaatagtcaccaacataatgcataccttctctgttctcagtcagtttgaatcaggaagagttgagattcttaagtttggtggccttgccgatggcattgtgcattgcacagaacttgagtttgttccctcagctgtggatgctgcgctgctgacagctgcgaatgttttggtttcatctgagttgcaaaatgctctgctcagggctggatttttatggtatgtgctacccctgctgcttcaatacgattcgacagcagaagagaatgagacatgtgaagcacatggtgttggggcaagggtgcagattgccaaaaatctgcatgctgttcatgcaactcaagctttgtctaagctttgtggtctcagtggcgatgatatcctgtacccagataacaaacctgcatacaatgcactgaaggctcttcttactccaaagcttgctgacatgctgagaaaccacccacctaaagagttattatcaaatctaaattcaaatttggaatcaccagagatcatatggaattcatccaccagaggggagcttctcaaatttgttgaccagcagcgtgctagtcaaggccctgatggttcatatgatttgacagaatcacattctttcacctatgaagctttatctaaagaattgaacgttggtaatgtatacttgagagtttacaacaaccaaccggattttgaaataagtgaccaggaggaattttgcattgccctgcttaagtttatagtagagttagtactacagtggaattccattaatttggagacgattcatcaacatggttcagttactgaagcatctatgtctggaaatgatgaagtcagtgattcaactattgaaggaaaaatggataattcatcaggaaaacaaagtacagatggagattctgaagttattataaacctccaaagtggactaacatcacttcagaatcttcttacaagtaatccaggcttagctgctgtttttgcttccaaggagcgtctgattcctctttttgaatgccttgcactgcatgttccttctgaaagcaccagcccacaaatctgtttaagtgttctttctctgttgactaagcatgcttcttgtttggaggctatggttgcagaaaggatgagcctgattttgctatttcagatactccactgcaatcccccttgcagggacggagctcttgctgtactgtattctttagccagcacaccagagcttgcctgggcagctgccaagcatggtggtgttgtttacattcttgaacttatgttgccacttcaagaggaaatccctgtgcagcaaagagctgtagctgcatctttattgggcaaacttgttgggcaaccaatgcatggccccagggtagcaatcacccttgccaggttcctgcctgatggtttggtttctgccattaaagatggacctggtgaagcggttgtttcttctcttgagctgacaactgaaactcctgaactagtatggacacccgcaatggcagcttctctttctgcacagttggcaacaatggcatcagacctctatcaagagcagatgaaaggacgtgttgttgattgggatgtacctgaacaagcttccggacaacatgtaatgaaggatgaaccacaggttggtggaatttatgtaagactttttcttaaggatcccaagtttccactgagaaaccctaaaagattccttgaagggctcctagatcagtatgtctcctctgttgctgctacacatcatgaagcaattgctacagatccagagcttcctttgctactgtccgcggcattggtttccttactacgagttcatccagtgcttgctgaccatgttggctacctcggttatgttccaaagcttgttgcagctatggcttatgagggacaaagggaaactatggcatctgggcaggcttccagtggatcgcaggcagaacctggtgaacatgacaattcatctcactctgaggccactgtgcagactccacaagaacgtgtccgccttagttgtttgcgtgttctgcatcagcttgcgtctagcacaacctgtgcagaagctatggcatcaacaagtgcaggaactcctcaggtcataccactgcttatgaaagcaattggatggcaaggtggaagtatactggcattggagacattaaagcgtgtagtcggtgctggtaatcgggctcgtgatgctcttgttgcacaggggcttaaggttggtcttgttgaagtgctccttggtattcttgactggcgtgctggtggaagacagggactccgtaataaaatgaagtggaacgaatcagaggcttcaattgggcgtgttttggctgtggaggtgcttcatgcttttgcaaccgaaggtgcacactgtgctagagttcgtgaagtcctgaattcctctgatgtatggagtgcttacaaagaccagaagcacgaccttttccttccatccagtgcacaatcttctgctgctggagttgctgggctcattgagagctcgtcaagattcacttacgccctcgccgcaccgccatcttcttctctctctccaccatcagctccagcaaaccctagtggacggcaatattatcagcattcgtagtggaaaacgaaacacttaatctctgctccttggagtatgaccatgaaggcaccaccatggtaacgatttgtagagtgaggccaccttgagtgggcttgttactgtcaccaaatacagctcgtgtctccattcccaccaatgagcagctgatcagttgcccgcatttcagtacatagcataagggtcggggtcggttttgtgtgtgtgttttttttttgtaaagcatatgattttttttgggtaccatagatgtccatagaatacgcgagctgaatattgtatccattcattactgggttgatgcactcccttgttcggatcacacgacttacttgtgacgagagaaataaatgttttttttgcctttgtttgatgagcattttctggtgtcagttaaccttttacagtcatattgtcgtgtatgaccaccgagtgtgtgtaggttttatatagcctgtccgtcactacttttggttagagtttgctatttcatttgtaatgaagttgtttgctgacacctttgcgtgtaacaaaagaaaagcacacaaaaaataacatgctccctcagcctcggtgacacgatgcgtgacatacaaaaaaaacaaaatcctgctgcttcacatatagcctgtccgtcacaacttgtgggtagagtttgctatttcatctgtaatgaaagttttgcgtgtaacaaaagaaaagcacacaaaaaataacat

SEQ ID NO: 80617 - DNA, 8651 bp, Zea Mays
aatctctgcaaggattttccggccgctgcgccggcgagcaccatcctctggcaaccggcggggcagcagcagcatcaataaggggatccttgtctcgcttcgtgatcgtccgccgcgctggggtcgactcactcgcgccactcttcccgttccctaccgtggtggcggaaccctaatgcgggcccgagtctagcctccatggactttgccagccgccacgccgcagcggaggctgccacatcgtctgctgcatccgcctccgcccccgcggcggtcgctgaggagcctgagtacctcgcccggtacatcgtcgtcaagcactcgtggaggggaaggtatcgccgggtcctttgcatcgcctcttcctgcgtcgtcacgctcgaccccaccactctcaacctcaccaactcctacgatgtcggctccaagttcgaccatgctgaggctctcactgccaccgacgagttcacgctcgcagtccgcaccgatgcccgcggcaagttcaagcctatgcgcttctcatccccgctccgcccggggatcctcaccgaactccaccgcctccgcccggtccaggactccttcgacttccccgtcctccatctccgccgacgcacccacgagtgggcccccttcaaacttaaggttactcctgtgggtgttgagctccttgaggcttctggttatatgcgctggtgcttggaattcagagatatgaattctccagcaattattctcttggggaatagctatgggagcaagactactgaaggtggagggtttgtgctatgcccgctttatggtcggaagtcaaaagcttttatggctgcttcaggaactacaaacactgcaattatatcgcatctgacgaaaactgccaaattaaagattggattatcactatctgtggataattcacaatcaatgaaagcggacgagttcatagcaaaaagagctatggaggcagttggagctgctgaaacacgacatggagagtggtcagtaacaagattacgttctgctgcacatggcactgcttatattgagagcttaagtttgggtgttggaccaaggggtgggcttggagaacagggcgattctgtctcttgtctgcttgttcttacaagcacttcacttgttgaaagacgtccagagaactatgagggctgtcatagtacgaccactctcagcagtaagtgctcttgttcgatttgtagaagaaccacagatatttgcatttgaattcaatgatggctgcccaattcatgtatatgcaagcacttcccgtgataatctacttgcaacagttcttgatgttttagaaacccagagacagtgtgcaattccagtgctaccaaggttaacaatgtctggtcatcgcatagatccgccttgtggggtagcacatcttgagatgccctatcatggttctgttgacatggagtcagcttccatgcacacaaaacatttggccgcaattgctaaagaggctgtagtgtcatctgacactgttcctggagcaaaaatcagattgtggcgtagaataagggagtttaatgcatgtgtaccatacactggagtgcccgtcaatattgaagtacctgaagtggtcgtactggccttgatcagtcttcttccaaccataccacatagccttcctgctgatgctcctcctcttctgcctccatctccaaaagcagcagcaacaataatgggttttgttgcatgcttacgcaggctacttacatcaagaagtgtggcatcacatgtgatgtcgtttcctgtcgctgttgggagaataatgggtttgcttaggaatggttcggaaggagtagcagctgaagctgctggacttgtggctatgctaattggtggtggtcccggtgattcatccatcttaatggatgcaaggggagaatcccatgccacctacatgcatgcaaagtctgtactgttctcgcaaccaatgtatgttccgatccttgttaacaggttgaggccaatatcggtgtcaccgttgttatctttgtctgttgtggaagtccttgaagctatgctttgtgaaccccatggtgaaacaacccaacatgctacatttgttgagctactgcgtcaagttgctggtttgcgccgtcgtttgtttgcattatttgcacatccagctgaaagtgtgcgagagactatttctgttataatgcggacaattgctgaggaagatgcaatagcagcagagttcatgcgtgatgctgccttgaaggatggtgctcttctgaggcatttactaaatgctttcttcttgcctgctggagaacagcgtgatgttagtcggcaacttgttgctctttgggctgattcctatcaacctgcacttgatttgctatcaagaatacttcctcctggacttgttgcttacctccatacacgttcagatgaagaatcacagagccagtatgatgaagcaccgttgagcagaaggcagagacgaatacttcagcagaggagggtccgtggtagtaaaagtatgtcagtacaagaacaaggggtaccccccaatggtgttgaggatggggaacccttcaggcacaccagtgcgggcacttatggagtagcagatgttcatcagaggcatgttggcccatactcttccacccactctcctttgccaggtataagcattgatccttcttgtgcagttacagtgccacatggttttgtacctgaggccctttctgaaaataatcatcaaattggggaaccacagctggattcacatgtttattcagtggactccaatgccaatggtgatcttgtgagctcatcgcattcagatttttcagtccctgcacaggttgtggtggaaaacactcctgtgggatctggcaggctcctgtgcaattggtatggattttggagggcattcagtctagatcacaacagagcagatttgatatggaatgaacgcaccagacaggaactgagggaagcattgcaagctgaagttcataacctggatgtcgagaaagcaagaacaaatgatattgtccctggaagttcagtcactgaggacgctggtggtagtgacaacttacctcgaatgtcatggaattatgctgaatttttagtgagctacccaagcttgtccaaagaagtctgtgtggggcaatactatttgcgactgctgcttgaaattggaagcaactatcgagcacacaattttccactacgagatccggttgccttttttagggctctgtaccatcaatttttgtgtgatgcagatattggtcttactgtggatggtgcagtacctgacgagttgggatcatctgatgattggtgtgacattgggagattagatggctttggtggtggtggagggtcttctgtaagagaactctgttcaagggcaatgactatagtttatgagcaacattataaagttattggggcttttgatggcactccacatattactgtcctcttagaccgaaccgatgatagggttttgaggcatcgtttgttactacttttaaaggtcttgatgaatgacctttcaaatgttgaagcatgtgttttggttggaggctgtgttttggctgttgatttgcttactgttgcacatgaaacatctgagcggactgctattcctttgcaatctaacctcatcgcggcaactgcatttatggaaccttcaaaagaatggatgtacattgataaagatggcacacaagttgggccacttgaaaaagatgcaataagaaggctgtggtcaaagaagtcaattgattggacaacaaaatgttgggcttctggcatgtcagactggaaagggctacgggatatacgggaactgcgatgggcactttctgtaagagtgcctgttttgactcccactcagattggggatgctgcattatctatattacacagtatgacatctgcacggtccgatcttgatgatgcaggtgaaatagtaactccaactcctagggtgaaacgtatattgtcaagtccaagatgccttcctcatgtggcccaggttatgcttactggggaaccaagcattgttgaagcagctgcctcattgcttatggctattgttacaagaaaccctaaagctatgattcgattatacattactggtgccttttactttgcattggcatatcctggttcaaatctcctatcaattgcacatttgttttcggccacacatactcatcaagcttttcatggtggtgaagaggcagcactatcttcatctttgcctttggcaaagcgtagtgtactgggtggactcctcccagaatctttgctgtatgtcttggagcgcagtggcccttctgcttttgccggtgcaatggtgtctgattctgacacaccagaaattatatggacccacaagatgcgagcagaaaaccttatttgtcaggttctgcagcatctcggtgaatttcctcagaaattggcacagcattgccattcattgtatgattatgctcctatgccacctgtgacttacccgaatctgaaagatgagatgtggtgccatcgttactacctccgcaacctatgtgatgagattaggtttcctaactggcccattgtagaacatgtggagtttttgcagtcattgttggtgatgtggcgtgaagagttaactcgtcgtccaatggatttatctgaagaagaagtctgtaagatactcgagatttctcttgatgatcttgtgcttggtgagaacggtagcatcaagcagtcatctgacttaagtttggctaattccggaaacaaaattgaaaacattgatgaggagaagcttaagcgccaataccgaaagctagcaataaaatatcatccagacaagaaccctgaaggaagggagaaatttgttgctgtgcaaaaggcttatgagcgattgcaggctagtatgcagggattgcagggaccacaagtctggaggctgctactcttgctgaaggcacaacgcatcttgtacaagagatatggagatgtcttgggaccattcaaatatgctggttatcctatgttgctaaatgcagttactgtagataaagatgacagcaattttctttcatttgataggacccctcttctgatagctgcttcggagctaatttggttgacatgtgcatcatcttcattaaatggagaagaacttataagggatggtggtatccccttgttggcaacacttctttctcgctgtatgtgtgttgttcagccaactacaccagcaaatgaaccagctgcaagaatagtcaccaacataatgcataccttctctgttctcagtcagtttgaatcaggaagagttgagattcttaagtttggtggccttgccgatggcattgtgcattgcacagaacttgagtttgttccctcagctgtggatgctgcgctgctgacagctgcgaatgttttggtttcatctgagttgcaaaatgctctgctcagggctggatttttatggtatgtgctacccctgctgcttcaatacgattcgacagcagaagagaatgagacatgtgaagcacatggtgttggggcaagggtgcagattgccaaaaatctgcatgctgttcatgcaactcaagctttgtctaagctttgtggtctcagtggcgatgatatcctgtacccagataacaaacctgcatacaatgcactgaaggctcttcttactccaaagcttgctgacatgctgagaaaccacccacctaaagagttattatcaaatctaaattcaaatttggaatcaccagagatcatatggaattcatccaccagaggggagcttctcaaatttgttgaccagcagcgtgctagtcaaggccctgatggttcatatgatttgacagaatcacattctttcacctatgaagctttatctaaagaattgaacgttggtaatgtatacttgagagtttacaacaaccaaccggattttgaaataagtgaccaggaggaattttgcattgccctgcttaagtttatagtagagttagtactacagtggaattccattaatttggagacgattcatcaacatggttcagttactgaagcatctatgtctggaaatgatgaagtcagtgattcaactattgaaggaaaaatggataattcatcaggaaaacaaagtacagatggagattctgaagttattataaacctccaaagtggactaacatcacttcagaatcttcttacaagtaatccaggcttagctgctgtttttgcttccaaggagcgtctgattcctctttttgaatgccttgcactgcatgttccttctgaaagcaccagcccacaaatctgtttaagtgttctttctctgttgactaagcatgcttcttgtttggaggctatggttgcagaaaggatgagcctgattttgctatttcagatactccactgcaatcccccttgcagggacggagctcttgctgtactgtattctttagccagcacaccagagcttgcctgggcagctgccaagcatggtggtgttgtttacattcttgaacttatgttgccacttcaagaggaaatccctgtgcagcaaagagctgtagctgcatctttattgggcaaacttgttgggcaaccaatgcatggccccagggtagcaatcacccttgccaggttcctgcctgatggtttggtttctgccattaaagatggacctggtgaagcggttgtttcttctcttgagctgacaactgaaactcctgaactagtatggacacccgcaatggcagcttctctttctgcacagttggcaacaatggcatcagacctctatcaagagcagatgaaaggacgtgttgttgattgggatgtacctgaacaagcttccggacaacatgtaatgaaggatgaaccacaggttggtggaatttatgtaagactttttcttaaggatcccaagtttccactgagaaaccctaaaagattccttgaagggctcctagatcagtatgtctcctctgttgctgctacacatcatgaagcaattgctacagatccagagcttcctttgctactgtccgcggcattggtttccttactacgagttcatccagtgcttgctgaccatgttggctacctcggttatgttccaaagcttgttgcagctatggcttatgagggacaaagggaaactatggcatctgggcaggcttccagtggatcgcaggcagaacctggtgaacatgacaattcatctcactctgaggccactgtgcagactccacaagaacgtgtccgccttagttgtttgcgtgttctgcatcagcttgcgtctagcacaacctgtgcagaagctatggcatcaacaagtgcaggaactcctcaggtcataccactgcttatgaaagcaattggatggcaaggtggaagtatactggcattggagacattaaagcgtgtagtcggtgctggtaatcgggctcgtgatgctcttgttgcacaggggcttaaggttggtcttgttgaagtgctccttggtattcttgactggcgtgctggtggaagacagggactccgtaataaaatgaagtggaacgaatcagaggcttcaattgggcgtgttttggctgtggaggtgcttcatgcttttgcaaccgaaggtgcacactgtgctagagttcgtgaagtcctgaattcctctgatgtatggagtgcttacaaagaccagaagcacgaccttttccttccatccagtgcacaatcttctgctgctggagttgctgggctcattgagagctcgtcaagattcacttacgccctcgccgcaccgccatcttcttctctctctccaccatcagctccagcaaaccctagtggacggcaatattatcagcattcgtagtggaaaacgaaacacttaatctctgctccttggagtatgaccatgaaggcaccaccatggtaacgatttgtagagtgaggccaccttgagtgggcttgttactgtcaccaaatacagctcgtgtctccattcccaccaatgagcagctgatcagttgcccgcatttcagtacatagcatagcatagcataccattgtacagttttccattacataagggtcggggtcggttttgtgtgtgtgttttttttttgtaaagcatatgattttttttgggtaccatagatgtccatagaatacgcgagctgaatattgtatccattcattactgggttgatgcactcccttgttcggatcacacgacttacttgtgacgagagaaataaatgttttttttgcctttgtttgatgagcattttctggtgtcagttaaccttttacagtcatattgtcgtgtatgaccaccgagtgtgtgtaggttttatatagcctgtccgtcactacttttggttagagtttgctatttcatttgtaatgaagttgtttgctgacacctttgcgtgtaacaaaagaaaagcacacaaaaaataacatgctccctcagcctcggtgacacgatgcgtgacatacaaaaaaaacaaaatcctgctgcttcacatatagcctgtccgtcacaacttgtgggtagagtttgctatttcatctgtaatgaaagttttgcgtgtaacaaaagaaaagcacacaaaaaataacat

SEQ ID NO: 80618 - DNA, 7901 bp, Zea Mays
gcctttctatcaatatgttttgtagcttggcagcttgcaaaacacagatgaactgtgagaattagctatggaggcagttggagctgctgaaacacgacatggagagtggtcagtaacaagattacgttctgctgcacatggcactgcttatattgagagcttaagtttgggtgttggaccaaggggtgggcttggagaacagggcgattctgtctcttgtctgcttgttcttacaagcacttcacttgttgaaagacgtccagagaactatgaggtagaaattttgtcctcaattttatatgaattgttaaaactcttctccctcgagctattggcaatccaagacatgatatcaattttgagtaccaacaccctacccccgcctaacacaaacacacacaaaagagagcatatggctgtcatagtacgaccactctcagcagtaagtgctcttgttcgatttgtagaagaaccacagatatttgcatttgaattcaatgatggctgcccaattcatgtatatgcaagcacttcccgtgataatctacttgcaacagttcttgatgttttagaaacccagagacagtgtgcaattccagtgctaccaaggttaacaatgtctggtcatcgcatagatccgccttgtggggtagcacatcttgagatgccctatcatggttctgttgacatggagtcagcttccatgcacacaaaacatttggccgcaattgctaaagaggctgtagtgtcatctgacactgttcctggagcaaaaatcagattgtggcgtagaataagggagtttaatgcatgtgtaccatacactggagtgcccgtcaatattgaagtacctgaagtggtcgtactggccttgatcagtcttcttccaaccataccacatagccttcctgctgatgctcctcctcttctgcctccatctccaaaagcagcagcaacaataatgggttttgttgcatgcttacgcaggctacttacatcaagaagtgtggcatcacatgtgatgtcgtttcctgtcgctgttgggagaataatgggtttgcttaggaatggttcggaaggagtagcagctgaagctgctggacttgtggctatgctaattggtggtggtcccggtgattcatccatcttaatggatgcaaggggagaatcccatgccacctacatgcatgcaaagtctgtactgttctcgcaaccaatgtatgttccgatccttgttaacaggttgaggccaatatcggtgtcaccgttgttatctttgtctgttgtggaagtccttgaagctatgctttgtgaaccccatggtgaaacaacccaacatgctacatttgttgagctactgcgtcaagttgctggtttgcgccgtcgtttgtttgcattatttgcacatccagctgaaagtgtgcgagagactatttctgttataatgcggacaattgctgaggaagatgcaatagcagcagagttcatgcgtgatgctgccttgaaggatggtgctcttctgaggcatttactaaatgctttcttcttgcctgctggagaacagcgtgatgttagtcggcaacttgttgctctttgggctgattcctatcaacctgcacttgatttgctatcaagaatacttcctcctggacttgttgcttacctccatacacgttcagatgaagaatcacagagccagtatgatgaagcaccgttgagcagaaggcagagacgaatacttcagcagaggagggtccgtggtagtaaaagtatgtcagtacaagaacaaggggtaccccccaatggtgttgaggatggggaacccttcaggcacaccagtgcgggcacttatggagtagcagatgttcatcagaggcatgttggcccatactcttccacccactctcctttgccaggtataagcattgatccttcttgtgcagttacagtgccacatggttttgtacctgaggccctttctgaaaataatcatcaaattggggaaccacagctggattcacatgtttattcagtggactccaatgccaatggtgatcttgtgagctcatcgcattcagatttttcagtccctgcacaggttgtggtggaaaacactcctgtgggatctggcaggctcctgtgcaattggtatggattttggagggcattcagtctagatcacaacagagcagatttgatatggaatgaacgcaccagacaggaactgagggaagcattgcaagctgaagttcataacctggatgtcgagaaagcaagaacaaatgatattgtccctggaagttcagtcactgaggacgctggtggtagtgacaacttacctcgaatgtcatggaattatgctgaatttttagtgagctacccaagcttgtccaaagaagtctgtgtggggcaatactatttgcgactgctgcttgaaattggaagcaactatcgagcacacaattttccactacgagatccggttgccttttttagggctctgtaccatcaatttttgtgtgatgcagatattggtcttactgtggatggtgcagtacctgacgagttgggatcatctgatgattggtgtgacattgggagattagatggctttggtggtggtggagggtcttctgtaagagaactctgttcaagggcaatgactatagtttatgagcaacattataaagttattggggcttttgatggcactccacatattactgtcctcttagaccgaaccgatgatagggttttgaggcatcgtttgttactacttttaaaggtcttgatgaatgacctttcaaatgttgaagcatgtgttttggttggaggctgtgttttggctgttgatttgcttactgttgcacatgaaacatctgagcggactgctattcctttgcaatctaacctcatcgcggcaactgcatttatggaaccttcaaaagaatggatgtacattgataaagatggcacacaagttgggccacttgaaaaagatgcaataagaaggctgtggtcaaagaagtcaattgattggacaacaaaatgttgggcttctggcatgtcagactggaaagggctacgggatatacgggaactgcgatgggcactttctgtaagagtgcctgttttgactcccactcagattggggatgctgcattatctatattacacagtatgacatctgcacggtccgatcttgatgatgcaggtgaaatagtaactccaactcctagggtgaaacgtatattgtcaagtccaagatgccttcctcatgtggcccaggttatgcttactggggaaccaagcattgttgaagcagctgcctcattgcttatggctattgttacaagaaaccctaaagctatgattcgattatacattactggtgccttttactttgcattggcatatcctggttcaaatctcctatcaattgcacatttgttttcggccacacatactcatcaagcttttcatggtggtgaagaggcagcactatcttcatctttgcctttggcaaagcgtagtgtactgggtggactcctcccagaatctttgctgtatgtcttggagcgcagtggcccttctgcttttgccggtgcaatggtgtctgattctgacacaccagaaattatatggacccacaagatgcgagcagaaaaccttatttgtcaggttctgcagcatctcggtgaatttcctcagaaattggcacagcattgccattcattgtatgattatgctcctatgccacctgtgacttacccgaatctgaaagatgagatgtggtgccatcgttactacctccgcaacctatgtgatgagattaggtttcctaactggcccattgtagaacatgtggagtttttgcagtcattgttggtgatgtggcgtgaagagttaactcgtcgtccaatggatttatctgaagaagaagtctgtaagatactcgagatttctcttgatgatcttgtgcttggtgagaacggtagcatcaagcagtcatctgacttaagtttggctaattccggaaacaaaattgaaaacattgatgaggagaagcttaagcgccaataccgaaagctagcaataaaatatcatccagacaagaaccctgaaggaagggagaaatttgttgctgtgcaaaaggcttatgagcgattgcaggctagtatgcagggattgcagggaccacaagtctggaggctgctactcttgctgaaggcacaacgcatcttgtacaagagatatggagatgtcttgggaccattcaaatatgctggttatcctatgttgctaaatgcagttactgtagataaagatgacagcaattttctttcatttgataggacccctcttctgatagctgcttcggagctaatttggttgacatgtgcatcatcttcattaaatggagaagaacttataagggatggtggtatccccttgttggcaacacttctttctcgctgtatgtgtgttgttcagccaactacaccagcaaatgaaccagctgcaagaatagtcaccaacataatgcataccttctctgttctcagtcagtttgaatcaggaagagttgagattcttaagtttggtggccttgccgatggcattgtgcattgcacagaacttgagtttgttccctcagctgtggatgctgcgctgctgacagctgcgaatgttttggtttcatctgagttgcaaaatgctctgctcagggctggatttttatggtatgtgctacccctgctgcttcaatacgattcgacagcagaagagaatgagacatgtgaagcacatggtgttggggcaagggtgcagattgccaaaaatctgcatgctgttcatgcaactcaagctttgtctaagctttgtggtctcagtggcgatgatatcctgtacccagataacaaacctgcatacaatgcactgaaggctcttcttactccaaagcttgctgacatgctgagaaaccacccacctaaagagttattatcaaatctaaattcaaatttggaatcaccagagatcatatggaattcatccaccagaggggagcttctcaaatttgttgaccagcagcgtgctagtcaaggccctgatggttcatatgatttgacagaatcacattctttcacctatgaagctttatctaaagaattgaacgttggtaatgtatacttgagagtttacaacaaccaaccggattttgaaataagtgaccaggaggaattttgcattgccctgcttaagtttatagtagagttagtactacagtggaattccattaatttggagacgattcatcaacatggttcagttactgaagcatctatgtctggaaatgatgaagtcagtgattcaactattgaaggaaaaatggataattcatcaggaaaacaaagtacagatggagattctgaagttattataaacctccaaagtggactaacatcacttcagaatcttcttacaagtaatccaggcttagctgctgtttttgcttccaaggagcgtctgattcctctttttgaatgccttgcactgcatgttccttctgaaagcaccagcccacaaatctgtttaagtgttctttctctgttgactaagcatgcttcttgtttggaggctatggttgcagaaaggatgagcctgattttgctatttcagatactccactgcaatcccccttgcagggacggagctcttgctgtactgtattctttagccagcacaccagagcttgcctgggcagctgccaagcatggtggtgttgtttacattcttgaacttatgttgccacttcaagaggaaatccctgtgcagcaaagagctgtagctgcatctttattgggcaaacttgttgggcaaccaatgcatggccccagggtagcaatcacccttgccaggttcctgcctgatggtttggtttctgccattaaagatggacctggtgaagcggttgtttcttctcttgagctgacaactgaaactcctgaactagtatggacacccgcaatggcagcttctctttctgcacagttggcaacaatggcatcagacctctatcaagagcagatgaaaggacgtgttgttgattgggatgtacctgaacaagcttccggacaacatgtaatgaaggatgaaccacaggttggtggaatttatgtaagactttttcttaaggatcccaagtttccactgagaaaccctaaaagattccttgaagggctcctagatcagtatgtctcctctgttgctgctacacatcatgaagcaattgctacagatccagagcttcctttgctactgtccgcggcattggtttccttactacgagttcatccagtgcttgctgaccatgttggctacctcggttatgttccaaagcttgttgcagctatggcttatgagggacaaagggaaactatggcatctgggcaggcttccagtggatcgcaggcagaacctggtgaacatgacaattcatctcactctgaggccactgtgcagactccacaagaacgtgtccgccttagttgtttgcgtgttctgcatcagcttgcgtctagcacaacctgtgcagaagctatggcatcaacaagtgcaggaactcctcaggtcataccactgcttatgaaagcaattggatggcaaggtggaagtatactggcattggagacattaaagcgtgtagtcggtgctggtaatcgggctcgtgatgctcttgttgcacaggggcttaaggttggtcttgttgaagtgctccttggtattcttgactggcgtgctggtggaagacagggactccgtaataaaatgaagtggaacgaatcagaggcttcaattgggcgtgttttggctgtggaggtgcttcatgcttttgcaaccgaaggtgcacactgtgctagagttcgtgaagtcctgaattcctctgatgtatggagtgcttacaaagaccagaagcacgaccttttccttccatccagtgcacaatcttctgctgctggagttgctgggctcattgagagctcgtcaagattcacttacgccctcgccgcaccgccatcttcttctctctctccaccatcagctccagcaaaccctagtggacggcaatattatcagcattcgtagtggaaaacgaaacacttaatctctgctccttggagtatgaccatgaaggcaccaccatggtaacgatttgtagagtgaggccaccttgagtgggcttgttactgtcaccaaatacagctcgtgtctccattcccaccaatgagcagctgatcagttgcccgcatttcagtacatagcatagcatagcataccattgtacagttttccattacataagggtcggggtcggttttgtgtgtgtgttttttttttgtaaagcatatgattttttttgggtaccatagatgtccatagaatacgcgagctgaatattgtatccattcattactgggttgatgcactcccttgttcggatcacacgacttacttgtgacgagagaaataaatgttttttttgcctttgtttgatgagcattttctggtgtcagttaaccttttacagtcatattgtcgtgtatgaccaccgagtgtgtgtaggttttatatagcctgtccgtcactacttttggttagagtttgctatttcatttgtaatgaagttgtttgctgacacctttgcgtgtaacaaaagaaaagcacacaaaaaataacatgctccctcagcctcggtgacacgatgcgtgacatacaaaaaaaacaaaatcctgctgcttcacatatagcctgtccgtcacaacttgtgggtagagtttgctatttcatctgtaatgaaagttttgcgtgtaacaaaagaaaagcacacaaaaaataacat

SEQ ID NO: 80619 - DNA, 5035 bp, Zea Mays
ggagaatctggttgtggagagaatctaagtatcgtggagattacatacgaaggaagataaaagagtccatagggtttaggatgtagaaagtgatggtttcctactattgcaattgcaacaactcggtcgattctgtgttcacgttgattttggacggcattgactaaagtgattctcatagagaaaggctgaaaagctgggcgtttggcagtccgcagcagcttctggcggccagaaactgaaaaaagctgaaacaaacaaggcctaaatctgcagcttctgattggggatgctgcattatctatattacacagtatgacatctgcacggtccgatcttgatgatgcaggtgaaatagtaactccaactcctagggtgaaacgtatattgtcaagtccaagatgccttcctcatgtggcccaggttatgcttactggggaaccaagcattgttgaagcagctgcctcattgcttatggctattgttacaagaaaccctaaagctatgattcgattatacattactggtgccttttactttgcattggcatatcctggttcaaatctcctatcaattgcacatttgttttcggccacacatactcatcaagcttttcatggtggtgaagaggcagcactatcttcatctttgcctttggcaaagcgtagtgtactgggtggactcctcccagaatctttgctgtatgtcttggagcgcagtggcccttctgcttttgccggtgcaatggtgtctgattctgacacaccagaaattatatggacccacaagatgcgagcagaaaaccttatttgtcaggttctgcagcatctcggtgaatttcctcagaaattggcacagcattgccattcattgtatgattatgctcctatgccacctgtgacttacccgaatctgaaagatgagatgtggtgccatcgttactacctccgcaacctatgtgatgagattaggtttcctaactggcccattgtagaacatgtggagtttttgcagtcattgttggtgatgtggcgtgaagagttaactcgtcgtccaatggatttatctgaagaagaagtctgtaagatactcgagatttctcttgatgatcttgtgcttggtgagaacggtagcatcaagcagtcatctgacttaagtttggctaattccggaaacaaaattgaaaacattgatgaggagaagcttaagcgccaataccgaaagctagcaataaaatatcatccagacaagaaccctgaaggaagggagaaatttgttgctgtgcaaaaggcttatgagcgattgcaggctagtatgcagggattgcagggaccacaagtctggaggctgctactcttgctgaaggcacaacgcatcttgtacaagagatatggagatgtcttgggaccattcaaatatgctggttatcctatgttgctaaatgcagttactgtagataaagatgacagcaattttctttcatttgataggacccctcttctgatagctgcttcggagctaatttggttgacatgtgcatcatcttcattaaatggagaagaacttataagggatggtggtatccccttgttggcaacacttctttctcgctgtatgtgtgttgttcagccaactacaccagcaaatgaaccagctgcaagaatagtcaccaacataatgcataccttctctgttctcagtcagtttgaatcaggaagagttgagattcttaagtttggtggccttgccgatggcattgtgcattgcacagaacttgagtttgttccctcagctgtggatgctgcgctgctgacagctgcgaatgttttggtttcatctgagttgcaaaatgctctgctcagggctggatttttatggtatgtgctacccctgctgcttcaatacgattcgacagcagaagagaatgagacatgtgaagcacatggtgttggggcaagggtgcagattgccaaaaatctgcatgctgttcatgcaactcaagctttgtctaagctttgtggtctcagtggcgatgatatcctgtacccagataacaaacctgcatacaatgcactgaaggctcttcttactccaaagcttgctgacatgctgagaaaccacccacctaaagagttattatcaaatctaaattcaaatttggaatcaccagagatcatatggaattcatccaccagaggggagcttctcaaatttgttgaccagcagcgtgctagtcaaggccctgatggttcatatgatttgacagaatcacattctttcacctatgaagctttatctaaagaattgaacgttggtaatgtatacttgagagtttacaacaaccaaccggattttgaaataagtgaccaggaggaattttgcattgccctgcttaagtttatagtagagttagtactacagtggaattccattaatttggagacgattcatcaacatggttcagttactgaagcatctatgtctggaaatgatgaagtcagtgattcaactattgaaggaaaaatggataattcatcaggaaaacaaagtacagatggagattctgaagttattataaacctccaaagtggactaacatcacttcagaatcttcttacaagtaatccaggcttagctgctgtttttgcttccaaggagcgtctgattcctctttttgaatgccttgcactgcatgttccttctgaaagcaccagcccacaaatctgtttaagtgttctttctctgttgactaagcatgcttcttgtttggaggctatggttgcagaaaggatgagcctgattttgctatttcagatactccactgcaatcccccttgcagggacggagctcttgctgtactgtattctttagccagcacaccagagcttgcctgggcagctgccaagcatggtggtgttgtttacattcttgaacttatgttgccacttcaagaggaaatccctgtgcagcaaagagctgtagctgcatctttattgggcaaacttgttgggcaaccaatgcatggccccagggtagcaatcacccttgccaggttcctgcctgatggtttggtttctgccattaaagatggacctggtgaagcggttgtttcttctcttgagctgacaactgaaactcctgaactagtatggacacccgcaatggcagcttctctttctgcacagttggcaacaatggcatcagacctctatcaagagcagatgaaaggacgtgttgttgattgggatgtacctgaacaagcttccggacaacatgtaatgaaggatgaaccacaggttggtggaatttatgtaagactttttcttaaggatcccaagtttccactgagaaaccctaaaagattccttgaagggctcctagatcagtatgtctcctctgttgctgctacacatcatgaagcaattgctacagatccagagcttcctttgctactgtccgcggcattggtttccttactacgagttcatccagtgcttgctgaccatgttggctacctcggttatgttccaaagcttgttgcagctatggcttatgagggacaaagggaaactatggcatctgggcaggcttccagtggatcgcaggcagaacctggtgaacatgacaattcatctcactctgaggccactgtgcagactccacaagaacgtgtccgccttagttgtttgcgtgttctgcatcagcttgcgtctagcacaacctgtgcagaagctatggcatcaacaagtgcaggaactcctcaggtcataccactgcttatgaaagcaattggatggcaaggtggaagtatactggcattggagacattaaagcgtgtagtcggtgctggtaatcgggctcgtgatgctcttgttgcacaggggcttaaggttggtcttgttgaagtgctccttggtattcttgactggcgtgctggtggaagacagggactccgtaataaaatgaagtggaacgaatcagaggcttcaattgggcgtgttttggctgtggaggtgcttcatgcttttgcaaccgaaggtgcacactgtgctagagttcgtgaagtcctgaattcctctgatgtatggagtgcttacaaagaccagaagcacgaccttttccttccatccagtgcacaatcttctgctgctggagttgctgggctcattgagagctcgtcaagattcacttacgccctcgccgcaccgccatcttcttctctctctccaccatcagctccagcaaaccctagtggacggcaatattatcagcattcgtagtggaaaacgaaacacttaatctctgctccttggagtatgaccatgaaggcaccaccatggtaacgatttgtagagtgaggccaccttgagtgggcttgttactgtcaccaaatacagctcgtgtctccattcccaccaatgagcagctgatcagttgcccgcatttcagtacatagcatagcatagcataccattgtacagttttccattacataagggtcggggtcggttttgtgtgtgtgttttttttttgtaaagcatatgattttttttgggtaccatagatgtccatagaatacgcgagctgaatattgtatccattcattactgggttgatgcactcccttgttcggatcacacgacttacttgtgacgagagaaataaatgttttttttgcctttgtttgatgagcattttctggtgtcagttaaccttttacagtcatattgtcgtgtatgaccaccgagtgtgtgtaggttttatatagcctgtccgtcactacttttggttagagtttgctatttcatttgtaatgaagttgtttgctgacacctttgcgtgtaacaaaagaaaagcacacaaaaaataacatgctccctcagcctcggtgacacgatgcgtgacatacaaaaaaaacaaaatcctgctgcttcacatatagcctgtccgtcacaacttgtgggtagagtttgctatttcatctgtaatgaaagttttgcgtgtaacaaaagaaaagcacacaaaaaataacat

SEQ ID NO: 80620 - DNA, 1908 bp, Zea Mays
ctacaaaaagaggagacgcgcgcacgcaaacccggaggccgggaggcggagggcagaggcagcaccgtcccgtccacctgaccacctccaccattttttcctcttcctcctcgcctccaccccttcccttccatctcttctcacctggccactcctctccctctctcccgcgccgatcgattggcccacccatcgatcgagcacgggaagaagattccagtccggagaggtctcaattcgatcgggctcgttctggtgtgggtgggcaccatggcggccacagaggcctcggcagacaagaacgccgtcttccgcaagcttcgcaccaaatcagacaacaagatgtgcttcgattgtaacgccaagaacccgacgtgggcgtccgtcacctacggtgtcttcctctgcatcgactgctcggcggtgcaccgcagcctcggcgtccacgtctccttcgtcagttgcacatcgaatgactgaatcaatactgaaaaacagctacaatatgcaggtcaacaaatttggattcatggactccagaacagctgaaaatgatggtctatggaggaaacaaccgtgcacaagctttctttaagcagcatggttggacagatggtggaaaaattgaagcaaagtatacttcaagagcagctgacttgtaccggcagttgcttgctaaagaggtcgctaaaagcgccactgaagatggcaacaatagttggccatcttcaccagttgcagcttcccaggcttcggatcaaactgctgcgtttccagatcttaagctgacagaggtatcaaaagaaaatgtaagtgaaaaggaagactctgagattgttcgttcgcctagagttccaacccgttctatcaagaagccgattggtgctaaaaagcctggaaataagaccggcggacttggtgcacggaagcttacatcaaagccaaatgaaagcctgtatgagcagaagcccgaagaaacagctcctgtcctgccatcatcggtgattgcaagtactacagctaggagcaaaccccatacttcccgatttgagtatgtagaaaatgcacctgctcctaagactgggagcagctcagaaggcaatctcatgagtggacatgttgcacccccaaaagtcatcgaacttctttgttgaatttgggatggacagtggatatcacaaaaaatctacatccagttcatccaaagtgcagattgaggaaagcagtgaagcaagacagaaattctcgaatgcaaaatcaatttcatcctctcagttttttggtgatcaggccagtttcgaaaaggacactcaagtctctctccaaaagttttctggttcctctgccatatcaagtgctgatctatttggccatccagcaaacaattctagcgtggatctcagtgcttcagatttgatcaacagaatatcattccaggccactcaagatctgtcttctctcaagaacatggcaggggaaactgggaaaaggttgacatcgatggcatccaacatcatcactgatcttcaggaccgcatcctctaagcttaagttacagcaaagtaaacttttacgttgcttcagtggctggtcccgtcaaccgggtgacaaactggcctgccccgcagatctgtctaggagttcgagttcgtaggcgtctgaaaacttcctggcatatctgtctaggagttcggaagcatctgaaaaaagtgtaagctatatatagagagagagggtggctgagagaagagaacttatagcgaatgctgtacttggctgaagtcatgtatgcatctggagctctaacggaaatgtctttttgccaatggttttatttcggtttgggatctacacatttgctttgtaatgttaattacattagtacatacatgtttccagttatgtgtt

SEQ ID NO: 80621 - DNA, 1372 bp, Zea Mays
aacgagtgtttcttattgaccgcctcgcctctttctttgggatctccgaagttgcctttatgaagccgttggcatctcattctgggcggcggcggccctgaccctgagccggaggaggaggaggaggagggcgtcacggcggcgtacgcggagcggtggccgcggtggctgcagccgctgctgtccgcgcgcttcttcgcgcagtgcaggacgcacagcgactccaaccgcagcggcgaatgcaacatgttctgcctggactgctcggccgccgggggcacgggcacgggcgcgggcgcgctctgctcgctgtgcctggcgcagcacgggcaccgcgaccaccacaccatccagatccggcgctcctcctaccacgacgtcatccgcgtctcggacatccagcgcttcatggacatcgccggcgtgcagacctacgtcatcaacagcgcccgcgtcgtcttcctcaacgagcggccgcagcagcagaagccgggtggcggcaaggccgcgtcgtcgtcgtcggcctccgccaacctctgcgaggtctgcgcccgcagcctcctcgacaacttccgcttctgctccctcggctgcaaggtcgtcggctgctcccccgacgccgccaaggccaggaactggctcctccgggccgccgacggcgacggttccaccacatcctcctcggccccgcgcaacgccgacaggaagctgagcttcacgccgcccacgccgcagccgaccctgccgacgaagcgccgcaagggcatcccgcaccgcgccccgttcggcagcctcatcgtcgagtactagaatctccttctcccccagccatcgctgtccacgtccgttgcttctgcattggcagttggcactacacgcgcgcggtagagtggaagtactcttcaaacgacggaatggaatcgcacagtgagccagtgaatccagattacaggcaagccaataggttggccaccacttgggtggcctggcccgcctttctttgccacggcacttcggttggtgggtgcttatcgaggtggatgccatttgctcgctggcttcgctttccagaaaggggagggaggagaaaggaaggtggatggattggatcggacatcggaggaagaatcaaaaccagcttttcatcactgttcacgagatatatgtttctttctgtctgagaaatacatgtaaattttatgtcttgctctgctccaaatcatcgtagcggagcagtatagctagcttttgtgatgcttttaccagattgtattgttataggttgtctgaagaaacgagataaccaacgcacagtgcttgtgtgttcatctcatctcatcatctgtaataatcatgcactggcattgcatag

SEQ ID NO: 80622 - DNA, 245 bp, Zea Mays
ggagatttgaacgcaccttcaattcagttgatagttttgctgagatagtggacgaagaaaaatgccagtccacgaaccctatccatccgccgtcctcgacgagcaggtccaccagatgcttcacaactcgcgtgccgagctcgacgccccatcagcagcttcctctctccagggtgtagccatttgcctcttaatgaggtttcagcttcagaattggtggtgccattttctcatggacaacccaa

SEQ ID NO: 80623 - DNA, 2080 bp, Zea Mays
gttgtggagtctgctgaagaacgagttggagtctgggagacgtttagacaaacacaagcaaattttttttcaatcccgcagagggcaaaaccgtccaacgagacaaccccgcgcagaggcaaaagccccacgcttgagagtgagaagaaacagacgcatcgcttccttgtccatcctacctccccttccccccgcccaaatcccgtgacggtcgccgcccccgccgtgctctcgcccgcgcgggagacgacgcagcacccccccgcgtaggatccgcggcggtcggcaggatggtggtggccacggaggaaatggtggtctactgctttgacaccctcgtcgcctatttcaccggcgagcggccgccgcctcccgccttcgaggatggaaaccagtaagcctccccgcagcgatcgaaaccgggccgtgttgcccccatatcgaggaggtggttttggatccatttcgatatagggttaggccaattcgtgttagatttgggcaaaaggcggcgccttggtagttttggtttcggctcggctcctgttgcgactgattcgcgatccgatctgattgactgtttgttggtcctggcgattgcggaatcgtgtggtcttagttttcgttgcaaggcagaggcgaagtgaagtattcacacttcaatggccacgtacctcgcctttcgacagttgccagcttcctacctctagcgattgtctgacggagaggacaaggaatctcactgctacacatctgagattatgatttaagtaggacagtcagtttaatcctaaggcattcagattctttgggaagttgggaggttaaacaggatgagctttcgtgttctgactgtgacgcactgatgtttcttattcatactccaggattcagacttttaattgagatcctttcaaccgtgtagtccacattaatttgtatggcttgtaaggcatcattgttctagcatacatgtttttaactcattgggtcaatttttttgtaactttagcccattgtttgtgacctggaagaaggctgccaatggttcagaaccacgcctccggggatgcataggaactctggagtcccgtcagattgtcagcggctttagggactacgccctaactagtgcgctgagggaccgacgctttcccccaatacaatcaaaggaactcccaaccttggagtgcacggtatctatactcactgattatgaaattgcagaggactacctcgactgggagctccagactccaacacaaaacacagtgcgacctatttgcctgaagttgcgggccatgaaggtgaaaatttcctttttcatcgatgcgatgtacacttatcgtttctacagagttctttagtttctagaattattgcaggggataataagaagaaatgagttaagaaaatatgtaatttcatctttctaaatcatcatggaccaaatgcattataatgagcaataacggtaaaataaagagtcaactgatcagtacattccaaatctgtattgaatagtttgtaacttaggcttaatcttttggcaggttggacacatgtagaaactattgattcactcgtgaggaaggcaggttaccagagaatcatcactgagtccttgaggaagaaaatcaaagtcactcgctaccagagcaccctgtacacgatgcactatggtgaatatgttgcgtacctcaagaagaacagaggtgcagccccgtcaattagtggggctcctcctgtagttaatggcttcaagccaagccattgatttatcagtataaaaaaaagctcaaagaacatattactataatttatctgcgagcaatttggggggtgtagtgtaaccaccccccacagttcattgatctagcatcattcccttccaaggaaaaggccaaataggggcgtcatgacaagcgcccagaataataatgccttcctggatggatcatggatgatgcttatgtatcttgaaaacacatgtgcttcaagaagttcaaattgtgtggtgaagttaattgattcgagttggccattcctagttccagtgatttgtctctattcttaactt

SEQ ID NO: 80624 - DNA, 1474 bp, Zea Mays
gttgtggagtctgctgaagaacgagttggagtctgggagacgtttagacaaacacaagcaaattttttttcaatcccgcagagggcaaaaccgtccaacgagacaaccccgcgcagaggcaaaagccccacgcttgagagtgagaagaaacagacgcatcgcttccttgtccatcctacctccccttccccccgcccaaatcccgtgacggtcgccgcccccgccgtgctctcgcccgcgcgggagacgacgcagcacccccccgcgtaggatccgcggcggtcggcaggatggtggtggccacggaggaaatggtggtctactgctttgacaccctcgtcgcctatttcaccggcgagcggccgccgcctcccgccttcgaggatggaaaccaaaggctgccaatggttcagaaccacgcctccggggatgcataggaactctggagtcccgtcagattgtcagcggctttagggactacgccctaactagtgcgctgagggaccgacgctttcccccaatacaatcaaaggaactcccaaccttggagtgcacggtatctatactcactgattatgaaattgcagaggactacctcgactgggaggttggaaagcatggtttaattattgaatttacagctccagactccaacacaaaacacagtgcgacctatttgcctgaagttgcgggccatgaaggtgaaaatttcctttttcatcgatgcgatgtacacttatcgtttctacagagttctttagtttctagaattattgcaggggataataagaagaaatgagttaagaaaatatgtaatttcatctttctaaatcatcatggaccaaatgcattataatgagcaataacggtaaaataaagagtcaactgatcagtacattccaaatctgtattgaatagtttgtaacttaggcttaatcttttggcaggttggacacatgtagaaactattgattcactcgtgaggaaggcaggttaccagagaatcatcactgagtccttgaggaagaaaatcaaagtcactcgctaccagagcaccctgtacacgatgcactatggtgaatatgttgcgtacctcaagaagaacagaggtgcagccccgtcaattagtggggctcctcctgtagttaatggcttcaagccaagccattgatttatcagtataaaaaaaagctcaaagaacatattactataatttatctgcgagcaatttggggggtgtagtgtaaccaccccccacagttcattgatctagcatcattcccttccaaggaaaaggccaaataggggcgtcatgacaagcgcccagaataataatgccttcctggatggatcatggatgatgcttatgtatcttgaaaacacatgtgcttcaagaagttcaaattgtgtggtgaagttaattgattcgagttggccattcctagttccagtgatttgtctctattcttaactt

SEQ ID NO: 80625 - DNA, 1957 bp, Zea Mays
gttgtggagtctgctgaagaacgagttggagtctgggagacgtttagacaaacacaagcaaattttttttcaatcccgcagagggcaaaaccgtccaacgagacaaccccgcgcagaggcaaaagccccacgcttgagagtgagaagaaacagacgcatcgcttccttgtccatcctacctccccttccccccgcccaaatcccgtgacggtcgccgcccccgccgtgctctcgcccgcgcgggagacgacgcagcacccccccgcgtaggatccgcggcggtcggcaggatggtggtggccacggaggaaatggtggtctactgctttgacaccctcgtcgcctatttcaccggcgagcggccgccgcctcccgccttcgaggatggaaaccagtaagcctccccgcagcgatcgaaaccgggccgtgttgcccccatatcgaggaggtggttttggatccatttcgatatagggttaggccaattcgtgttagatttgggcaaaaggcggcgccttggtagttttggtttcggctcggctcctgttgcgactgattcgcgatccgatctgattgactgtttgttggtcctggcgattgcggaatcgtgtggtcttagttttcgttgcaaggcagaggcgaagtgaagtattcacacttcaatggccacgtacctcgcctttcgacagttgccagcttcctacctctagcgattgtctgacggagaggacaaggaatctcactgctacacatctgagattatgatttaagtaggacagtcagtttaatcctaaggcattcagattctttgggaagttgggaggttaaacaggatgagctttcgtgttctgactgtgacgcactgatgtttcttattcatactccaggattcagacttttaattgagatcctttcaaccgtgtagtccacattaatttgtatggcttgtaaggcatcattgttctagcatacatgtttttaactcattgggtcaatttttttgtaactttagcccattgtttgtgacctggaagaaggctgccaatggttcagaaccacgcctccggggatgcataggaactctggagtcccgtcagattgtcagcggctttagggactacgccctaactagtgcgctgagggaccgacgctttcccccaatacaatcaaaggaactcccaaccttggagtgcacggtatctatactcactgattatgaaattgcagaggactacctcgactgggaggttggaaagcatggtttaattattgaatttacagctccagactccaacacaaaacacagtgcgacctatttgcctgaagttgcgggccatgaaggggataataagaagaaatgagttaagaaaatatgtaatttcatctttctaaatcatcatggaccaaatgcattataatgagcaataacggttggacacatgtagaaactattgattcactcgtgaggaaggcaggttaccagagaatcatcactgagtccttgaggaagaaaatcaaagtcactcgctaccagagcaccctgtacacgatgcactatggtgaatatgttgcgtacctcaagaagaacagaggtgcagccccgtcaattagtggggctcctcctgtagttaatggcttcaagccaagccattgatttatcagtataaaaaaaagctcaaagaacatattactataatttatctgcgagcaatttggggggtgtagtgtaaccaccccccacagttcattgatctagcatcattcccttccaaggaaaaggccaaataggggcgtcatgacaagcgcccagaataataatgccttcctggatggatcatggatgatgcttatgtatcttgaaaacacatgtgcttcaagaagttcaaattgtgtggtgaagttaattgattcgagttggccattcctagttccagtgatttgtctctattcttaactt

SEQ ID NO: 80626 - DNA, 610 bp, Zea Mays
ctttcttttccctttccttttatttgctccgcctttattaatttccgtttcccgtaatttcctcctccttttcccagttcccaccttgcttcctctcctcgctttgcttcctctctggctctctctcacatgcctgcctactactccctcaagcaagcaagcaagcaagctgcaagaggtcaggaggagccgtgactgtgagtgagcggcgtctggtgtgaactgtgaagtgaggacttgttggaggaggacggagcgcggagggtcatggcatggtgatggacctgctgctccccctcactttgcccctaggtaccgtacaggcgtgcgcgcgggcatcagtcaccaccccttcctaactcccaccaaatctctctcccctgctttccgctttctcccactgtctctctctctcttgatttttttatctgtcttctagctccagatttcaaaaaattattatctcttgtgagcaacttatagctgactactagctgagactaaggccctgttccaatctcgtgagataaactttagcagcttttttttagctacttttagccatttgtagtctaaacaggagagctaatggtggcaattgaaactaaac

SEQ ID NO: 80627 - DNA, 1255 bp, Zea Mays
ccaccttgcttcctctcctcgctttgcttcctctctggctctctctcacatgcctgcctactactccctcaagcaagcaagcaagcaagctgcaagaggtcaggaggagccgtgactgtgagtgagcggcgtctggtgtgaactgtgaagtgaggacttgttggaggaggacggagcgcggagggtcatggcatggtgatggacctgctgctccccctcactttgcccctaggatgttgcttcaaaaataatgacattctcacagcaaggccctcgcacagtctgcatcctctcggcgaatggcgcgattagcaacgttacgcttcggcagccagccacatctggtggactagttacttatgaggggcgtttcgagataatctcgctgtccggttctttcctgctcgcggaggatggtgacactcgcagcaggactggtggcttgagcgtcgcgctcgcgggatctgacggccgagttcttggagggtgtgtcgctggaatgcttatggctgcaactcctgtccaggtcgtggtggctagttttatcgcagaggggaagaaatctaagccagccgaagcgcggaaggtcgaaccgatggctgctcccccgccgccgccgccacagatggctgccttcgtgccggctccggtggccaccagccctccgtcggaggggacgtccagcgcgtcgtctgatgactccggcagcccgatcaaccacggtgcgatgccgttcagccactccagtcagcaccagcaccctcaccagcaccagcagcacatgccgcctgcctacgcgtccgggggctggtccctctcggtgcaccagcagaacaggcatgattctgacatgaagatgatgtcgaactaacaggcgccccattcgttggtgtttgggctggagaggaaggaaaggaacctgctgatggttaggttggtactgctgctatgaaacggtcctcttgcgcgtcgtctgtgctctggtcagtgacgacgtgtcgatctgctacttaagctaagctagctaggagagttagggttcatggtctcaccccccgctgttgtgcccctgagtaagattaatttaatttgaattagtcgctctcataatgctgcgagttgtgatggtttcctgatcagatcttcaccttctaggctagttaaaatatcatttctctagtactatggatcatggatttacttggatacttgggtttaattcaggaatttgatcgtattctgtgttgttttgctc

SEQ ID NO: 80628 - DNA, 2113 bp, Zea Mays
cttgcttcctctcctcgctttgcttcctctctggctctctctcacatgcctgcctactactccctcaagcaagcaagcaagcaagctgcaagaggtcaggaggagccgtgactgtgagtgagcggcgtctggtgtgaactgtgaagtgaggacttgttggaggaggacggagcgcggagggtcatggcatggtgatggacctgctgctccccctcactttgcccctagtgctctaggcagccttagctagcctcgcagtcctgggaggaggagaaggacaaggtctctgatcagctccagcttgtctggtcaaagctgaggagcctgcttgggctgcctgtgagtccaagctcgacaggaccactgccactgtgaagcacagcggcagcggcgacgagacgaggacgcggaagctgccaagcggatagatctacgcaaaatggagaccaaggacgtgtcgccgcttgccgccgccgccgcggcgcccgtgcttgcaccggcctctcagcagcagcagcagcagccgccccagccgcagcagcaccaccaccagccaccgcagccgcagcatcagcaccagcaccagccgccgccgccgccgttcccgcagcaggcggccccggcggcggcctcgtcgcccgccgcgtccatgcccggcggcatgcgcctctcgttcgaccatatgcccgggaaggcgcccggggagcagcaccaccaccaccaccacgcggcgccgcccatgctgtacgcggcgccaccgcagggcgcgggtgcgccggggggcagtgtgctcggcatgggcgaactgatgcgcaagaagcgcgggcggccgcgcaagtacgcgcccgacgggagcatggctctggcgctggcccccatctcttccgcctcggccggcggcggcggcggcgccgcagcccccgggcagcagcagcagcacggcgggttctccatcggtagccccccgtccgaccccagcgccaagcgccgcggccggccccccggctccggcaagaagaagcagttcgaggccctgggttcttggggcatcgctttcacccctcacatcctcgccgtcaaggcaggcgaggatgttgcttcaaaaataatgacattctcacagcaaggccctcgcacagtctgcatcctctcggcgaatggcgcgattagcaacgttacgcttcggcagccagccacatctggtggactagttacttatgaggggcgtttcgagataatctcgctgtccggttctttcctgctcgcggaggatggtgacactcgcagcaggactggtggcttgagcgtcgcgctcgcgggatctgacggccgagttcttggagggtgtgtcgctggaatgcttatggctgcaactcctgtccaggtcgtggtggctagttttatcgcagaggggaagaaatctaagccagccgaagcgcggaaggtcgaaccgatggctgctcccccgccgccgccgccacagatggctgccttcgtgccggctccggtggccaccagccctccgtcggaggggacgtccagcgcgtcgtctgatgactccggcagcccgatcaaccacggtgcgatgccgttcagccactccagtcagcaccagcaccctcaccagcaccagcagcacatgccgcctgcctacgcgtccgggggctggtccctctcggtgcaccagcagaacaggcatgattctgacatgaagatgatgtcgaactaacaggcgccccattcgttggtgtttgggctggagaggaaggaaaggaacctgctgatggttaggttggtactgctgctatgaaacggtcctcttgcgcgtcgtctgtgctctggtcagtgacgacgtgtcgatctgctacttaagctaagctagctaggagagttagggttcatggtctcaccccccgctgttgtgcccctgagtaagattaatttaatttgaattagtcgctctcataatgctgcgagttgtgatggtttcctgatcagatcttcaccttctaggctagttaaaatatcatttctctagtactatggatcatggatttacttggatacttgggtttaattcaggaatttgatcgtattctgtgttgttttgctc

SEQ ID NO: 80629 - DNA, 1304 bp, Zea Mays
caggttgtgagctcgcgtggcgtgggtgttcgtcagacagactcccagcacggctgacacatgaccggggccactgtcagtggtagcaagccggtactagtgggtgatgccctcggtgtcattccggaatctgactgatagtctgtctggtgctgccagtaccagcctctgaaccctgtggtgtacgatgagggactccaggcagctggcgccttttggttgtgcagacttcactcttgaggcttgagtgagggtgcatatgctggtcaaattactccgtggatgttgcttcaaaaataatgacattctcacagcaaggccctcgcacagtctgcatcctctcggcgaatggcgcgattagcaacgttacgcttcggcagccagccacatctggtggactagttacttatgaggggcgtttcgagataatctcgctgtccggttctttcctgctcgcggaggatggtgacactcgcagcaggactggtggcttgagcgtcgcgctcgcgggatctgacggccgagttcttggagggtgtgtcgctggaatgcttatggctgcaactcctgtccaggtcgtggtggctagttttatcgcagaggggaagaaatctaagccagccgaagcgcggaaggtcgaaccgatggctgctcccccgccgccgccgccacagatggctgccttcgtgccggctccggtggccaccagccctccgtcggaggggacgtccagcgcgtcgtctgatgactccggcagcccgatcaaccacggtgcgatgccgttcagccactccagtcagcaccagcaccctcaccagcaccagcagcacatgccgcctgcctacgcgtccgggggctggtccctctcggtgcaccagcagaacaggcatgattctgacatgaagatgatgtcgaactaacaggcgccccattcgttggtgtttgggctggagaggaaggaaaggaacctgctgatggttaggttggtactgctgctatgaaacggtcctcttgcgcgtcgtctgtgctctggtcagtgacgacgtgtcgatctgctacttaagctaagctagctaggagagttagggttcatggtctcaccccccgctgttgtgcccctgagtaagattaatttaatttgaattagtcgctctcataatgctgcgagttgtgatggtttcctgatcagatcttcaccttctaggctagttaaaatatcatttctctagtactatggatcatggatttacttggatacttgggtttaattcaggaatttgatcgtattctgtgttgttttgctc

SEQ ID NO: 80630 - DNA, 3449 bp, Zea Mays
cgcgtcctacccgggccgctgcctccaccaaaaagcgtaaccgcacaaattccaccgatccccctcgccccggtcaaatcctctagcctccctgtgcccggcggcgagccccatggatccttccgtcgcccggcggcaggaggcggagcggtttatgaacatcgccgagaagctcctgatggcgcgggacctcgagggctgcaagcagttcgtcgcccaagccctttccttcgacccccgcaccccgggcgccgacgacctcctcgccgccgccgatgccctcctcgcggcccagcgtcggcgcctcccgtccgggcccctcgacccctacgccgtccttggcctcgactccgccgtcccggcctcccgcgaccccgacgtcgtgcattcccattaccgccgcctctccctcttgctcaaccgctcccaccccgaccgtccctgctccctcgccttcgccgaagccgcccgcctcgtcgccgacgcttgggccttcctgtcagatcccctccgcaaagcctccctcgactccgacctcgacgccgccgccgctgcaactaacgcagcggcagccgccgccgccgccgccgccgctcgtgtacccatcgatccccatccagagaagcagaatcagctgcagtcacagcctcctccgccgccgccacttgctccgcagccaatgcagactgtgtcaggcacgccgccaccaaagcgcgggcggccgccgcgggctgccaaaacgccggcgacgccgcctgctccgcagaccgtttcgggcacgtcgccaacaaagcgcggccggccgccgcgggctgccaaacaatcgcctgaggttgaacggaaccaggagggggaagctcaacaggcgccagtcttctggacagcttgtccctcctgctgccatttacaccagtacgaccactcctacgagtcgcaaacgctgctttgccctagctgccgccggccgtttgttgccactgcaatgtccacgcagccgcccatcgtgccaggcacagacatgtattactgctcctgggggttcttcccaatgggtttccctggtggtcctgcattcgctgaaccactcaattccccgcagcagcaggcacctgctgctctaggattttatccaatggggccatacttgccattaccaagcctaagtggcattgtggaaggggaaggcaataaggcagttgatgctggcactggcattcctgtcatcccaacagtggcagcaccagcatcagcatcatcgccagcgccgacagcggcaacaccagtggagttcttacatgtgaaggttggggcaaagaagcgagggcggcccaaaggcagcaagaacaaaaaagctgtggttgaggtaaattagggctatggaatgacacatgtgaaggttggggcaaagaagcgaggatgccctgactgcctgaaggcagcaagaacaagaaagtggtgattgagatcgattagggctatggcatgctgatcgctgcatcattcgacatctgcatcagttgtaaactacattgtgtatgtgtatgtgtatggttcttttcttgcttgcagatgacttgggcactgtaagatggtcgagggttagagcttcacctcgatagttggtcaagaatcagagcttcaccattcatgaattttggtgactaggtttttctccttacttccatagcgaagtttaccatagtagtcagttcaggtgagatctgttttttgtttgtatcatcccattagatgggtgagatgtttcatattgtagggtggcagctgctcaagtgcccattatgctgtctgcaacttgtaaagattaggagatggataataagctatgtgaatgcacattaattataaacactcagtgtgaaactgttgaaattgccaactttgcttcggcaatttggaatagtttgtcacacctcttgacttgtcgcctcaacgcgggcacaggcacagctgttgcttatctgcctaatgtgccggagtcattgccatggcacatggtactgtgatgggcagagcaagtggtgggtgcatgcacgaggagctggtgatggcagaggggatcttatgcaccatggatggtgagttgtctatgcatggcagacctacggtgagcggctctggtacagtggtctctggcggccgaacatcaggccttgtctttttggttgtgtagaaattagggcttgtttggttagaaggggattgaggggaaactgagctagtttccccctcaatcccctcctaaccaaacaagcccttattgtttttttggcatcctcaggctgttgttgatctgttttgtttgtgcttgtcttgccttgcactgtggattctttagccaacaaacactggcatgacctcagggcctgtcagagttcagcgtatgcaacataggcaagaagactctctgcggtccatgacacagggcaccatgttgtgcctgcccatctcttgcttgctctatcatttgggaatcatgccgctactactgtaccatcttggtttaaaaggaaggctaaagaatttttgactgggcacacagactgacaggcatgagtttctagcaacatcagtaattcagcatgcatgtatgtttgatcagtaggggttacctgtgatttagatgtggttcctgtttaatcgttgtcctacatgaacttggctttgaagaattgtttagacttgatcctaatgtggaatgtttgtacgttagattttttgtgtaaatataagttattgaagcattaagattgaactgttaggcatttaaatgaagaccctcttgatgtcttatgtatggttatgtttttctgattcattatcagtaagattaacataatttggtgatgagggctaaaagcttcgttttttgattttttttttcagaatctaacgtttcatgtgccaatcatgtctgcttctcccaaaacttacttcagagctgatttcaacttgcccccccctgggcaaaggaagagcattttctgctggaggtgatgttgctgcagttgtctgatgtatacataaagttgcactggatgcctccgaggttggaacaagtgcatgacgaagctgttgtagaatatttctccagaattgatgacccacagtgggaagatttggacctacctgccagacgttcccatggaagaaccatcgagtccaagctctgattgaaggtcacgggagaagggtggaacactggaacggagcctcggtagtggtcagtcagaataacacattacacacatcatctcgagtttgaagagtctgcagactgtttgatagaataaacatgaatgtttcatataggtcaaacttttatcacagaagaaactctttcctgtttatacgtgggagtcatatccattttaaaataattataaagaataaaatggaaacaaaaaaagtactggaaagacttcgcagag

SEQ ID NO: 80631 - DNA, 3494 bp, Zea Mays
cgcgtcctacccgggccgctgcctccaccaaaaagcgtaaccgcacaaattccaccgatccccctcgccccggtcaaatcctctagcctccctgtgcccggcggcgagccccatggatccttccgtcgcccggcggcaggaggcggagcggtttatgaacatcgccgagaagctcctgatggcgcgggacctcgagggctgcaagcagttcgtcgcccaagccctttccttcgacccccgcaccccgggcgccgacgacctcctcgccgccgccgatgccctcctcgcggcccagcgtcggcgcctcccgtccgggcccctcgacccctacgccgtccttggcctcgactccgccgtcccggcctcccgcgaccccgacgtcgtgcattcccattaccgccgcctctccctcttgctcaaccgctcccaccccgaccgtccctgctccctcgccttcgccgaagccgcccgcctcgtcgccgacgcttgggccttcctgtcagatcccctccgcaaagcctccctcgactccgacctcgacgccgccgccgctgcaactaacgcagcggcagccgccgccgccgccgccgccgctcgtgtacccatcgatccccatccagagaagcagaatcagctgcagtcacagcctcctccgccgccgccacttgctccgcagccaatgcagactgtgtcaggcacgccgccaccaaagcgcgggcggccgccgcgggctgccaaaacgccggcgacgccgcctgctccgcagaccgtttcgggcacgtcgccaacaaagcgcggccggccgccgcgggctgccaaacaatcgcctgaggttgaacggaaccaggagggggaagctcaacaggcgccagtcttctggacagcttgtccctcctgctgccatttacaccagtacgaccactcctacgagtcgcaaacgctgctttgccctagctgccgccggccgtttgttgccactgcaatgtccacgcagccgcccatcgtgccaggcacagacatgtattactgctcctgggggttcttcccaatgggtttccctggtggtcctgcattcgctgaaccactcaattccccgcagcagcaggcacctgctgctctaggattttatccaatggggccatacttgccattaccaagcctaagtggcattgtggaaggggaaggcaataaggcagttgatgctggcactggcattcctgtcatcccaacagtggcagcaccagcatcagcatcatcgccagcgccgacagcggcaacaccagtggagttcttacatgtgaaggttggggcaaagaagcgagggcggcccaaaggcagcaagaacaaaaaagctgtggttgaggtaaattagggctatggaatgacacatgtgaaggttggggcaaagaagcgaggatgccctgactgcctgaaggcagcaagaacaagaaagtggtgattgagatcgattagggctatggcatgctgatcgctgcatcattcgacatctgcatcagttgtaaactacattgtgtatgtgtatgtgtatggttcttttcttgcttgcagatgacttgggcactgtaagatggtcgagggttagagcttcacctcgatagttggtcaagaatcagagcttcaccattcatgaattttggtgactaggtttttctccttacttccatagcgaagtttaccatagtagtcagttcaggtgagatctgttttttgtttgtatcatcccattagatgggtgagatgtttcatattgtagggtggcagctgctcaagtgcccattatgctgtctgcaacttgtaaagattaggagatggataataagctatgtgaatgcacattaattataaacactcagtgtgaaactgttgaaattgccaactttgcttcggcaatttggaatagtttgtcacacctcttgacttgtcgcctcaacgcgggcacaggcacagctgttgcttatctgcctaatgtgccggagtcattgccatggcacatggtactgtgatgggcagagcaagtggtgggtgcatgcacgaggagctggtgatggcagaggggatcttatgcaccatggatggtgagttgtctatgcatggcagacctacggtgagcggctctggtacagtggtctctggcggccgaacatcaggccttgtctttttggttgtgtagaaattagggcttgtttggttagaaggggattgaggggaaactgagctagtttccccctcaatcccctcctaaccaaacaagcccttattgtttttttggcatcctcaggctgttgttgatctgttttgtttgtgcttgtcttgccttgcactgtggattctttagccaacaaacactggcatgacctcagggcctgtcagagttcagcgtatgcaacataggcaagaagactctctgcggtccatgacacagggcaccatgttgtgcctgcccatctcttgcttgctctatcatttgggaatcatgccgctactactgtaccatcttggtttaaaaggaaggctaaagaatttttgactgggcacacagactgacaggcatgagtttctagcaacatcagtaattcagcatgcatgtatgtttgatcagtaggggttacctgtgatttagatgtggttcctgtttaatcgttgtcctacatgaacttggctttgaagaattgtttagacttgatcctaatgtggaatgtttgtacgttagattttttgtgtaaatataagttattgaagcattaagattgaactgttaggcatttaaatgaagaccctcttgatgtcttatgtatggttatgtttttctgattcattatcagtaagattaacataatttggtgatgagggctaaaagcttcgttttttgattttttttttcagaatctaacgtttcatgtgccaatcatgtctgcttctcccaaaacttacttcagagctgatttcaacttgcccccccctggtttagtttatttctaatttcctccttttagctcttttttatatgggcaaaggaagagcattttctgctggaggtgatgttgctgcagttgtctgatgtatacataaagttgcactggatgcctccgaggttggaacaagtgcatgacgaagctgttgtagaatatttctccagaattgatgacccacagtgggaagatttggacctacctgccagacgttcccatggaagaaccatcgagtccaagctctgattgaaggtcacgggagaagggtggaacactggaacggagcctcggtagtggtcagtcagaataacacattacacacatcatctcgagtttgaagagtctgcagactgtttgatagaataaacatgaatgtttcatataggtcaaacttttatcacagaagaaactctttcctgtttatacgtgggagtcatatccattttaaaataattataaagaataaaatggaaacaaaaaaagtactggaaagacttcgcagag

SEQ ID NO: 80632 - DNA, 2031 bp, Zea Mays
ctgcctccaccaaaaagcgtaaccgcacaaattccaccgatccccctcgccccggtcaaatcctctagcctccctgtgcccggcggcgagccccatggatccttccgtcgcccggcggcaggaggcggagcggtttatgaacatcgccgagaagctcctgatggcgcgggacctcgagggctgcaagcagttcgtcgcccaagccctttccttcgacccccgcaccccgggcgccgacgacctcctcgccgccgccgatgccctcctcgcggcccagcgtcggcgcctcccgtccgggcccctcgacccctacgccgtccttggcctcgactccgccgtcccggcctcccgcgaccccgacgtcgtgcattcccattaccgccgcctctccctcttgctcaaccgctcccaccccgaccgtccctgctccctcgccttcgccgaagccgcccgcctcgtcgccgacgcttgggccttcctgtcagatcccctccgcaaagcctccctcgactccgacctcgacgccgccgccgctgcaactaacgcagcggcagccgccgccgccgccgccgccgctcgtgtacccatcgatccccatccagagaagcagaatcagctgcagtcacagcctcctccgccgccgccacttgctccgcagccaatgcagactgtgtcaggcacgccgccaccaaagcgcgggcggccgccgcgggctgccaaaacgccggcgacgccgcctgctccgcagaccgtttcgggcacgtcgccaacaaagcgcggccggccgccgcgggctgccaaacaatcgcctgaggttgaacggaaccaggagggggaagctcaacaggcgccagtcttctggacagcttgtccctcctgctgccatttacaccagtacgaccactcctacgagtcgcaaacgctgctttgccctagctgccgccggccgtttgttgccactgcaatgtccacgcagccgcccatcgtgccaggcacagacatgtattactgctcctgggggttcttcccaatgggtttccctggtggtcctgcattcgctgaaccactcaattccccgcagcagcaggcacctgctgctctaggattttatccaatggggccatacttgccattaccaagcctaagtggcattgtggaaggggaaggcaataaggcagttgatgctggcactggcattcctgtcatcccaacagtggcagcaccagcatcagcatcatcgccagcgccgacagcggcaacaccagtggagttcttacatgtgaaggttggggcaaagaagcgagggcggcccaaaggcagcaagaacaaaaaagctgtggttgaggtaaattagggctatggaatgacacatgtgaaggttggggcaaagaagcgaggatgccctgactgcctgaaggcagcaagaacaagaaagtggtgattgagatcgattagggctatggcatgctgatcgctgcatcattcgacatctgcatcagttgtaaactacattgtgtatgtgtatgtgtatggttcttttcttgcttgcagatgacttgggcactggcaaaggaagagcattttctgctggaggtgatgttgctgcagttgtctgatgtatacataaagttgcactggatgcctccgaggttggaacaagtgcatgacgaagctgttgtagaatatttctccagaattgatgacccacagtgggaagatttggacctacctgccagacgttcccatggaagaaccatcgagtccaagctctgattgaaggtcacgggagaagggtggaacactggaacggagcctcggtagtggtcagtcagaataacacattacacacatcatctcgagtttgaagagtctgcagactgtttgatagaataaacatgaatgtttcatataggtcaaacttttatcacagaagaaactctttcctgtttatacgtgggagtcatatccattttaaaataattataaagaataaaatggaaacaaaaaaagtactggaaagacttcgcagag

SEQ ID NO: 80633 - DNA, 1895 bp, Zea Mays
gtaaccgcacaaattccaccgatccccctcgccccggtcaaatcctctagcctccctgtgcccggcggcgagccccatggatccttccgtcgcccggcggcaggaggcggagcggtttatgaacatcgccgagaagctcctgatggcgcgggacctcgagggctgcaagcagttcgtcgcccaagccctttccttcgacccccgcaccccgggcgccgacgacctcctcgccgccgccgatgccctcctcgcggcccagcgtcggcgcctcccgtccgggcccctcgacccctacgccgtccttggcctcgactccgccgtcccggcctcccgcgaccccgacgtcgtgcattcccattaccgccgcctctccctcttgctcaaccgctcccaccccgaccgtccctgctccctcgccttcgccgaagccgcccgcctcgtcgccgacgcttgggccttcctgtcagatcccctccgcaaagcctccctcgactccgacctcgacgccgccgccgctgcaactaacgcagcggcagccgccgccgccgccgccgccgctcgtgtacccatcgatccccatccagagaagcagaatcagctgcagtcacagcctcctccgccgccgccacttgctccgcagccaatgcagactgtgtcaggcacgccgccaccaaagcgcgggcggccgccgcgggctgccaaaacgccggcgacgccgcctgctccgcagaccgtttcgggcacgtcgccaacaaagcgcggccggccgccgcgggctgccaaacaatcgcctgaggttgaacggaaccaggagggggaagctcaacaggcgccagtcttctggacagcttgtccctcctgctgccatttacaccagtacgaccactcctacgagtcgcaaacgctgctttgccctagctgccgccggccgtttgttgccactgcaatgtccacgcagccgcccatcgtgccaggcacagacatgtattactgctcctgggggttcttcccaatgggtttccctggtggtcctgcattcgctgaaccactcaattccccgcagcagcaggcacctgctgctctaggattttatccaatggggccatacttgccattaccaagcctaagtggcattgtggaaggggaaggcaataaggcagttgatgctggcactggcattcctgtcatcccaacagtggcagcaccagcatcagcatcatcgccagcgccgacagcggcaacaccagtggagttcttacatgtgaaggttggggcaaagaagcgagggcggcccaaaggcagcaagaacaaaaaagctgtggttgagatgacttgggcactgtaagatggtcgagggttagagcttcacctcgatagttggtcaagaatcagagcttcaccattcatgaattttggtgactaggtttttctccttacttccatagcgaagtttaccatagtagtcagttcaggtgagatctgttttttgtttgtatcatcccattagatgggtgagatgtttcatattgtagggtggcagctgctcaagtgcccattatgctgtctgcaacttgtaaagattaggagatggataataagctatgtgaatgcacattaattataaacactcagtgtgaaactgttgaaattgccaactttgcttcggcaatttggaatagtttgtcacacctcttgacttgtcgcctcaacgcgggcacaggcacagctgttgcttatctgcctaatgtgccggagtcattgccatggcacatggtactgtgatgggcagagcaagtggtgggtgcatgcacgaggagctggtgatggcagaggggatcttatgcaccatggatggtgagttgtctatgcatggcagacctacggtgagcggctct

SEQ ID NO: 80634 - DNA, 2650 bp, Zea Mays
gtaaccgcacaaattccaccgatccccctcgccccggtcaaatcctctagcctccctgtgcccggcggcgagccccatggatccttccgtcgcccggcggcaggaggcggagcggtttatgaacatcgccgagaagctcctgatggcgcgggacctcgagggctgcaagcagttcgtcgcccaagccctttccttcgacccccgcaccccgggcgccgacgacctcctcgccgccgccgatgccctcctcgcggcccagcgtcggcgcctcccgtccgggcccctcgacccctacgccgtccttggcctcgactccgccgtcccggcctcccgcgaccccgacgtcgtgcattcccattaccgccgcctctccctcttgctcaaccgctcccaccccgaccgtccctgctccctcgccttcgccgaagccgcccgcctcgtcgccgacgcttgggccttcctgtcagatcccctccgcaaagcctccctcgactccgacctcgacgccgccgccgctgcaactaacgcagcggcagccgccgccgccgccgccgccgctcgtgtacccatcgatccccatccagagaagcagaatcagctgcagtcacagcctcctccgccgccgccacttgctccgcagccaatgcagactgtgtcaggcacgccgccaccaaagcgcgggcggccgccgcgggctgccaaaacgccggcgacgccgcctgctccgcagaccgtttcgggcacgtcgccaacaaagcgcggccggccgccgcgggctgccaaacaatcgcctgaggttgaacggaaccaggagggggaagctcaacaggcgccagtcttctggacagcttgtccctcctgctgccatttacaccagtacgaccactcctacgagtcgcaaacgctgctttgccctagctgccgccggccgtttgttgccactgcaatgtccacgcagccgcccatcgtgccaggcacagacatgtattactgctcctgggggttcttcccaatgggtttccctggtggtcctgcattcgctgaaccactcaattccccgcagcagcaggcacctgctgctctaggattttatccaatggggccatacttgccattaccaagcctaagtggcattgtggaaggggaaggcaataaggcagttgatgctggcactggcattcctgtcatcccaacagtggcagcaccagcatcagcatcatcgccagcgccgacagcggcaacaccagtggagttcttacatgtgaaggttggggcaaagaagcgagggcggcccaaaggcagcaagaacaaaaaagctgtggttgaggtaaattagggctatggaatgacacatgtgaaggttggggcaaagaagcgaggatgccctgactgcctgaaggcagcaagaacaagaaagtggtgattgagatcgattagggctatggcatgctgatcgctgcatcattcgacatctgcatcagttgtaaactacattgtgtatgtgtatgtgtatggttcttttcttgcttgcagatgacttgggcactgtaagatggtcgagggttagagcttcacctcgatagttggtcaagaatcagagcttcaccattcatgaattttggtgactaggtttttctccttacttccatagcgaagtttaccatagtagtcagttcaggtgagatctgttttttgtttgtatcatcccattagatgggtgagatgtttcatattgtagggtggcagctgctcaagtgcccattatgctgtctgcaacttgtaaagattaggagatggataataagctatgtgaatgcacattaattataaacactcagtgtgaaactgttgaaattgccaactttgcttcggcaatttggaatagtttgtcacacctcttgacttgtcgcctcaacgcgggcacaggcacagctgttgcttatctgcctaatgtgccggagtcattgccatggcacatggtactgtgatgggcagagcaagtggtgggtgcatgcacgaggagctggtgatggcagaggggatcttatgcaccatggatgaatctaacgtttcatgtgccaatcatgtctgcttctcccaaaacttacttcagagctgatttcaacttgcccccccctggtttagtttatttctaatttcctccttttagctcttttttatatgggcaaaggaagagcattttctgctggaggtgatgttgctgcagttgtctgatgtatacataaagttgcactggatgcctccgaggttggaacaagtgcatgacgaagctgttgtagaatatttctccagaattgatgacccacagtgggaagatttggacctacctgccagacgttcccatggaagaaccatcgagtccaagctctgattgaaggtcacgggagaagggtggaacactggaacggagcctcggtagtggtcagtcagaataacacattacacacatcatctcgagtttgaagagtctgcagactgtttgatagaataaacatgaatgtttcatataggtcaaacttttatcacagaagaaactctttcctgtttatacgtgggagtcatatccattttaaaataattataaagaataaaatggaaacaaaaaaagtactggaaagacttcgcagag

SEQ ID NO: 80635 - DNA, 426 bp, Zea Mays
tgccagtagcaaagaaaaccaaagttgcactggatgcctccgaggttggaacaagtgcatgacgaagctgttgtagaatatttctccagaattgatgacccacagtgggaagatttggacctacctgccagacgttcccatggaagaaccatcgagtccaagctctgattgaaggtcacgggagaagggtggaacactggaacggagcctcggtagtggtcagtcagaataacacattacacacatcatctcgagtttgaagagtctgcagactgtttgatagaataaacatgaatgtttcatataggtcaaacttttatcacagaagaaactctttcctgtttatacgtgggagtcatatccattttaaaataattataaagaataaaatggaaacaaaaaaagtactggaaagacttcgcagag

SEQ ID NO: 80636 - DNA, 2018 bp, Zea Mays
cgccttgtgttggcggccgtaggccgtagggcgagctcccaggtcgacgtggcggggatggctgcgacggccggcggtggcggtggtggaggggctaaggcggcagtgaccgagcagatagcacaagcagtgcggtccacctccaacctcctccagctgatggagcagtcctcccccgctcaggtctcccgccttctgcccccatctcgtcttgtttgggtctagagtgttccgattgtaagcatgattttacagccgtttgctgatcacaagaatcaacgcttttccaaatttgtgcgaaattgacttaatttatgcggtagttcgtgatgtctccctttactctttagattagagacagtatggttaggattttggatggatttacttttgtcttgaaggtgaaatgattgtccaattcatgaatgttattatcttcatcctatactacataacctagaagttattcttttggagtttggcgggttcttcttgcccttgagcctgcgagcgagcagtaggtagttttttttggtcgaggtcattgttttgctgtatacaaagactcaaagagcgcccaaatgtaagggttattgccccctttttttcttaatataaaatttagcagctctcttgagtgctcgatagaagtaaccgctctcctgagtgctcgatagaagtaaccgagaatctgtaggcattcgactgtcattgattaagcagtgcgctttgattgtcatctagcaacttccacaatgctgcgctgaagtgtccattgtgcagcatggtgttacggctttagatggatcctctacttcaggctacaattaccaacatgccaattcacttatttaaggagtgctactaagtttatgagtcgttttatagtttagttttgtattttcagctctacccacctctatctctcaacccctttctgattctttctgattttttcctcatataattcaataaaggttcagacagttcaatgaactgtgccatactttctttcgattaataactttatgaaactgtgtccacaacatacatgctgtgatgttatgatcttacattgttgttacaagtacaagcggtcagctagggggtgtttggtttgaagaatcaatccattgcatcacgagtccatttcacaaatttagtggaatgagctcattcctcatattattactaactattagcttatgaggaatggaatggtgatagatgaactcattccattccacaagtgaggagtgagaagatgatggactacctcatttctcaaaccaaacacgctattagttaaccaagataatcaacatagatgtacttgtggtcacaggttcatttggcaaaactaccgaagaacctgctggaaaaagcatcctttgcaaagaacacagagcatgtgctgcaccagctacctcaagtaatatcatccttggatgcttatatggacaggagtttgcaaagtgcctctcaaattaagactgttacacagctcttgtcaaacatggagaacactcagctgaggtacatgttgccttcctctcaaaagaagaaagatcaaaagagtactgaaccttaagaattcagagtcgactgatgtgttcaccgagacataatggaaggatatgttcttgccgttttgtgctaaagaaatttgagttttgtggctctcaagagatggcttggctttatctggtgtaaggatccatcgttgtctactgtctgtcccacatttgctgagttcggttgggggacgctgttaatggaaatattcttctttcttcaaaccatttacgggtgcctaggacctgtatcataaggcaagcatgcctgttagttgtcacacattctggtctatgaacacgttgctttcttgtaattgcattggttgttttagcagtaaattatggtagaaattatgaagtgatcaaagtgtttaacgtggcactgatctttgtacttcaattgcatgcataccctatgcagtgatgaggcggagatttttg

SEQ ID NO: 80637 - DNA, 725 bp, Zea Mays
cgccttgtgttggcggccgtaggccgtagggcgagctcccaggtcgacgtggcggggatggctgcgacggccggcggtggcggtggtggaggggctaaggcggcagtgaccgagcagatagcacaagcagtgcggtccacctccaacctcctccagctgatggagcagtcctcccccgctcagtgcctctcaaattaagactgttacacagctcttgtcaaacatggagaacactcagctgaggtacatgttgccttcctctcaaaagaagaaagatcaaaagagtactgaaccttaagaattcagagtcgactgatgtgttcaccgagacataatggaaggatatgttcttgccgttttgtgctaaagaaatttgagttttgtggctctcaagagatggcttggctttatctggtgtaaggatccatcgttgtctactgtctgtcccacatttgctgagttcggttgggggacgctgttaatggaaatattcttctttcttcaaaccatttacgggtgcctaggacctgtatcataaggcaagcatgcctgttagttgtcacacattctggtctatgaacacgttgctttcttgtaattgcattggttgttttagcagtaaattatggtagaaattatgaagtgatcaaagtgtttaacgtggcactgatctttgtacttcaattgcatgcataccctatgcagtgatgaggcggagatttttg

SEQ ID NO: 80638 - DNA, 1107 bp, Zea Mays
acatttcctcggtccagcaggagccagcgtatacctgagagacggaaggcgcctgtgtcgtgcgctgccggagacgggatcactccgcagcgacttcaccagctgcggcagagcccccagggccttctgcccccaagccgccgccatcgcctccctcccgcttcgcccgtcggtcggctcctcggcaggggcggtcgttctagaggggtcgggaaattttgcataacggaaattcgaacgggtcccacttgacgattggaaattcggccctgcggttggttgggcctttggttatttgtttacacacattttcaactctgtactgggcgtaggccgtaggccgtagggcgagctcccaggtcgacgtggcggggatggctgcgacggccggcggtggcggtggtggaggggctaaggcggcagtgaccgagcagatagcacaagcagtgcggtccacctccaacctcctccagctgatggagcagtcctcccccgctcaggtgctgcaccagctacctcaagtaatatcatccttggatgcttatatggacaggagtttgcaaagtgcctctcaaattaagactgttacacagctcttgtcaaacatggagaacactcagctgaggtacatgttgccttcctctcaaaagaagaaagatcaaaagagtactgaaccttaagaattcagagtcgactgatgtgttcaccgagacataatggaaggatatgttcttgccgttttgtgctaaagaaatttgagttttgtggctctcaagagatggcttggctttatctggtgtaaggatccatcgttgtctactgtctgtcccacatttgctgagttcggttgggggacgctgttaatggaaatattcttctttcttcaaaccatttacgggtgcctaggacctgtatcataaggcaagcatgcctgttagttgtcacacattctggtctatgaacacgttgctttcttgtaattgcattggttgttttagcagtaaattatggtagaaattatgaagtgatcaaagtgtttaacgtggcactgatctttgtacttcaattgcatgcataccctatgcagtgatgaggcggagatttttg

SEQ ID NO: 80639 - DNA, 1173 bp, Zea Mays
acatttcctcggtccagcaggagccagcgtatacctgagagacggaaggcgcctgtgtcgtgcgctgccggagacgggatcactccgcagcgacttcaccagctgcggcagagcccccagggccttctgcccccaagccgccgccatcgcctccctcccgcttcgcccgtcggtcggctcctcggcaggggcggtcgttctagaggggtcgggaaattttgcataacggaaattcgaacgggtcccacttgacgattggaaattcggccctgcggttggttgggcctttggttatttgtttacacacattttcaactctgtactgggcgtaggccgtaggccgtagggcgagctcccaggtcgacgtggcggggatggctgcgacggccggcggtggcggtggtggaggggctaaggcggcagtgaccgagcagatagcacaagcagtgcggtccacctccaacctcctccagctgatggagcagtcctcccccgctcaggttcatttggcaaaactaccgaagaacctgctggaaaaagcatcctttgcaaagaacacagagcatgtgctgcaccagctacctcaagtaatatcatccttggatgcttatatggacaggagtttgcaaagtgcctctcaaattaagactgttacacagctcttgtcaaacatggagaacactcagctgaggtacatgttgccttcctctcaaaagaagaaagatcaaaagagtactgaaccttaagaattcagagtcgactgatgtgttcaccgagacataatggaaggatatgttcttgccgttttgtgctaaagaaatttgagttttgtggctctcaagagatggcttggctttatctggtgtaaggatccatcgttgtctactgtctgtcccacatttgctgagttcggttgggggacgctgttaatggaaatattcttctttcttcaaaccatttacgggtgcctaggacctgtatcataaggcaagcatgcctgttagttgtcacacattctggtctatgaacacgttgctttcttgtaattgcattggttgttttagcagtaaattatggtagaaattatgaagtgatcaaagtgtttaacgtggcactgatctttgtacttcaattgcatgcataccctatgcagtgatgaggcggagatttttg

SEQ ID NO: 80640 - DNA, 384 bp, Zea Mays
gggaaacaagtggcgtcttctgattagactagaccagttggttactaacaatcaaacaattggtatcgagatgtcaaaggcagtcacctttagtgggatcgatactgttcttttagtctattcaattcagtagcagtctaatcagaagacgccacttgtttccctcgcttcaacggcgctgtcacgggttcagacgtgtttctatttttcttcttttccagccttacttttgattaaactaattatttgtttctggtcttcgttacgtgtactttctcgctcctacaatttttttcgcgtgtgccatatgtgttcccggaaaagtttcctgtccctttcgggtactccggatggttcccattttttttctttcataaaagttct

SEQ ID NO: 80641 - DNA, 2249 bp, Zea Mays
aggcagcactaaaacatttctctgcctaactacttccctgtacgtggacgaggaccaaggagacagagagaaagcctggccgcgccgcccaccgtcgcctcgtcagtcgcctcctccatcctccctccccatcgacttcccaaatcccagccaggtaattcttggagctcgtctttccggttgtctcctctttcctgtgcatcctgctgctccgaaaatctctcagatctcctcgtcctctggcccattctcttcatctccatgcatggatgaacaagagacggagggagacagatgcaaacatcgagactggggttgttatctgtctttgtagcagaagaaacagtcctaaaaaagaatggagagctcctcagataggagcaacgtttctcaggggaaccacctgggttatgcgagaagcacatccatggattccactggtcctcagttagctggtaggtctagctcaatgttgagtaggagaagtagcagacagggctcaaggggatccatcagcctctcaagggagatgggggactccatactgagctcaatgaggcattctcttcagtcggcggatcaattgctaggagacatcgatagctcagttctggctcaactcatcgaaagtggtcgagttctatcacccgaaggcgatgttgatgaggatacagtaagaatctctgaacatcataaggttggccctgttccagatgatgcaataaagcaaaccagtgacaattttgcatcagcacctatatcttcagcggagacaaaagacactatttctaacgtcctagcagattcatctactaaggttgaaccatataagctttctctgaggctagactatgctgcttacatgatccatttagctgtctttggctttttcggggtattcacaaggtatgggctccaaaagctgtttggcccagactgtttggcactcacttcagatcaaagcccactttaccctgatcttccatctaatatggctgatatacgatacatatctgaccatcttattgtcggaatcacaactggatacatgggaagccttacaaccttcagtgggtggaaccagaaaatggttggtttgtcttccaaaggccattgggtatatgctatagcgggcgtagtactagggatgttcattgtcaacgagtccattacggttggtgctgagacgggcgagcgcctacggagtttgatcctgaaatacatcagggagaagagtttgataggtcacaagtatgattgggagcactggagggtgaataccagggctaagcagtcagtgcttttgtcagtgatgataattttgatgtctttcttttggattttgagcattgtgctgactgtagtaaagatgcatagtcttgctgatggtgctgtcctatggatgggctgctcggtagcacctccaggtgtttggttacgctggtacctggcaaggctcaatggccagggaattggcaaacagagatccttgaaatggctgcccactgggactctggtagccaatgttcttgctgcaggcataatggcagttcttgctgtaacatccaaagcggtagatacaaagcgatcaacaactattcttagtggaatacagctcggcttccttggttgcctaagcacagtgtctacttttgctgctgaagtgtatacaatgagaagaagcgggcagattgccagggcctttgtttatgccgcatccaccttcctgctttcttttctgctaggaactctagtgtattctgtgccagtttgggaaaagcattataaatgacctattgcaacttccagattcaacattttaccagatggcttaaatgtgcaatgggaaagagagcatcaacttcctgaacaaagtacaagatacagagccaagacctcaaaggttcacagatgcaaaagagagcatcaacacaaacgtttgcagaatggacccacagaaccatctatatacctggctgggaaaaacagagtaaactttgcttagtagaatatgtagtggcgtggaataatttttgtcttggagaatggagtacatgtatgtatctgtgaactagatgtatcattaatgcatgagatatgcatagatgaatttaattagtgtgggattagctccactttattctcatgctgtctcatgtaaatgcaggacatctagaaatgtttttcttgttactaagacatattggcttaattagtttttgaataaaacatttccttttgacagtgtg

SEQ ID NO: 80642 - DNA, 2157 bp, Zea Mays
aggcagcactaaaacatttctctgcctaactacttccctgtacgtggacgaggaccaaggagacagagagaaagcctggccgcgccgcccaccgtcgcctcgtcagtcgcctcctccatcctccctccccatcgacttcccaaatcccagccagggttgttatctgtctttgtagcagaagaaacagtcctaaaaaagaatggagagctcctcagataggagcaacgtttctcaggggaaccacctgggttatgcgagaagcacatccatggattccactggtcctcagttagctggtaggtctagctcaatgttgagtaggagaagtagcagacagggctcaaggggatccatcagcctctcaagggagatgggggactccatactgagctcaatgaggcattctcttcagtcggcggatcaattgctaggagacatcgatagctcagttctggctcaactcatcgaaagtggtcgagttctatcacccgaaggcgatgttgatgaggatacagtaagaatctctgaacatcataaggttggccctgttccagatgatgcaataaagcaaaccagtgacaattttgcatcagcacctatatcttcagcggagacaaaagacactatttctaacgtcctagcagattcatctactaaggttgaaccatataagctttctctgaggctagactatgctgcttacatgatccatttagctgtctttggctttttcggggtaactctccaaaatctcacataaggtattcacaaggtatgggctccaaaagctgtttggcccagactgtttggcactcacttcagatcaaagcccactttaccctgatcttccatctaatatgcttgggtctttcttgatgggctggtttggtatcattttcaaggctgatatacgatacatatctgaccatcttattgtcggaatcacaactggatacatgggaagccttacaaccttcagtgggtggaaccagaaaatggttggtttgtcttccaaaggccattgggtatatgctatagcgggcgtagtactagggatgttcattgtcaacgagtccattacggttggtgctgagacgggcgagcgcctacggagtttgatcctgaaatacatcagggagaagagtttgataggtcacaagtatgattgggagcactggagggtgaataccagggctaagcagtcagtgcttttgtcagtgatgataattttgatgtctttcttttggattttgagcattgtgctgactgtagtaaagatgcatagtcttgctgatggtgctgtcctatggatgggctgctcggtagcacctccaggtgtttggttacgctggtacctggcaaggctcaatggccagggaattggcaaacagagatccttgaaatggctgcccactgggactctggtagccaatgttcttgctgcaggcataatggcagttcttgctgtaacatccaaagcggtagatacaaagcgatcaacaactattcttagtggaatacagctcggcttccttggttgcctaagcacagtgtctacttttgctgctgaagtgtatacaatgagaagaagcgggcagattgccagggcctttgtttatgccgcatccaccttcctgctttcttttctgctaggaactctagtgtattctgtgccagtttgggaaaagcattataaatgacctattgcaacttccagattcaacattttaccagatggcttaaatgtgcaatgggaaagagagcatcaacttcctgaacaaagtacaagatacagagccaagacctcaaaggttcacagatgcaaaagagagcatcaacacaaacgtttgcagaatggacccacagaaccatctatatacctggctgggaaaaacagagtaaactttgcttagtagaatatgtagtggcgtggaataatttttgtcttggagaatggagtacatgtatgtatctgtgaactagatgtatcattaatgcatgagatatgcatagatgaatttaattagtgtgggattagctccactttattctcatgctgtctcatgtaaatgcaggacatctagaaatgtttttcttgttactaagacatattggcttaattagtttttgaataaaacatttccttttgacagtgtg

SEQ ID NO: 80643 - DNA, 2243 bp, Zea Mays
aggcagcactaaaacatttctctgcctaactacttccctgtacgtggacgaggaccaaggagacagagagaaagcctggccgcgccgcccaccgtcgcctcgtcagtcgcctcctccatcctccctccccatcgacttcccaaatcccagccagtgatgtacatgtactgtgagctatttgatttgactgaaggaaaaaaaatgttgctgcagtctcctcgatcttcagagctgtgatgtgatttgtccagatacctacaaaaacggttgttatctgtctttgtagcagaagaaacagtcctaaaaaagaatggagagctcctcagataggagcaacgtttctcaggggaaccacctgggttatgcgagaagcacatccatggattccactggtcctcagttagctggtaggtctagctcaatgttgagtaggagaagtagcagacagggctcaaggggatccatcagcctctcaagggagatgggggactccatactgagctcaatgaggcattctcttcagtcggcggatcaattgctaggagacatcgatagctcagttctggctcaactcatcgaaagtggtcgagttctatcacccgaaggcgatgttgatgaggatacagtaagaatctctgaacatcataaggttggccctgttccagatgatgcaataaagcaaaccagtgacaattttgcatcagcacctatatcttcagcggagacaaaagacactatttctaacgtcctagcagattcatctactaaggttgaaccatataagctttctctgaggctagactatgctgcttacatgatccatttagctgtctttggctttttcggggtattcacaaggtatgggctccaaaagctgtttggcccagactgtttggcactcacttcagatcaaagcccactttaccctgatcttccatctaatatgcttgggtctttcttgatgggctggtttggtatcattttcaaggctgatatacgatacatatctgaccatcttattgtcggaatcacaactggatacatgggaagccttacaaccttcagtgggtggaaccagaaaatggttggtttgtcttccaaaggccattgggtatatgctatagcgggcgtagtactagggatgttcattgtcaacgagtccattacggttggtgctgagacgggcgagcgcctacggagtttgatcctgaaatacatcagggagaagagtttgataggtcacaagtatgattgggagcactggagggtgaataccagggctaagcagtcagtgcttttgtcagtgatgataattttgatgtctttcttttggattttgagcattgtgctgactgtagtaaagatgcatagtcttgctgatggtgctgtcctatggatgggctgctcggtagcacctccaggtgtttggttacgctggtacctggcaaggctcaatggccagggaattggcaaacagagatccttgaaatggctgcccactgggactctggtagccaatgttcttgctgcaggcataatggcagttcttgctgtaacatccaaagcggtagatacaaagcgatcaacaactattcttagtggaatacagctcggcttccttggttgcctaagcacagtgtctacttttgctgctgaagtgtatacaatgagaagaagcgggcagattgccagggcctttgtttatgccgcatccaccttcctgctttcttttctgctaggaactctagtgtattctgtgccagtttgggaaaagcattataaatgacctattgcaacttccagattcaacattttaccagatggcttaaatgtgcaatgggaaagagagcatcaacttcctgaacaaagtacaagatacagagccaagacctcaaaggttcacagatgcaaaagagagcatcaacacaaacgtttgcagaatggacccacagaaccatctatatacctggctgggaaaaacagagtaaactttgcttagtagaatatgtagtggcgtggaataatttttgtcttggagaatggagtacatgtatgtatctgtgaactagatgtatcattaatgcatgagatatgcatagatgaatttaattagtgtgggattagctccactttattctcatgctgtctcatgtaaatgcaggacatctagaaatgtttttcttgttactaagacatattggcttaattagtttttgaataaaacatttccttttgacagtgtg

SEQ ID NO: 80644 - DNA, 2944 bp, Zea Mays
aggcagcactaaaacatttctctgcctaactacttccctgtacgtggacgaggaccaaggagacagagagaaagcctggccgcgccgcccaccgtcgcctcgtcagtcgcctcctccatcctccctccccatcgacttcccaaatcccagccagatctcctcgtcctctggcccattctcttcatctccatgcatggatgaacaagagacggagggagacagatgcaaacatcgagactgggtaggtgtggcgtcgtgctgatcttcctcccaccttacttgaccatggaacctttagagctaaaaggcaccaggcactgattatattaggttacttgttaattaacaattagcatcgcgattagactagaccagttggttactaacaatcaaacaattggtatcgagatgtcaaaggcagtcacctttagtgggatcgatactgttcttttagtctattcaattcagtagcagtctaatcagaagacgccacttgtttccctcgcttcaacggcgctgtcacgggttcagacgtgtttctatttttcttcttttccagccttacttttgattaaactaattatttgtttctggtcttcgttacgtgtactttctcgctcctacaatttttttcgcgtgtgccatatgtgttcccggaaaagtttcctgtccctttcgggtactccggatggttcccattttttttctttcataaaagttctattttgaagcttggagaacagtgatgtacatgtactgtgagctatttgatttgactgaaggaaaaaaaatgttgctgcagtctcctcgatcttcagagctgtgatgtgatttgtccagatacctacaaaaacggttgttatctgtctttgtagcagaagaaacagtcctaaaaaagaatggagagctcctcagataggagcaacgtttctcaggggaaccacctgggttatgcgagaagcacatccatggattccactggtcctcagttagctggtaggtctagctcaatgttgagtaggagaagtagcagacagggctcaaggggatccatcagcctctcaagggagatgggggactccatactgagctcaatgaggcattctcttcagtcggcggatcaattgctaggagacatcgatagctcagttctggctcaactcatcgaaagtggtcgagttctatcacccgaaggcgatgttgatgaggatacagtaagaatctctgaacatcataaggttggccctgttccagatgatgcaataaagcaaaccagtgacaattttgcatcagcacctatatcttcagcggagacaaaagacactatttctaacgtcctagcagattcatctactaaggttgaaccatataagctttctctgaggctagactatgctgcttacatgatccatttagctgtctttggctttttcggggtattcacaaggtatgggctccaaaagctgtttggcccagactgtttggcactcacttcagatcaaagcccactttaccctgatcttccatctaatatgcttgggtctttcttgatgggctggtttggtatcattttcaaggctgatatacgatacatatctgaccatcttattgtcggaatcacaactggatacatgggaagccttacaaccttcagtgggtggaaccagaaaatggttggtttgtcttccaaaggccattgggtatatgctatagcgggcgtagtactaggtatctgatcatcatttttatgattaagtgcaatatctcctaaattagatattatcaaacaaaaaatatgaacaaaataatccttctgatggctaacaacactgattttcagggatgttcattgtcaacgagtccattacggttggtgctgagacgggcgagcgcctacggagtttgatcctgaaatacatcagggagaagagtttgataggtcacaagtatgattgggagcactggagggtgaataccagggctaagcagtcagtgcttttgtcagtgatgataattttgatgtctttcttttggattttgagcattgtgctgactgtagtaaagatgcatagtcttgctgatggtgctgtcctatggatgggctgctcggtagcacctccaggtgtttggttacgctggtacctggcaaggctcaatggccagggaattggcaaacagagatccttgaaatggctgcccactgggactctggtagccaatgttcttgctgcaggcataatggcagttcttgctgtaacatccaaagcggtagatacaaagcgatcaacaactattcttagtggaatacagctcggcttccttggttgcctaagcacagtgtctacttttgctgctgaagtgtatacaatgagaagaagcgggcagattgccagggcctttgtttatgccgcatccaccttcctgctttcttttctgctaggaactctagtgtattctgtgccagtttgggaaaagcattataaatgacctattgcaacttccagattcaacattttaccagatggcttaaatgtgcaatgggaaagagagcatcaacttcctgaacaaagtacaagatacagagccaagacctcaaaggttcacagatgcaaaagagagcatcaacacaaacgtttgcagaatggacccacagaaccatctatatacctggctgggaaaaacagagtaaactttgcttagtagaatatgtagtggcgtggaataatttttgtcttggagaatggagtacatgtatgtatctgtgaactagatgtatcattaatgcatgagatatgcatagatgaatttaattagtgtgggattagctccactttattctcatgctgtctcatgtaaatgcaggacatctagaaatgtttttcttgttactaagacatattggcttaattagtttttgaataaaacatttccttttgacagtgtg

SEQ ID NO: 80645 - DNA, 2167 bp, Zea Mays
aggcagcactaaaacatttctctgcctaactacttccctgtacgtggacgaggaccaaggagacagagagaaagcctggccgcgccgcccaccgtcgcctcgtcagtcgcctcctccatcctccctccccatcgacttcccaaatcccagccagagacggagggagacagatgcaaacatcgagactggggttgttatctgtctttgtagcagaagaaacagtcctaaaaaagaatggagagctcctcagataggagcaacgtttctcaggggaaccacctgggttatgcgagaagcacatccatggattccactggtcctcagttagctggtaggtctagctcaatgttgagtaggagaagtagcagacagggctcaaggggatccatcagcctctcaagggagatgggggactccatactgagctcaatgaggcattctcttcagtcggcggatcaattgctaggagacatcgatagctcagttctggctcaactcatcgaaagtggtcgagttctatcacccgaaggcgatgttgatgaggatacagtaagaatctctgaacatcataaggttggccctgttccagatgatgcaataaagcaaaccagtgacaattttgcatcagcacctatatcttcagcggagacaaaagacactatttctaacgtcctagcagattcatctactaaggttgaaccatataagctttctctgaggctagactatgctgcttacatgatccatttagctgtctttggctttttcggggtattcacaaggtatgggctccaaaagctgtttggcccagactgtttggcactcacttcagatcaaagcccactttaccctgatcttccatctaatatgcttgggtctttcttgatgggctggtttggtatcattttcaaggctgatatacgatacatatctgaccatcttattgtcggaatcacaactggatacatgggaagccttacaaccttcagtgggtggaaccagaaaatggttggtttgtcttccaaaggccattgggtatatgctatagcgggcgtagtactagggatgttcattgtcaacgagtccattacggttggtgctgagacgggcgagcgcctacggagtttgatcctgaaatacatcagggagaagagtttgataggtcacaagtatgattgggagcactggagggtgaataccagggctaagcagtcagtgcttttgtcagtgatgataattttgatgtctttcttttggattttgagcattgtgctgactgtagtaaagatgcatagtcttgctgatggtgctgtcctatggatgggctgctcggtagcacctccaggtgtttggttacgctggtacctggcaaggctcaatggccagggaattggcaaacagagatccttgaaatggctgcccactgggactctggtagccaatgttcttgctgcaggcataatggcagttcttgctgtaacatccaaagcggtagatacaaagcgatcaacaactattcttagtggaatacagctcggcttccttggttgcctaagcacagtgtctacttttgctgctgaagtgtatacaatgagaagaagcgggcagattgccagggcctttgtttatgccgcatccaccttcctgctttcttttctgctaggaactctagtgtattctgtgccagtttgggaaaagcattataaatgacctattgcaacttccagattcaacattttaccagatggcttaaatgtgcaatgggaaagagagcatcaacttcctgaacaaagtacaagatacagagccaagacctcaaaggttcacagatgcaaaagagagcatcaacacaaacgtttgcagaatggacccacagaaccatctatatacctggctgggaaaaacagagtaaactttgcttagtagaatatgtagtggcgtggaataatttttgtcttggagaatggagtacatgtatgtatctgtgaactagatgtatcattaatgcatgagatatgcatagatgaatttaattagtgtgggattagctccactttattctcatgctgtctcatgtaaatgcaggacatctagaaatgtttttcttgttactaagacatattggcttaattagtttttgaataaaacatttccttttgacagtgtg

SEQ ID NO: 80646 - DNA, 1922 bp, Zea Mays
gtggacatacattcagcgtaacactccgtgtaaacattcagtgtatgagtcactgtatatcagaaaaaaaatacaggaagtcttcgatttaaaaaggccaggattagtaatttaaactttaggaatttccattaggagttggagttgacagagaagagaaggggcaattcgttcatttctctctccagttcacatgtattgggatggaatgggtctgttcaaacaagcctaagcacggcgaagttaataccctaagcgtggtagttactctgccttgagagttgagagcaactcccgccactttcgttttgaaatgtctttgggaagtctgagtttattcaagaagtggtatgattgatttactgaagataacacacatgtatttcccccaacctacaattgcactaatttgttttactgcaccgcatagagatattgcagtgctcctattattaagtgtggttagtttgacatgttagcagggccctgtcatttataaaggttagaagcaactgttgcacccttccttttctggagttgaattaccatacaatcctatgaaactgtattacaggagtacacatacgcatatcactgatgaaggtttttagaagttgatacttgtatatagttcattgttctgacaactttttattcgtgcagaaatctgctggtggtgtattgctaccgaaatctgctgttaagtttgagaggtatctgatgggtgagattctatcggttggtgctgatgttagtgaagttgaggctgggaagaaggtaagcagtgattttgtgacataactcttattggtgcatgaccaaacactcacttgtgccaacgaaaagcattttgtgctttgcatgtgaaatgtatttatattttagacatcgatctattatatgattgcacgttgtgctttgtggtttcttgttttctgtaatcttaccattctattttattgcttatcttggatgaaggaactaagtgaaaattttggacatatgaactgtagtgtaattatgtaaatgaatgtgctatgcttacttgagtagaacgaagagtggttatgtttttgaaacaaatacattgtgctaacttgcaagctgcaaccattatggcactgtctgctactgaaatctgcctgctgcaaactctgaaaataaacatgctttattttggtactgcccttgtctattttgctctgcattgggtattgttattgtgtcaagtcttacagttttgcatagtttgtcatatatgtatttttactgaagtacaatgctcatcatgaagaatactctaacctggtttgcacttgcaggttctcttctcagacatcaatgcttacgaggtggaccttgatacggatgagaagcactgcttctgccgggagtcagatttgttagctgtagttgaatgaattttaccatgaaaattacagacttacttgcccatgctccaactgcatggacttatcttgcacctactttgttgtacttgaactcggcttctagatgagtgttagttatcattgtattttggccgcaataaacaggaatcgtgtcaatgcccccatttctttacagcacgctctcataaagcgcttagattttgataggaaagcgtgaacggaacatgaaagctgaaatgcttacattgttcatctggtgttggtgtttctgaacattcttcaagcaccgtcgtaaacatttcaactagagactgcagattttacatttttattgtgctgatgcttgccatgtctcgttcgattgatttggattttttgttcgttctttttagagtaggggtgaaaacggatcggatatacccgtcgggtaccagatatgggtagtgtaaatacccgttttttcggatatggattttggtagttttatattcgggacgaatacgggtaata

SEQ ID NO: 80647 - DNA, 1878 bp, Zea Mays
cttaaacgaggacgaggaggcggacctgttcgttcgcgttgcccgcgactctctccgtcctcctactctcacacgcttggcgcgcgcgtgcttccacacgtccgtcgcctcgcctggctgattggtttgggacctggctccagcaatggcggtgcaggcgcattatcaccaccaccaccaccaccaccaccgcgagtcccctttcctcgtcagccggttggcggcggcgatggagctgcatcaggcgcagaaggaggctactacggcgcagcagcacgctccgcccgacttctcgcatggaggttgcggcggcgggaagaagcggcagcgcgaggcggaccccgtgtcccggcagctcttgtcgttgcagcagcagcaaccacaggcgcaggggcccaagttcatcaacctggcgcaactgcacaagcggccggcgacgggcctccggctcgacttggacgagggctcggagcacgtgccgtgcacgtcctcggcctcggcgtcgtgtctcctcctctccgaagagctcgccgcgcagcgcgaccagcacaaggacgagatggaacggctgatccaggagcacgcggagaggctccggcgcgcgctggccgacacccggcggcggcactaccgttcgctcgtcggcgcggccgaggcggctgctgctcggcggataagggagaaggagtcggaggcctgggaggccgcgcggcgccgcgccgacctggaggatcgggtcgcgcggctgagggcggaggcggcggcgtggcaggcaaaggagctcgcggaccagtccacggccgcggcgctccacgcgcagctgcagcaggcgaggggcaaggccaccgacgccgaggaagggggcaacgcggcggacgacgccgggtcgtgcttcgtcgacccggacagggtggtggagatcgccccgccgccggccaggccgtgccgggcgtgcaggcggcggtcggcctccgtcgtgctgctcccttgccgccacctctgcgtctgcgccgagtgcgagcccgccgtccccgccgccccctttgccgccgcagctgtcgccgctgcctgccccgtgtgccgtggcgcggtcaccggcacggtgcaagtgttcgtctcgtagcgggagggaaaggttaaaaaaaatggtgctcctgccaaaaggaatggcaggtgaaaatggggaatgaacgatggcaaattgtgtagtggagtggagcgcattactttttatttctctgttttttttgctcatttgttcattacaatcattttttctcttcgtatagtgccggtaggaataggatcgtgctctctctctgcctcggttcctgtggacttttttaccgcctgagattaattaatggctttgccctgtccctgcggttgctggtagcctcctacgtgagcagcagcgccttggggttggggacgacggacgatgcgttaaaggcgaggcggggattcgcgtgatgcgtagtagtggcgggagacgcggccgatcacgtgacgtgacgatctcggcatcgcccatcgccatccgtcgtgggccgcgccgtgcgatccccatcgggggtacgggcgcgcgtcgcggctgcgctgtcggttgttcgccgcgcaggccttggaagaggaggaatgggggtgcgcggcgtgcggttgcaggctttggccaacgattgatgaattgtgttaattgtaaacggttgtgtgaacagagaatgagaactcgtagtccctttctattgatctagtacatatttatacacagtgaagaggtgtctttgtaccctttcgtggattacagagagagagaaagagttacaacttttcactaacagacaccttttctaacagacacctaatcactaactatct

SEQ ID NO: 80648 - DNA, 13086 bp, Zea Mays
cggcaagtcgctccacctgcttgttctagcgatctcctccgcctccctggtccctggtccctactcccatttctcctcgactcgtccaagacaaggaaagtaggaaaccgcctgccctgcgtgtgggctgtctgctgtgttgctagcccagtactttctcttctcgctcacgcggcacgccgagcaaggggaccgacaggcggagcgcttctcagcccctccgcaccttcgggtctcgcgttggtggcgccggcgggcgctgccgatcgccggcggcggccgagatgttggaggaccaggtcgccttcctgctgcagaagtacctcggcaactacgtccggggcctcagcaaggaggcgctaaagatcagcgtctggagaggtgatgtagagctcacaaacatgcaactgaagccagaagctctcaattcattgaaattacctgttagagtcaaagctggctttcttggttctgtgaagctcaaggttccatggagcaggttgggacaagagccagttttggtttatcttgatcgaatttttatactagctgaaccagcaacacaagttgaaggttgcagcgaggatgctgtccaggaagcaaaaagaagtcgagttagggaaatggagatcaaattgttggagcgccaacagcaactgaaatctgaactaagttcatcatggctagggtctttcattggcactgtaattggaaatatcaagttatccattggcaatattcatatcagatacgaagacgtagagagcaatcctggccacccttttgcagcaggtctggtactttcaaagctttcagcagttacagtggatgaccttggcaaggagacttttgccacaggtggtgatttggaccgagtgaaaaagtctgttgaacttgagagtctggcggtgtattttgactctgatagcagttcttggattgtggataaaccctgggaggatttacttccatcagagtggagtcaggtttttgagtttcaggagcaggatggttccagatctgcttcgaaaaagcatgcctacattttacagcctgtatctggcaaagcaaaatatacaaagatacaacttactgaggcaaagaaaacaggacaagcattgcaaaatactgcagtggatttggatgatgttactctgtcgttgtcgaaggatggctacagggacatgttaaagttggctgataatttctctacattcaatcaacggctgagatatgctcatctccgaccatcttcaccattaaaatcggatccacgagcttggtggaagtatgcatacaaggtggtgactcaggaaatgaagaaagcaagcgggaggctatcttgggagcaattattgagaaatgcaagacttcggaagacatatgtatctttatatgcatccctcttaaaatctgacatgagtcgactggttgttgatgaccatgaggagattaagaggctggaccgtgaacttgatatggaggttattctacagtggaggatgttagctcacaagtttgtagaacagtcggtggaaacataccagtatgctcaacaaaataagaagtcctggtggtcatttggatggactggctcttcaaaggatgaggaagattcaaagagttttactgatgaagattgggaaagactaaatcggattattgggtacaaagaaaccaacgagtatgtcactgatcaacaggatatgaaactgatgcaatttgattttgaaatacgtatgaaacataatgcatcaaagcttaccattgatgattcggagtgccttgctgatctctcatgccaagatttctgctgcaacttgaaaatgtatccggaggcaaaaatatttgatctgaagctgggttcctacaggcttttatctccatatggcctgcttgctgagagtgcaagtgtcatcgattcttttgttggcctcttctcctacaaaccttttgatgagcaactggactggagtttgacagctaaagcttcgccttgttatataacttatttaaaggattcagttgatcaaattgttggcttcttcaagagtagccctaccattagccagaacctggcactagagactgctgctgctgtacagatgacactagatgaagtgaaacggactgctcaacagcaaatgactcgggtgctaaaagatcagtccaggttttcactgaacatggatattgctgctccaaaaattaccgttcctaccaagttccgaccagatgatgtacatgagactaagcttttgcttgaccttggaaatttagttcttcggacagaggaaatatgggatgcctatacttcagaagagcaggatatatatctaaactttaatttggtgcttagtgatgtctctgcatttctggtggatggtgattaccattggaatgaaacatctgatgaaaagaacttgttgccagtaattgacaaatgtgggattgctttgaaacttcagcagggtgttggaaaccgggaagctgtttggcaacacagatatttgcgtctagtgggtccatttctctatgtatttgaaaatttaatgtctacaacgtacaagcaatggttcagtttacgcgggaaacaagttcaccagattctggaagacactggtgctttaattttgttgtttgataatgatgagggacgaaagatatggcagaaccgtttacagggtgctatataccgtgcatcgggttctgcaatttctagctttcctggagttgctctcccatcagaggcccactcattcaaaggcaactttcttgatgttgctgacacagagaaattatttgttgcgggcattcttgatgaattaaagatatgtttttcatgtggctatgaggttgaactctcaatgaaaggtggcaatttactgataggaactattttggggtcactagaaattgaagaccagtattactatccagggagtcctgtgccaaggttcttggcaaggtcttttattaatagcatgcaaactcaagaactcccgtctcttagccgaaagaacagtgcaggacctagaaacaccccattgatgaaaaatgacagtgaggaaaactttttcgaagcatcagatgattttgatgaatttgaaacacctatgcatcaaaagaggactatatcagactattttagcacccagaaatttttgcctactagcgttccttccctacagccgccaacatttaagcgcattcctgatttgataccagatactgaacttcaaactggcaaattcacattggaaggtagtggcactttcaatagttttgtgaaagctcagatagtgatttatgatcaacattctccccagtacaacagcttggataacagggtagttgtaactgttgccactttatccttcttttgccatcggccaactgttattgcaatcatggaatttatgaatgccatcaaccttgcaaacgggtctgatactgataaagataaaagcacttatcctgctactgtagaagatagtgcaattgaggaatctaagtctgatctggaatcagagccatcaataaaacccttactggctaaaggtaaaagcagaatagtttttcatcttacatccagcatggcagaggcacagatattactgatgaatgaaaatggtgaccggcttgctactttatcacaaaataatctctcgactgatataaaggtgttcacatcatcattcagcataaaggctgcactcggaaaccttaaaataagtgatgatagccttcttagcagccacccttacttttgggtttgtgatatgcgaaatcctggaggtcgttcatttgtggagatcgactttagttcatacaatgttggtgatgaagactattgtggttatgactatagccttgtagggcagctttcagaagttagaattgtttacctcaaccgttttgttcaagagattatcagttattttatgggacttgtgccaaaaagttctgatgccgttgtaaagctgaaagacaataagactaactcagagaagtgggttagcaaaaccgatatggaaggatcacctgctctcaaattggatgtttcattcagcaggcctataattgttatgccccgtgaaactaatagtaatgactttttggagcttgatgttctatacataacagtccaaaatgaattccaatggataggtggtgataagaatgagatgagcactgttcacttagacattttaacagttacagtacgggacataaatttagttattggtatgaatatggtgcgtggtgaaaccataattcaagatgtagaaggtctctcctttgaacttcgtagatcattgcgtgatttgagacatcagttgccagtggtggaggcagcaattaaggtggatgttttgaaagcaacactatccaatcgagaatatgaaattatttctgaatgtgcattgtctaacttctctgagacaccacatcctgtgcctactctggatgatcctcgatatggcacttccactactccatcccatgtatcagcttcttcttcagaaagtattcatgtcttgtccgaaggtgcagaaacatggatagctaataaattttctgtctcaataaatctggttgagctttctctgcattcaggatcgacaagagattctcctctggcgagcgttcaggcgagtggagcatggcttttctataaatcaaacacacggggagaaaattttatgtatgctactctcaaaggattttctgtttttgatgatcgtgaaggaaccaaagatgagttaaggcttgccattgggaaatcagcatctgttcgggacacatcatctgttgatggctatgataatcctaatgaacttgattcaggtgaacgaagaatacaaaaggatctaggccttgagccaatcccctcgatgcttattcttgatgccatcttccgaaaatcttcgtcatccgtctctgtctgtgttcagcggcccaagtttcttgtggcacttgacttcttactagcagtaatcgaattctttgtgccatctgctcagagtcttctatccaatgatgaagacaaggaccttttacatatgatcactccagtagtattgaatgatcaaatttatttccaggagcattcaacatttagtctttcacctcagaagcccttgattgttgataatgaaagatttgatcacttcgtatatgatgggaagggtggaaagttatatttgctggatagtgaggggaaaattctctcaagcccttgtactgagagtttcattcatgtgcttgggtgtaagagattgcaatttcggaatgtcactatagtgaatggtgaatatttggattcctgtatctctctcggtgatgatagctgttattcagcatcaaggaatgaccatgtctacttagtaagagaagatgatgggtccttgtcaacccccagcaaggaaattagaggagacagtgttaaaaatgggagtgctgatatatcaaccgaatttattatggaactacaggctattggaccagagcttactttctatagtacatcaaggaatgctggtgaaaacttagcactgtcaacaaaggttattcatgcccacacagatgcattttgcaggcttataatgaaaggcgacagtatggagatgaatggaaacatacttggtttaaagatggagagtaatggcatcagagttatagaaccatttgacatggtcgtgaaatattccaatgcgtctggaaagacaaatttgcatctactagtttctgaaatatatatgaatttttccttcagtattctcagactgtttttagcagttgaggaagaaatttcagcatttcttaggatgtcgtcaaagaaaatttcactggtgtgttaccagtttgacaaagttgcaactatgcaaggtaatgctaatgatcaagtgttatctttctggcgaccgcgtgctccatctggatatgccatttttggcgattatctcacaccaatgaacgagcctcctactaaaggagttcttgctctgaacacaaacattgttagggtcaaaaggcctttatcgtacaaactagtgtggcaatctggttctccaagaacaaacatttttcatcagaaggacttggaggataagatctctaatattgaccagctctgctctgtttggttacctgtggcacctgcgggttatgttgcaatgggttgtgttgcttcatctggaactgctgaaccacctttgtcttcagctttctgtttaactgcttctttggtttcatcatgtaatctaagggattgcattgcactgagggataacactaacatgatattctggcgagttgataatgcttttggttcctttttacctggagatcctgcaagcatgagtgtggatgggaatgcttatgatcttcgacatatgctgttcgacagtgcagactcatcttccaagactgtctctagaaggcaagatagtagaaatgatttctctcaactagagagatcagaattgacctcaggtcggctatttgatgctgtggcaagctttaaactaatttggtcaaatagtgggacctcttcaccaaaaaagctctcaatatggcgtccaatgttgtctgaaggaatgttttactttggtgacatagctgttaacgggtatgaaccaccaaattcaactgttgttcttcgtgatactggtgaagacacttttctcagagctcctgaaggttttgaccttgttggtcgaattaagaagcaccggggcactgagggtgtatcattttggtttcctaaagctccttcaggttttgtggcattaggatgtgttgcatctaaaagttctccaaccaaagaggacttcagtttgttaagatgtattagaaatgacatggtggctggaggtcaattttctgaggaaagtttatgggattcatctaatgctagaacatctgaaccttttagcttatggactgttgataatgatgctggtacgtttcttgtgagaagtggatatagaaaacctccaaagaggcttgcactgaagcttgcaggtccacctacatcaagcagttcagatagcatcattgttgatgccaaaattaaaacattttctgctgtttcctttgatgattatggcggaatgatggtgccattatttggggtgtcctttgacagtgttggactaagttatcatggaggtcctcatcatcttaatgcaactgtgagcttgtcttttgtggccagatcctataatgacaagtatagctcgtgggagccctttattgaaccaacagatgcatttcttaggtaccaattcgacatgaatacaccaggttctcctagacaactccgtattacctcaactcaagaccttaatttgaacatatctgtttccaatacaaacatgttatcgcaagcttatgctagctggaataatattagctgtggtgatgaattgtataagaaggaaaccttttcttctactgagcgaccagttcttgatgttcatcaaagaagaagttattatgttgtcccacaaaataaacttggacaagatatttatgtaagaactactgaaaatagaggttcacttgttactctgttgccctctggggatgataggtccataaaagttccggctttaagggatctatcagattctcatttaaatggaagatctgttaaaccatatcggttgatgataactgccattcttgcggatgcagaggtcaaggatgatgaaggattagaaactggtgaatatatgactgctgtgcggctcttttcagaaaaccattccatatctgttcaacaacagagtgcccgtacttgtgctgctattggagaacacttgtcacagaacaccagaaaggtgaactggaacgaaatgttctttttcaaagtcgaacgtgtggacagctatactctagagcttcttgtgcttgatgctggtaaaggtcaaccagttggtatatactctgctccattggagcaagttgtgcaaaagctccctcctacctctaatccggactctgtcaaatttgatttggctttaggagaccttatgtcaactaagacagtggaacaggaaactgttaaacctagtggaaaaataagatttgcggtacttgtttctggtagagctagtgtacaacaagggaacagagccagtcctgaaagcaagactggatatattcagattagcccttcaaaagaagggccatggacaagcatgaagttgaactatgctgtacctgcagcatgttggaggtttggtaattgtgtgattgctagtgaagcaacagtcaaggaaggcaacagatacgttagcatacgttcccttgtgtcagttactaatacaaccaatttcattgttgatttacgtctaaaaggaagaatttctcaaagtgcacgggcagatgaacagggagacagttttggtaaagaggatcaaatcctgattggaacgctggagcccaattctactattccagtcccactatcaggcctctcacatcctcttatgccctatatgttgcagttaaggccggcaaaacatcatgatcatgaaaattactcctggagtgatgtccaggagaggcgcagtcaaaccgagtttagaaaggaggagatcctagatttatgtatatcagatctgtatgaatcggaaaacttgctattctgctcacaggtagatggcacctcgaattcttgtcatggactgtggttttgcttgagcatagaaggcaaggaaataggcaaagatgtacagatggaaccaatatatgattggtgcatcattattaagtccccgttgtgtttgacatactatcttcccattgctgcacattatactgtcagttctagccacctcgataatgaagattcaagttgctcccttggcaccttaagtccgggtgaggctgtaaaggttcacaatgttgatccaagaaaccctttgtacttatccctggttccacatggaggatgggaactgatgcatgagcctgttgttatatcacatccaacccaagcaccttccaaatttatcaatctaagaagctctttatcaggaagggttgtacagattctgcttgaacaaagcagtgatagtgactatttgatggcaaggcttatcagaatatatgttccctattggatatctttttctagattgcctacacttactctgcgtctcattgatatttctggaaggaaagagaagaggcgccttctttcacgttcacatctggaaaggggtgagaagcaactctatgatataaaacacgatgaattggttgagggatacactatagcgtctggattaaattttaagggattaggacttctatcatctgttggacatggtggacggtttggatctgtgaaagaattgtcgcctcttggcgatatggatggagcagttgatctttctgcctatgatgatgatggaaaatgcatgcatattcttctttgttcaaagccatcctcgtatcaagctgttccaacaaaggttatccatgtacgcccgtatataacattcacaaacagggccggacaagatttgtacttaaaacttagtattgaggatgagccaaaggtcttacatgcatatgactggagggtttcctttatgtactccaaggggactactgacaaactgcaggtccgactagtggatacagaatggtgccaacctctggagatagtaaaagaagacactattgttatagcaatgagaaagcagggtggtactcagaaatttgtaaaagctgagatacgtggttatgaggaaggttcaagattcttgattgtattccgtctgggcccagcatatggaccaatcaggattgagaaccggacgagtcataccacaatcagtacttgccagtctggtttaggggaggagagttggatccaagtgaagccacatgcaaccagaaaatattcttgggatgacccatatggacagaaagttattgatgttagcattgataaaggcgatgatacttgtgtcctatgtgttgacctggaaaatcctattggaagttccaccagttttagggaacatggcctcatgtttactgttgataccagtgacattaagatattgaagtttgctgattacataaggaaagaggaagtatatggattgcctggatctgaactgactgatcaccaaggatcgtcattgaaggaaaatgagacagagccaggtgctggacccttggagctcattgttgaacttggagttgttggaatatctttgattgatcataagccaagagagcttttatacttgcatctgcagaaggttttcgtttcatacttgactggttatgattttgggaccactagcaggtttaaattaatccttggcgagttgcaactagataatcagttgccactgtctacaatgcctgttgttttgtctaccgagagcaggcctgattcaaatcgttctgttttcaaagcaaacgttgctgttagcaatgtaacttctaatggcattcaagtttacccacatgtctatatccgggtaactgatcaaacatggagactaaacattcatgaacctattatttgggcactgtttgacttctacagcaatcttcgttttgtcaccaccatcaacagcacaactgtcacggaagtggatcctgagatacgaatagagctcattgatatttcagagataaggctaaaaatatctctggaaactgcgcctagtcaaagacctcgtggtgtcctaggcatatggagccccatcctatctgctgtgggtaatgcactcaagattcaggtgcatctgaggaaggtcatgcacagaagccggtttatgcggaagagctccatcatccctgctatcacgaaccgaatcaagagagatctgattcacaatccgctacatctaatcttttctgtggattttcttggagtaacaaaatcaactttatcatcacttagtaaaggatttgcagagctctctactgatgggcaatttcttcagctgagatcaaagcaggtttggtcaaggagaatcactggtgttggtgatgggctagttcaagggactgaagcatttgctcagggtttggctttcggggtttctggtgttttaagaaagccagttgagagtgccagacagtatggtgttataggtattgcacctggcattggccgtgcttttgtgggtttcattgtccaacctttaagtggggctctggattttttttcactgacggttgatggaatcagtgctagttttatgagatgtgttaacattttaagtaacaaatctgttccgcagaggataagagatcctcgtgctatacatcgtgatggtatagtaagagactatgacaaatttgaagctgctggccagatggccctttatctggcagaagctagcagatattttgcatgcacggatttatttcgagaaccttctaagtacgcatggtctgattactatgaagaccattttattttaccaagccagaggattgctttagtaactaataagcgggtgatgctgcttcagtgcttggatctagataaaatggacaagaaaccttctaaaatactttgggatgttccttgggaagaagtactttcattggagctagcaaaagctgggtatcagaggccttcacatgtaatcatacatctgaagaattttaggaggtcagagaactttgtaaggcttattaagtgcaacattgacaacgaacgggaacctcaggctctttcactttgctgttcaattcggaaaatgtggagatctcaccaagcagcaatgaaagttataccattgaaggttccatcaggccagcgtcatgtgtattttgtgtcagatgatgataaaaaggaatcccacagtttatctaggcctttgctaagctcgggaggaacctctactgatgttgagcaacagttcataaacaatacagttcactttcagaaaatgtggagcagtgaaccagaaattcagagccgatgcaaactagttgccaagcagattgcggatgacggaagggtgttcagcatatggaggcctctctgccctaatgggtatgtctcaattggtgatattgcgcatgttggcatccatccaccgcattttgctgctgtatacaagaatatcaatgggaactttgcactgcctcttggctatgacctggtttggagaaattgtgctgaggattacaagagccctgtatcaatatggcttccaaggccaccggggggatacgtagctcttgggtgtgttgctgtcccttcattcaaggagcccactcttgactgtgctttctgtgtggatgagagactcgcggaggatgccgcgtatgaggagcaaatcatatgggcctcatcggatgcttacccatggggatgctatatctaccaagttcagagcgcctcaatgcagttcatggcacttcgtgtcccaaaagaacaatctgagctaaggcccaagaagatattggagtcatttctgcagcaagcatcagagactcaaacgtcccgtgcatgaagaagctgcacatgatgcttgtgcgtgcaagagaactcggctgggacaaagggcaagtctcgtgcaagaaagctcgaagaatgccacttctttcggatcactccatttctccgttgtcaaagcatacacagaggacagagccttgcatgccaacactcgggttgacggaagtgttgtatactagaatagtaggttaaaggttgtaaatgtaaagttttgtaacgtttgatatagtttttgtccagctacatttgttaaggcccatgtggacgtgggccatattagttgtggctacatattctactaagaagttctcaggactaatcatactttctctaatttaaggttgttaaggcccatgtggacgtgggccatactagttgtggctatatattctactaagggcccgtttggtaaaacttcagctcctgcttctttagcttcagattctgatcctcgtgaggagctgatcctcctgattttcctagaaaatcagaatcatttttaaaaccgtttggcaagtaaactgattcttgtcttctgagggttggtggcctatggcgattgtctg

SEQ ID NO: 80649 - DNA, 13286 bp, Zea Mays
ctccacctgcttgttctagcgatctcctccgcctccctggtccctggtccctactcccatttctcctcgactcgtccaagacaaggaaagtaggaaaccgcctgccctgcgtgtgggctgtctgctgtgttgctagcccagtactttctcttctcgctcacgcggcacgccgagcaaggggaccgacaggcggagcgcttctcagcccctccgcaccttcgggtctcgcgttggtggcgccggcgggcgctgccgatcgccggcggcggccgagatgttggaggaccaggtcgccttcctgctgcagaagtacctcggcaactacgtccggggcctcagcaaggaggcgctaaagatcagcgtctggagaggtgatgtagagctcacaaacatgcaactgaagccagaagctctcaattcattgaaattacctgttagagtcaaagctggctttcttggttctgtgaagctcaaggttccatggagcaggttgggacaagagccagttttggtttatcttgatcgaatttttatactagctgaaccagcaacacaagttgaaggttgcagcgaggatgctgtccaggaagcaaaaagaagtcgagttagggaaatggagatcaaattgttggagcgccaacagcaactgaaatctgaactaagttcatcatggctagggtctttcattggcactgtaattggaaatatcaagttatccattggcaatattcatatcagatacgaagacgtagagagcaatcctggccacccttttgcagcaggtctggtactttcaaagctttcagcagttacagtggatgaccttggcaaggagacttttgccacaggtggtgatttggaccgagtgaaaaagtctgttgaacttgagagtctggcggtgtattttgactctgatagcagttcttggattgtggataaaccctgggaggatttacttccatcagagtggagtcaggtttttgagtttcaggagcaggatggttccagatctgcttcgaaaaagcatgcctacattttacagcctgtatctggcaaagcaaaatatacaaagatacaacttactgaggcaaagaaaacaggacaagcattgcaaaatactgcagtggatttggatgatgttactctgtcgttgtcgaaggatggctacagggacatgttaaagttggctgataatttctctacattcaatcaacggctgagatatgctcatctccgaccatcttcaccattaaaatcggatccacgagcttggtggaagtatgcatacaaggtggtgactcaggaaatgaagaaagcaagcgggaggctatcttgggagcaattattgagaaatgcaagacttcggaagacatatgtatctttatatgcatccctcttaaaatctgacatgagtcgactggttgttgatgaccatgaggagattaagaggctggaccgtgaacttgatatggaggttattctacagtggaggatgttagctcacaagtttgtagaacagtcggtggaaacataccagtatgctcaacaaaataagaagtcctggtggtcatttggatggactggctcttcaaaggatgaggaagattcaaagagttttactgatgaagattgggaaagactaaatcggattattgggtacaaagaaaccaacgagtatgtcactgatcaacaggatatgaaactgatgcaatttgattttgaaatacgtatgaaacataatgcatcaaagcttaccattgatgattcggagtgccttgctgatctctcatgccaagatttctgctgcaacttgaaaatgtatccggaggcaaaaatatttgatctgaagctgggttcctacaggcttttatctccatatggcctgcttgctgagagtgcaagtgtcatcgattcttttgttggcctcttctcctacaaaccttttgatgagcaactggactggagtttgacagctaaagcttcgccttgttatataacttatttaaaggattcagttgatcaaattgttggcttcttcaagagtagccctaccattagccagaacctggcactagagactgctgctgctgtacagatgacactagatgaagtgaaacggactgctcaacagcaaatgactcgggtgctaaaagatcagtccaggttttcactgaacatggatattgctgctccaaaaattaccgttcctaccaagttccgaccagatgatgtacatgagactaagcttttgcttgaccttggaaatttagttcttcggacagaggaaatatgggatgcctatacttcagaagagcaggatatatatctaaactttaatttggtgcttagtgatgtctctgcatttctggtggatggtgattaccattggaatgaaacatctgatgaaaagaacttgttgccagtaattgacaaatgtgggattgctttgaaacttcagcagatccagttagaaagtcctctatatccttccacaagaatggcgatacgggtgccttccctaggatttcatttctctcctgcacgctatcatcgtttaatggaaattttaaaattttttcaagatggtgctagtgataatagcaattcagatcatgaacacttgtgggatcatgctgactttgaaggatggtcatctcttctcacatggaagggtgttggaaaccgggaagctgtttggcaacacagatatttgcgtctagtgggtccatttctctatgtatttgaaaatttaatgtctacaacgtacaagcaatggttcagtttacgcgggaaacaagttcaccagattctggaagacactggtgctttaattttgttgtttgataatgatgagggacgaaagatatggcagaaccgtttacagggtgctatataccgtgcatcgggttctgcaatttctagctttcctggagttgctctcccatcagaggcccactcattcaaaggcaactttcttgatgttgctgacacagagaaattatttgttgcgggcattcttgatgaattaaagatatgtttttcatgtggctatgaggttgaactctcaatgaaaggtggcaatttactgataggaactattttggggtcactagaaattgaagaccagtattactatccagggagtcctgtgccaaggttcttggcaaggtcttttattaatagcatgcaaactcaagaactcccgtctcttagccgaaagaacagtgcaggacctagaaacaccccattgatgaaaaatgacagtgaggaaaactttttcgaagcatcagatgattttgatgaatttgaaacacctatgcatcaaaagaggactatatcagactattttagcacccagaaatttttgcctactagcgttccttccctacagccgccaacatttaagcgcattcctgatttgataccagatactgaacttcaaactggcaaattcacattggaaggtagtggcactttcaatagttttgtgaaagctcagatagtgatttatgatcaacattctccccagtacaacagcttggataacagggtagttgtaactgttgccactttatccttcttttgccatcggccaactgttattgcaatcatggaatttatgaatgccatcaaccttgcaaacgggtctgatactgataaagataaaagcacttatcctgctactgtagaagatagtgcaattgaggaatctaagtctgatctggaatcagagccatcaataaaacccttactggctaaaggtaaaagcagaatagtttttcatcttacatccagcatggcagaggcacagatattactgatgaatgaaaatggtgaccggcttgctactttatcacaaaataatctctcgactgatataaaggtgttcacatcatcattcagcataaaggctgcactcggaaaccttaaaataagtgatgatagccttcttagcagccacccttacttttgggtttgtgatatgcgaaatcctggaggtcgttcatttgtggagatcgactttagttcatacaatgttggtgatgaagactattgtggttatgactatagccttgtagggcagctttcagaagttagaattgtttacctcaaccgttttgttcaagagattatcagttattttatgggacttgtgccaaaaagttctgatgccgttgtaaagctgaaagacaataagactaactcagagaagtgggttagcaaaaccgatatggaaggatcacctgctctcaaattggatgtttcattcagcaggcctataattgttatgccccgtgaaactaatagtaatgactttttggagcttgatgttctatacataacagtccaaaatgaattccaatggataggtggtgataagaatgagatgagcactgttcacttagacattttaacagttacagtacgggacataaatttagttattggtatgaatatggtgcgtggtgaaaccataattcaagatgtagaaggtctctcctttgaacttcgtagatcattgcgtgatttgagacatcagttgccagtggtggaggcagcaattaaggtggatgttttgaaagcaacactatccaatcgagaatatgaaattatttctgaatgtgcattgtctaacttctctgagacaccacatcctgtgcctactctggatgatcctcgatatggcacttccactactccatcccatgtatcagcttcttcttcagaaagtattcatgtcttgtccgaaggtgcagaaacatggatagctaataaattttctgtctcaataaatctggttgagctttctctgcattcaggatcgacaagagattctcctctggcgagcgttcaggcgagtggagcatggcttttctataaatcaaacacacggggagaaaattttatgtatgctactctcaaaggattttctgtttttgatgatcgtgaaggaaccaaagatgagttaaggcttgccattgggaaatcagcatctgttcgggacacatcatctgttgatggctatgataatcctaatgaacttgattcaggtgaacgaagaatacaaaaggatctaggccttgagccaatcccctcgatgcttattcttgatgccatcttccgaaaatcttcgtcatccgtctctgtctgtgttcagcggcccaagtttcttgtggcacttgacttcttactagcagtaatcgaattctttgtgccatctgctcagagtcttctatccaatgatgaagacaaggaccttttacatatgatcactccagtagtattgaatgatcaaatttatttccaggagcattcaacatttagtctttcacctcagaagcccttgattgttgataatgaaagatttgatcacttcgtatatgatgggaagggtggaaagttatatttgctggatagtgaggggaaaattctctcaagcccttgtactgagagtttcattcatgtgcttgggtgtaagagattgcaatttcggaatgtcactatagtgaatggtgaatatttggattcctgtatctctctcggtgatgatagctgttattcagcatcaaggaatgaccatgtctacttagtaagagaagatgatgggtccttgtcaacccccagcaaggaaattagaggagacagtgttaaaaatgggagtgctgatatatcaaccgaatttattatggaactacaggctattggaccagagcttactttctatagtacatcaaggaatgctggtgaaaacttagcactgtcaacaaaggttattcatgcccacacagatgcattttgcaggcttataatgaaaggcgacagtatggagatgaatggaaacatacttggtttaaagatggagagtaatggcatcagagttatagaaccatttgacatggtcgtgaaatattccaatgcgtctggaaagacaaatttgcatctactagtttctgaaatatatatgaatttttccttcagtattctcagactgtttttagcagttgaggaagaaatttcagcatttcttaggatgtcgtcaaagaaaatttcactggtgtgttaccagtttgacaaagttgcaactatgcaaggtaatgctaatgatcaagtgttatctttctggcgaccgcgtgctccatctggatatgccatttttggcgattatctcacaccaatgaacgagcctcctactaaaggagttcttgctctgaacacaaacattgttagggtcaaaaggcctttatcgtacaaactagtgtggcaatctggttctccaagaacaaacatttttcatcagaaggacttggaggataagatctctaatattgaccagctctgctctgtttggttacctgtggcacctgcgggttatgttgcaatgggttgtgttgcttcatctggaactgctgaaccacctttgtcttcagctttctgtttaactgcttctttggtttcatcatgtaatctaagggattgcattgcactgagggataacactaacatgatattctggcgagttgataatgcttttggttcctttttacctggagatcctgcaagcatgagtgtggatgggaatgcttatgatcttcgacatatgctgttcgacagtgcagactcatcttccaagactgtctctagaaggcaagatagtagaaatgatttctctcaactagagagatcagaattgacctcaggtcggctatttgatgctgtggcaagctttaaactaatttggtcaaatagtgggacctcttcaccaaaaaagctctcaatatggcgtccaatgttgtctgaaggaatgttttactttggtgacatagctgttaacgggtatgaaccaccaaattcaactgttgttcttcgtgatactggtgaagacacttttctcagagctcctgaaggttttgaccttgttggtcgaattaagaagcaccggggcactgagggtgtatcattttggtttcctaaagctccttcaggttttgtggcattaggatgtgttgcatctaaaagttctccaaccaaagaggacttcagtttgttaagatgtattagaaatgacatggtggctggaggtcaattttctgaggaaagtttatgggattcatctaatgctagaacatctgaaccttttagcttatggactgttgataatgatgctggtacgtttcttgtgagaagtggatatagaaaacctccaaagaggcttgcactgaagcttgcaggtccacctacatcaagcagttcagatagcatcattgttgatgccaaaattaaaacattttctgctgtttcctttgatgattatggcggaatgatggtgccattatttggggtgtcctttgacagtgttggactaagttatcatggaggtcctcatcatcttaatgcaactgtgagcttgtcttttgtggccagatcctataatgacaagtatagctcgtgggagccctttattgaaccaacagatgcatttcttaggtaccaattcgacatgaatacaccaggttctcctagacaactccgtattacctcaactcaagaccttaatttgaacatatctgtttccaatacaaacatgttatcgcaagcttatgctagctggaataatattagctgtggtgatgaattgtataagaaggaaaccttttcttctactgagcgaccagttcttgatgttcatcaaagaagaagttattatgttgtcccacaaaataaacttggacaagatatttatgtaagaactactgaaaatagaggttcacttgttactctgttgccctctggggatgataggtccataaaagttccggctttaagggatctatcagattctcatttaaatggaagatctgttaaaccatatcggttgatgataactgccattcttgcggatgcagaggtcaaggatgatgaaggattagaaactggtgaatatatgactgctgtgcggctcttttcagaaaaccattccatatctgttcaacaacagagtgcccgtacttgtgctgctattggagaacacttgtcacagaacaccagaaaggtgaactggaacgaaatgttctttttcaaagtcgaacgtgtggacagctatactctagagcttcttgtgcttgatgctggtaaaggtcaaccagttggtatatactctgctccattggagcaagttgtgcaaaagctccctcctacctctaatccggactctgtcaaatttgatttggctttaggagaccttatgtcaactaagacagtggaacaggaaactgttaaacctagtggaaaaataagatttgcggtacttgtttctggtagagctagtgtacaacaagggaacagagccagtcctgaaagcaagactggatatattcagattagcccttcaaaagaagggccatggacaagcatgaagttgaactatgctgtacctgcagcatgttggaggtttggtaattgtgtgattgctagtgaagcaacagtcaaggaaggcaacagatacgttagcatacgttcccttgtgtcagttactaatacaaccaatttcattgttgatttacgtctaaaaggaagaatttctcaaagtgcacgggcagatgaacagggagacagttttggtaaagaggatcaaatcctgattggaacgctggagcccaattctactattccagtcccactatcaggcctctcacatcctcttatgccctatatgttgcagttaaggccggcaaaacatcatgatcatgaaaattactcctggagtgatgtccaggagaggcgcagtcaaaccgagtttagaaaggaggagatcctagatttatgtatatcagatctgtatgaatcggaaaacttgctattctgctcacaggtagatggcacctcgaattcttgtcatggactgtggttttgcttgagcatagaaggcaaggaaataggcaaagatgtacagatggaaccaatatatgattggtgcatcattattaagtccccgttgtgtttgacatactatcttcccattgctgcacattatactgtcagttctagccacctcgataatgaagattcaagttgctcccttggcaccttaagtccgggtgaggctgtaaaggttcacaatgttgatccaagaaaccctttgtacttatccctggttccacatggaggatgggaactgatgcatgagcctgttgttatatcacatccaacccaagcaccttccaaatttatcaatctaagaagctctttatcaggaagggttgtacagattctgcttgaacaaagcagtgatagtgactatttgatggcaaggcttatcagaatatatgttccctattggatatctttttctagattgcctacacttactctgcgtctcattgatatttctggaaggaaagagaagaggcgccttctttcacgttcacatctggaaaggggtgagaagcaactctatgatataaaacacgatgaattggttgagggatacactatagcgtctggattaaattttaagggattaggacttctatcatctgttggacatggtggacggtttggatctgtgaaagaattgtcgcctcttggcgatatggatggagcagttgatctttctgcctatgatgatgatggaaaatgcatgcatattcttctttgttcaaagccatcctcgtatcaagctgttccaacaaaggttatccatgtacgcccgtatataacattcacaaacagggccggacaagatttgtacttaaaacttagtattgaggatgagccaaaggtcttacatgcatatgactggagggtttcctttatgtactccaaggggactactgacaaactgcaggtccgactagtggatacagaatggtgccaacctctggagatagtaaaagaagacactattgttatagcaatgagaaagcagggtggtactcagaaatttgtaaaagctgagatacgtggttatgaggaaggttcaagattcttgattgtattccgtctgggcccagcatatggaccaatcaggattgagaaccggacgagtcataccacaatcagtacttgccagtctggtttaggggaggagagttggatccaagtgaagccacatgcaaccagaaaatattcttgggatgacccatatggacagaaagttattgatgttagcattgataaaggcgatgatacttgtgtcctatgtgttgacctggaaaatcctattggaagttccaccagttttagggaacatggcctcatgtttactgttgataccagtgacattaagatattgaagtttgctgattacataaggaaagaggaagtatatggattgcctggatctgaactgactgatcaccaaggatcgtcattgaaggaaaatgagacagagccaggtgctggacccttggagctcattgttgaacttggagttgttggaatatctttgattgatcataagccaagagagcttttatacttgcatctgcagaaggttttcgtttcatacttgactggttatgattttgggaccactagcaggtttaaattaatccttggcgagttgcaactagataatcagttgccactgtctacaatgcctgttgttttgtctaccgagagcaggcctgattcaaatcgttctgttttcaaagcaaacgttgctgttagcaatgtaacttctaatggcattcaagtttacccacatgtctatatccgggtaactgatcaaacatggagactaaacattcatgaacctattatttgggcactgtttgacttctacagcaatcttcgttttgtcaccaccatcaacagcacaactgtcacggaagtggatcctgagatacgaatagagctcattgatatttcagagataaggctaaaaatatctctggaaactgcgcctagtcaaagacctcgtggtgtcctaggcatatggagccccatcctatctgctgtgggtaatgcactcaagattcaggtgcatctgaggaaggtcatgcacagaagccggtttatgcggaagagctccatcatccctgctatcacgaaccgaatcaagagagatctgattcacaatccgctacatctaatcttttctgtggattttcttggagtaacaaaatcaactttatcatcacttagtaaaggatttgcagagctctctactgatgggcaatttcttcagctgagatcaaagcaggtttggtcaaggagaatcactggtgttggtgatgggctagttcaagggactgaagcatttgctcagggtttggctttcggggtttctggtgttttaagaaagccagttgagagtgccagacagtatggtgttataggtattgcacctggcattggccgtgcttttgtgggtttcattgtccaacctttaagtggggctctggattttttttcactgacggttgatggaatcagtgctagttttatgagatgtgttaacattttaagtaacaaatctgttccgcagaggataagagatcctcgtgctatacatcgtgatggtatagtaagagactatgacaaatttgaagctgctggccagatggccctttatctggcagaagctagcagatattttgcatgcacggatttatttcgagaaccttctaagtacgcatggtctgattactatgaagaccattttattttaccaagccagaggattgctttagtaactaataagcgggtgatgctgcttcagtgcttggatctagataaaatggacaagaaaccttctaaaatactttgggatgttccttgggaagaagtactttcattggagctagcaaaagctgggtatcagaggccttcacatgtaatcatacatctgaagaattttaggaggtcagagaactttgtaaggcttattaagtgcaacattgacaacgaacgggaacctcaggctctttcactttgctgttcaattcggaaaatgtggagatctcaccaagcagcaatgaaagttataccattgaaggttccatcaggccagcgtcatgtgtattttgtgtcagatgatgataaaaaggaatcccacagtttatctaggcctttgctaagctcgggaggaacctctactgatgttgagcaacagttcataaacaatacagttcactttcagaaaatgtggagcagtgaaccagaaattcagagccgatgcaaactagttgccaagcagattgcggatgacggaagggtgttcagcatatggaggcctctctgccctaatgggtatgtctcaattggtgatattgcgcatgttggcatccatccaccgcattttgctgctgtatacaagaatatcaatgggaactttgcactgcctcttggctatgacctggtttggagaaattgtgctgaggattacaagagccctgtatcaatatggcttccaaggccaccggggggatacgtagctcttgggtgtgttgctgtcccttcattcaaggagcccactcttgactgtgctttctgtgtggatgagagactcgcggaggatgccgcgtatgaggagcaaatcatatgggcctcatcggatgcttacccatggggatgctatatctaccaagttcagagcgcctcaatgcagttcatggcacttcgtgtcccaaaagaacaatctgagctaaggcccaagaagatattggagtcatttctgcagcaagcatcagagactcaaacgtcccgtgcatgaagaagctgcacatgatgcttgtgcgtgcaagagaactcggctgggacaaagggcaagtctcgtgcaagaaagctcgaagaatgccacttctttcggatcactccatttctccgttgtcaaagcatacacagaggacagagccttgcatgccaacactcgggttgacggaagtgttgtatactagaatagtaggttaaaggttgtaaatgtaaagttttgtaacgtttgatatagtttttgtccagctacatttgttaaggcccatgtggacgtgggccatattagttgtggctacatattctactaagaagttctcaggactaatcatactttctctaatttaaggttgttaaggcccatgtggacgtgggccatactagttgtggctatatattctactaagggcccgtttggtaaaacttcagctcctgcttctttagcttcagattctgatcctcgtgaggagctgatcctcctgattttcctagaaaatcagaatcatttttaaaaccgtttggcaagtaaactgattcttgtcttctgagggttggtggcctatggcgattgtctg

SEQ ID NO: 80650 - DNA, 13607 bp, Zea Mays
ctccacctgcttgttctagcgatctcctccgcctccctggtccctggtccctactcccatttctcctcgactcgtccaagacaaggaaagtaggaaaccgcctgccctgcgtgtgggctgtctgctgtgttgctagcccagtactttctcttctcgctcacgcggcacgccgagcaaggggaccgacaggcggagcgcttctcagcccctccgcaccttcgggtctcgcgttggtggcgccggcgggcgctgccgatcgccggcggcggccgagatgttggaggaccaggtcgccttcctgctgcagaagtacctcggcaactacgtccggggcctcagcaaggaggcgctaaagatcagcgtctggagaggtgatgtagagctcacaaacatgcaactgaagccagaagctctcaattcattgaaattacctgttagagtcaaagctggctttcttggttctgtgaagctcaaggttccatggagcaggttgggacaagagccagttttggtttatcttgatcgaatttttatactagctgaaccagcaacacaagttgaaggttgcagcgaggatgctgtccaggaagcaaaaagaagtcgagttagggaaatggagatcaaattgttggagcgccaacagcaactgaaatctgaactaagttcatcatggctagggtctttcattggcactgtaattggaaatatcaagttatccattggcaatattcatatcagatacgaagacgtagagagcaatcctggccacccttttgcagcaggtctggtactttcaaagctttcagcagttacagtggatgaccttggcaaggagacttttgccacaggtggtgatttggaccgagtgaaaaagtctgttgaacttgagagtctggcggtgtattttgactctgatagcagttcttggattgtggataaaccctgggaggatttacttccatcagagtggagtcaggtttttgagtttcaggagcaggatggttccagatctgcttcgaaaaagcatgcctacattttacagcctgtatctggcaaagcaaaatatacaaagatacaacttactgaggcaaagaaaacaggacaagcattgcaaaatactgcagtggatttggatgatgttactctgtcgttgtcgaaggatggctacagggacatgttaaagttggctgataatttctctacattcaatcaacggctgagatatgctcatctccgaccatcttcaccattaaaatcggatccacgagcttggtggaagtatgcatacaaggtggtgactcaggaaatgaagaaagcaagcgggaggctatcttgggagcaattattgagaaatgcaagacttcggaagacatatgtatctttatatgcatccctcttaaaatctgacatgagtcgactggttgttgatgaccatgaggagattaagaggctggaccgtgaacttgatatggaggttattctacagtggaggatgttagctcacaagtttgtagaacagtcggtggaaacataccagtatgctcaacaaaataagaagtcctggtggtcatttggatggactggctcttcaaaggatgaggaagattcaaagagttttactgatgaagattgggaaagactaaatcggattattgggtacaaagaaaccaacgagtatgtcactgatcaacaggatatgaaactgatgcaatttgattttgaaatacgtatgaaacataatgcatcaaagcttaccattgatgattcggagtgccttgctgatctctcatgccaagatttctgctgcaacttgaaaatgtatccggaggcaaaaatatttgatctgaagctgggttcctacaggcttttatctccatatggcctgcttgctgagagtgcaagtgtcatcgattcttttgttggcctcttctcctacaaaccttttgatgagcaactggactggagtttgacagctaaagcttcgccttgttatataacttatttaaaggattcagttgatcaaattgttggcttcttcaagagtagccctaccattagccagaacctggcactagagactgctgctgctgtacagatgacactagatgaagtgaaacggactgctcaacagcaaatgactcgggtgctaaaagatcagtccaggttttcactgaacatggatattgctgctccaaaaattaccgttcctaccaagttccgaccagatgatgtacatgagactaagcttttgcttgaccttggaaatttagttcttcggacagaggaaatatgggatgcctatacttcagaagagcaggatatatatctaaactttaatttggtgcttagtgatgtctctgcatttctggtggatggtgattaccattggaatgaaacatctgatgaaaagaacttgttgccagtaattgacaaatgtgggattgctttgaaacttcagcagatccagttagaaagtcctctatatccttccacaagaatggcgatacgggtgccttccctaggatttcatttctctcctgcacgctatcatcgtttaatggaaattttaaaattttttcaagatggtgctagtgataatagcaattcagatcatgaacacttgtgggatcatgctgactttgaaggatggtcatctcttctcacatggaagggtgttggaaaccgggaagctgtttggcaacacagatatttgcgtctagtgggtccatttctctatgtatttgaaaatttaatgtctacaacgtacaagcaatggttcagtttacgcgggaaacaagttcaccaggtacctactgagcttacaaatggcgtgcataacatcctggcgctgcatgattccggccaagttaatcccaaggaacggtctagtgacacttcataacattctttttctacttcagttcccctggcataattgattatctgaataaactttattcttttacagattctggaagacactggtgctttaattttgttgtttgataatgatgagggacgaaagatatggcagaaccgtttacagggtgctatataccgtgcatcgggttctgcaatttctagctttcctggagttgctctcccatcagaggcccactcattcaaaggcaactttcttgatgttgctgacacagagaaattatttgttgcgggcattcttgatgaattaaagatatgtttttcatgtggctatgagagtaaccacaaactaaaaaaaattctactagctaaggagagcagcctgtttgaatttcgggcagttggtggccaggttgaactctcaatgaaaggtggcaatttactgataggaactattttggggtcactagaaattgaagaccagtattactatccagggagtcctgtgccaaggttcttggcaaggtcttttattaatagcatgcaaactcaagaactcccgtctcttagccgaaagaacagtgcaggacctagaaacaccccattgatgaaaaatgacagtgaggaaaactttttcgaagcatcagatgattttgatgaatttgaaacacctatgcatcaaaagaggactatatcagactattttagcacccagaaatttttgcctactagcgttccttccctacagccgccaacatttaagcgcattcctgatttgataccagatactgaacttcaaactggcaaattcacattggaaggtagtggcactttcaatagttttgtgaaagctcagatagtgatttatgatcaacattctccccagtacaacagcttggataacagggtagttgtaactgttgccactttatccttcttttgccatcggccaactgttattgcaatcatggaatttatgaatgccatcaaccttgcaaacgggtctgatactgataaagataaaagcacttatcctgctactgtagaagatagtgcaattgaggaatctaagtctgatctggaatcagagccatcaataaaacccttactggctaaaggtaaaagcagaatagtttttcatcttacatccagcatggcagaggcacagatattactgatgaatgaaaatggtgaccggcttgctactttatcacaaaataatctctcgactgatataaaggtgttcacatcatcattcagcataaaggctgcactcggaaaccttaaaataagtgatgatagccttcttagcagccacccttacttttgggtttgtgatatgcgaaatcctggaggtcgttcatttgtggagatcgactttagttcatacaatgttggtgatgaagactattgtggttatgactatagccttgtagggcagctttcagaagttagaattgtttacctcaaccgttttgttcaagagattatcagttattttatgggacttgtgccaaaaagttctgatgccgttgtaaagctgaaagacaataagactaactcagagaagtgggttagcaaaaccgatatggaaggatcacctgctctcaaattggatgtttcattcagcaggcctataattgttatgccccgtgaaactaatagtaatgactttttggagcttgatgttctatacataacagtccaaaatgaattccaatggataggtggtgataagaatgagatgagcactgttcacttagacattttaacagttacagtacgggacataaatttagttattggtatgaatatggtgcgtggtgaaaccataattcaagatgtagaaggtctctcctttgaacttcgtagatcattgcgtgatttgagacatcagttgccagtggtggaggcagcaattaaggtggatgttttgaaagcaacactatccaatcgagaatatgaaattatttctgaatgtgcattgtctaacttctctgagacaccacatcctgtgcctactctggatgatcctcgatatggcacttccactactccatcccatgtatcagcttcttcttcagaaagtattcatgtcttgtccgaaggtgcagaaacatggatagctaataaattttctgtctcaataaatctggttgagctttctctgcattcaggatcgacaagagattctcctctggcgagcgttcaggcgagtggagcatggcttttctataaatcaaacacacggggagaaaattttatgtatgctactctcaaaggattttctgtttttgatgatcgtgaaggaaccaaagatgagttaaggcttgccattgggaaatcagcatctgttcgggacacatcatctgttgatggctatgataatcctaatgaacttgattcaggtgaacgaagaatacaaaaggatctaggccttgagccaatcccctcgatgcttattcttgatgccatcttccgaaaatcttcgtcatccgtctctgtctgtgttcagcggcccaagtttcttgtggcacttgacttcttactagcagtaatcgaattctttgtgccatctgctcagagtcttctatccaatgatgaagacaaggaccttttacatatgatcactccagtagtattgaatgatcaaatttatttccaggagcattcaacatttagtctttcacctcagaagcccttgattgttgataatgaaagatttgatcacttcgtatatgatgggaagggtggaaagttatatttgctggatagtgaggggaaaattctctcaagcccttgtactgagagtttcattcatgtgcttgggtgtaagagattgcaatttcggaatgtcactatagtgaatggtgaatatttggattcctgtatctctctcggtgatgatagctgttattcagcatcaaggaatgaccatgtctacttagtaagagaagatgatgggtccttgtcaacccccagcaaggaaattagaggagacagtgttaaaaatgggagtgctgatatatcaaccgaatttattatggaactacaggctattggaccagagcttactttctatagtacatcaaggaatgctggtgaaaacttagcactgtcaacaaaggttattcatgcccacacagatgcattttgcaggcttataatgaaaggcgacagtatggagatgaatggaaacatacttggtttaaagatggagagtaatggcatcagagttatagaaccatttgacatggtcgtgaaatattccaatgcgtctggaaagacaaatttgcatctactagtttctgaaatatatatgaatttttccttcagtattctcagactgtttttagcagttgaggaagaaatttcagcatttcttaggatgtcgtcaaagaaaatttcactggtgtgttaccagtttgacaaagttgcaactatgcaaggtaatgctaatgatcaagtgttatctttctggcgaccgcgtgctccatctggatatgccatttttggcgattatctcacaccaatgaacgagcctcctactaaaggagttcttgctctgaacacaaacattgttagggtcaaaaggcctttatcgtacaaactagtgtggcaatctggttctccaagaacaaacatttttcatcagaaggacttggaggataagatctctaatattgaccagctctgctctgtttggttacctgtggcacctgcgggttatgttgcaatgggttgtgttgcttcatctggaactgctgaaccacctttgtcttcagctttctgtttaactgcttctttggtttcatcatgtaatctaagggattgcattgcactgagggataacactaacatgatattctggcgagttgataatgcttttggttcctttttacctggagatcctgcaagcatgagtgtggatgggaatgcttatgatcttcgacatatgctgttcgacagtgcagactcatcttccaagactgtctctagaaggcaagatagtagaaatgatttctctcaactagagagatcagaattgacctcaggtcggctatttgatgctgtggcaagctttaaactaatttggtcaaatagtgggacctcttcaccaaaaaagctctcaatatggcgtccaatgttgtctgaaggaatgttttactttggtgacatagctgttaacgggtatgaaccaccaaattcaactgttgttcttcgtgatactggtgaagacacttttctcagagctcctgaaggttttgaccttgttggtcgaattaagaagcaccggggcactgagggtgtatcattttggtttcctaaagctccttcaggttttgtggcattaggatgtgttgcatctaaaagttctccaaccaaagaggacttcagtttgttaagatgtattagaaatgacatggtggctggaggtcaattttctgaggaaagtttatgggattcatctaatgctagaacatctgaaccttttagcttatggactgttgataatgatgctggtacgtttcttgtgagaagtggatatagaaaacctccaaagaggcttgcactgaagcttgcaggtccacctacatcaagcagttcagatagcatcattgttgatgccaaaattaaaacattttctgctgtttcctttgatgattatggcggaatgatggtgccattatttggggtgtcctttgacagtgttggactaagttatcatggaggtcctcatcatcttaatgcaactgtgagcttgtcttttgtggccagatcctataatgacaagtatagctcgtgggagccctttattgaaccaacagatgcatttcttaggtaccaattcgacatgaatacaccaggttctcctagacaactccgtattacctcaactcaagaccttaatttgaacatatctgtttccaatacaaacatgttatcgcaagcttatgctagctggaataatattagctgtggtgatgaattgtataagaaggaaaccttttcttctactgagcgaccagttcttgatgttcatcaaagaagaagttattatgttgtcccacaaaataaacttggacaagatatttatgtaagaactactgaaaatagaggttcacttgttactctgttgccctctggggatgataggtccataaaagttccggctttaagggatctatcagattctcatttaaatggaagatctgttaaaccatatcggttgatgataactgccattcttgcggatgcagagcttaagcttttgggttctctcaacagcttaagcttttgggttgaactggctagtgtgtccactctaacatggttcccatcccaggtcaaggatgatgaaggattagaaactggtgaatatatgactgctgtgcggctcttttcagaaaaccattccatatctgttcaacaacagagtgcccgtacttgtgctgctattggagaacacttgtcacagaacaccagaaaggtgaactggaacgaaatgttctttttcaaagtcgaacgtgtggacagctatactctagagcttcttgtgcttgatgctggtaaaggtcaaccagttggtatatactctgctccattggagcaagttgtgcaaaagctccctcctacctctaatccggactctgtcaaatttgatttggctttaggagaccttatgtcaactaagacagtggaacaggaaactgttaaacctagtggaaaaataagatttgcggtacttgtttctggtagagctagtgtacaacaagggaacagagccagtcctgaaagcaagactggatatattcagattagcccttcaaaagaagggccatggacaagcatgaagttgaactatgctgtacctgcagcatgttggaggtttggtaattgtgtgattgctagtgaagcaacagtcaaggaaggcaacagatacgttagcatacgttcccttgtgtcagttactaatacaaccaatttcattgttgatttacgtctaaaaggaagaatttctcaaagtgcacgggcagatgaacagggagacagttttggtaaagaggatcaaatcctgattggaacgctggagcccaattctactattccagtcccactatcaggcctctcacatcctcttatgccctatatgttgcagttaaggccggcaaaacatcatgatcatgaaaattactcctggagtgatgtccaggagaggcgcagtcaaaccgagtttagaaaggaggagatcctagatttatgtatatcagatctgtatgaatcggaaaacttgctattctgctcacaggtagatggcacctcgaattcttgtcatggactgtggttttgcttgagcatagaaggcaaggaaataggcaaagatgtacagatggaaccaatatatgattggtgcatcattattaagtccccgttgtgtttgacatactatcttcccattgctgcacattatactgtcagttctagccacctcgataatgaagattcaagttgctcccttggcaccttaagtccgggtgaggctgtaaaggttcacaatgttgatccaagaaaccctttgtacttatccctggttccacatggaggatgggaactgatgcatgagcctgttgttatatcacatccaacccaagcaccttccaaatttatcaatctaagaagctctttatcaggaagggttgtacagattctgcttgaacaaagcagtgatagtgactatttgatggcaaggcttatcagaatatatgttccctattggatatctttttctagattgcctacacttactctgcgtctcattgatatttctggaaggaaagagaagaggcgccttctttcacgttcacatctggaaaggggtgagaagcaactctatgatataaaacacgatgaattggttgagggatacactatagcgtctggattaaattttaagggattaggacttctatcatctgttggacatggtggacggtttggatctgtgaaagaattgtcgcctcttggcgatatggatggagcagttgatctttctgcctatgatgatgatggaaaatgcatgcatattcttctttgttcaaagccatcctcgtatcaagctgttccaacaaaggttatccatgtacgcccgtatataacattcacaaacagggccggacaagatttgtacttaaaacttagtattgaggatgagccaaaggtcttacatgcatatgactggagggtttcctttatgtactccaaggggactactgacaaactgcaggtccgactagtggatacagaatggtgccaacctctggagatagtaaaagaagacactattgttatagcaatgagaaagcagggtggtactcagaaatttgtaaaagctgagatacgtggttatgaggaaggttcaagattcttgattgtattccgtctgggcccagcatatggaccaatcaggattgagaaccggacgagtcataccacaatcagtacttgccagtctggtttaggggaggagagttggatccaagtgaagccacatgcaaccagaaaatattcttgggatgacccatatggacagaaagttattgatgttagcattgataaaggcgatgatacttgtgtcctatgtgttgacctggaaaatcctattggaagttccaccagttttagggaacatggcctcatgtttactgttgataccagtgacattaagatattgaagtttgctgattacataaggaaagaggaagtatatggattgcctggatctgaactgactgatcaccaaggatcgtcattgaaggaaaatgagacagagccaggtgctggacccttggagctcattgttgaacttggagttgttggaatatctttgattgatcataagccaagagagcttttatacttgcatctgcagaaggttttcgtttcatacttgactggttatgattttgggaccactagcaggtttaaattaatccttggcgagttgcaactagataatcagttgccactgtctacaatgcctgttgttttgtctaccgagagcaggcctgattcaaatcgttctgttttcaaagcaaacgttgctgttagcaatgtaacttctaatggcattcaagtttacccacatgtctatatccgggtaactgatcaaacatggagactaaacattcatgaacctattatttgggcactgtttgacttctacagcaatcttcgttttgtcaccaccatcaacagcacaactgtcacggaagtggatcctgagatacgaatagagctcattgatatttcagagataaggctaaaaatatctctggaaactgcgcctagtcaaagacctcgtggtgtcctaggcatatggagccccatcctatctgctgtgggtaatgcactcaagattcaggtgcatctgaggaaggtcatgcacagaagccggtttatgcggaagagctccatcatccctgctatcacgaaccgaatcaagagagatctgattcacaatccgctacatctaatcttttctgtggattttcttggagtaacaaaatcaactttatcatcacttagtaaaggatttgcagagctctctactgatgggcaatttcttcagctgagatcaaagcaggtttggtcaaggagaatcactggtgttggtgatgggctagttcaagggactgaagcatttgctcagggtttggctttcggggtttctggtgttttaagaaagccagttgagagtgccagacagtatggtgttataggtattgcacctggcattggccgtgcttttgtgggtttcattgtccaacctttaagtggggctctggattttttttcactgacggttgatggaatcagtgctagttttatgagatgtgttaacattttaagtaacaaatctgttccgcagaggataagagatcctcgtgctatacatcgtgatggtatagtaagagactatgacaaatttgaagctgctggccagatggccctttatctggcagaagctagcagatattttgcatgcacggatttatttcgagaaccttctaagtacgcatggtctgattactatgaagaccattttattttaccaagccagaggattgctttagtaactaataagcgggtgatgctgcttcagtgcttggatctagataaaatggacaagaaaccttctaaaatactttgggatgttccttgggaagaagtactttcattggagctagcaaaagctgggtatcagaggccttcacatgtaatcatacatctgaagaattttaggaggtcagagaactttgtaaggcttattaagtgcaacattgacaacgaacgggaacctcaggctctttcactttgctgttcaattcggaaaatgtggagatctcaccaagcagcaatgaaagttataccattgaaggttccatcaggccagcgtcatgtgtattttgtgtcagatgatgataaaaaggaatcccacagtttatctaggcctttgctaagctcgggaggaacctctactgatgttgagcaacagttcataaacaatacagttcactttcagaaaatgtggagcagtgaaccagaaattcagagccgatgcaaactagttgccaagcagattgcggatgacggaagggtgttcagcatatggaggcctctctgccctaatgggtatgtctcaattggtgatattgcgcatgttggcatccatccaccgcattttgctgctgtatacaagaatatcaatgggaactttgcactgcctcttggctatgacctggtttggagaaattgtgctgaggattacaagagccctgtatcaatatggcttccaaggccaccggggggatacgtagctcttgggtgtgttgctgtcccttcattcaaggagcccactcttgactgtgctttctgtgtggatgagagactcgcggaggatgccgcgtatgaggagcaaatcatatgggcctcatcggatgcttacccatggggatgctatatctaccaagttcagagcgcctcaatgcagttcatggcacttcgtgtcccaaaagaacaatctgagctaaggcccaagaagatattggagtcatttctgcagcaagcatcagagactcaaacgtcccgtgcatgaagaagctgcacatgatgcttgtgcgtgcaagagaactcggctgggacaaagggcaagtctcgtgcaagaaagctcgaagaatgccacttctttcggatcactccatttctccgttgtcaaagcatacacagaggacagagccttgcatgccaacactcgggttgacggaagtgttgtatactagaatagtaggttaaaggttgtaaatgtaaagttttgtaacgtttgatatagtttttgtccagctacatttgttaaggcccatgtggacgtgggccatattagttgtggctacatattctactaagaagttctcaggactaatcatactttctctaatttaaggttgttaaggcccatgtggacgtgggccatactagttgtggctatatattctactaagggcccgtttggtaaaacttcagctcctgcttctttagcttcagattctgatcctcgtgaggagctgatcctcctgattttcctagaaaatcagaatcatttttaaaaccgtttggcaagtaaactgattcttgtcttctgagggttggtggcctatggcgattgtctg

SEQ ID NO: 80651 - DNA, 13415 bp, Zea Mays
tccgcctccctggtccctggtccctactcccatttctcctcgactcgtccaagacaaggaaagtaggaaaccgcctgccctgcgtgtgggctgtctgctgtgttgctagcccagtactttctcttctcgctcacgcggcacgccgagcaaggggaccgacaggcggagcgcttctcagcccctccgcaccttcgggtctcgcgttggtggcgccggcgggcgctgccgatcgccggcggcggccgagatgttggaggaccaggtcgccttcctgctgcagaagtacctcggcaactacgtccggggcctcagcaaggaggcgctaaagatcagcgtctggagaggtgatgtagagctcacaaacatgcaactgaagccagaagctctcaattcattgaaattacctgttagagtcaaagctggctttcttggttctgtgaagctcaaggttccatggagcaggttgggacaagagccagttttggtttatcttgatcgaatttttatactagctgaaccagcaacacaagttgaaggttgcagcgaggatgctgtccaggaagcaaaaagaagtcgagttagggaaatggagatcaaattgttggagcgccaacagcaactgaaatctgaactaagttcatcatggctagggtctttcattggcactgtaattggaaatatcaagttatccattggcaatattcatatcagatacgaagacgtagagagcaatcctggccacccttttgcagcaggtctggtactttcaaagctttcagcagttacagtggatgaccttggcaaggagacttttgccacaggtggtgatttggaccgagtgaaaaagtctgttgaacttgagagtctggcggtgtattttgactctgatagcagttcttggattgtggataaaccctgggaggatttacttccatcagagtggagtcaggtttttgagtttcaggagcaggatggttccagatctgcttcgaaaaagcatgcctacattttacagcctgtatctggcaaagcaaaatatacaaagatacaacttactgaggcaaagaaaacaggacaagcattgcaaaatactgcagtggatttggatgatgttactctgtcgttgtcgaaggatggctacagggacatgttaaagttggctgataatttctctacattcaatcaacggctgagatatgctcatctccgaccatcttcaccattaaaatcggatccacgagcttggtggaagtatgcatacaaggtggtgactcaggaaatgaagaaagcaagcgggaggctatcttgggagcaattattgagaaatgcaagacttcggaagacatatgtatctttatatgcatccctcttaaaatctgacatgagtcgactggttgttgatgaccatgaggagattaagaggctggaccgtgaacttgatatggaggttattctacagtggaggatgttagctcacaagtttgtagaacagtcggtggaaacataccagtatgctcaacaaaataagaagtcctggtggtcatttggatggttgattcctggcctataaaaccctattgtttctatgtcgttaaatatgcagcaactaatttgtctttatgtaggactggctcttcaaaggatgaggaagattcaaagagttttactgatgaagattgggaaagactaaatcggattattgggtacaaagaaaccaacgagtatgtcactgatcaacaggatatgaaactgatgcaatttgattttgaaatacgtatgaaacataatgcatcaaagcttaccattgatgattcggagtgccttgctgatctctcatgccaagatttctgctgcaacttgaaaatgtatccggaggcaaaaatatttgatctgaagctgggttcctacaggcttttatctccatatggcctgcttgctgagagtgcaagtgtcatcgattcttttgttggcctcttctcctacaaaccttttgatgagcaactggactggagtttgacagctaaagcttcgccttgttatataacttatttaaaggattcagttgatcaaattgttggcttcttcaagagtagccctaccattagccagaacctggcactagagactgctgctgctgtacagatgacactagatgaagtgaaacggactgctcaacagcaaatgactcgggtgctaaaagatcagtccaggttttcactgaacatggatattgctgctccaaaaattaccgttcctaccaagttccgaccagatgatgtacatgagactaagcttttgcttgaccttggaaatttagttcttcggacagaggaaatatgggatgcctatacttcagaagagcaggatatatatctaaactttaatttggtgcttagtgatgtctctgcatttctggtggatggtgattaccattggaatgaaacatctgatgaaaagaacttgttgccagtaattgacaaatgtgggattgctttgaaacttcagcagatccagttagaaagtcctctatatccttccacaagaatggcgatacgggtgccttccctaggatttcatttctctcctgcacgctatcatcgtttaatggaaattttaaaattttttcaagatggtgctagtgataatagcaattcagatcatgaacacttgtgggatcatgctgactttgaaggatggtcatctcttctcacatggaagggtgttggaaaccgggaagctgtttggcaacacagatatttgcgtctagtgggtccatttctctatgtatttgaaaatttaatgtctacaacgtacaagcaatggttcagtttacgcgggaaacaagttcaccagattctggaagacactggtgctttaattttgttgtttgataatgatgagggacgaaagatatggcagaaccgtttacagggtgctatataccgtgcatcgggttctgcaatttctagctttcctggagttgctctcccatcagaggcccactcattcaaaggcaactttcttgatgttgctgacacagagaaattatttgttgcgggcattcttgatgaattaaagatatgtttttcatgtggctatgagagtaaccacaaactaaaaaaaattctactagctaaggagagcagcctgtttgaatttcgggcagttggtggccaggttgaactctcaatgaaaggtggcaatttactgataggaactattttggggtcactagaaattgaagaccagtattactatccagggagtcctgtgccaaggttcttggcaaggtcttttattaatagcatgcaaactcaagaactcccgtctcttagccgaaagaacagtgcaggacctagaaacaccccattgatgaaaaatgacagtgaggaaaactttttcgaagcatcagatgattttgatgaatttgaaacacctatgcatcaaaagaggactatatcagactattttagcacccagaaatttttgcctactagcgttccttccctacagccgccaacatttaagcgcattcctgatttgataccagatactgaacttcaaactggcaaattcacattggaaggtagtggcactttcaatagttttgtgaaagctcagatagtgatttatgatcaacattctccccagtacaacagcttggataacagggtagttgtaactgttgccactttatccttcttttgccatcggccaactgttattgcaatcatggaatttatgaatgccatcaaccttgcaaacgggtctgatactgataaagataaaagcacttatcctgctactgtagaagatagtgcaattgaggaatctaagtctgatctggaatcagagccatcaataaaacccttactggctaaaggtaaaagcagaatagtttttcatcttacatccagcatggcagaggcacagatattactgatgaatgaaaatggtgaccggcttgctactttatcacaaaataatctctcgactgatataaaggtgttcacatcatcattcagcataaaggctgcactcggaaaccttaaaataagtgatgatagccttcttagcagccacccttacttttgggtttgtgatatgcgaaatcctggaggtcgttcatttgtggagatcgactttagttcatacaatgttggtgatgaagactattgtggttatgactatagccttgtagggcagctttcagaagttagaattgtttacctcaaccgttttgttcaagagattatcagttattttatgggacttgtgccaaaaagttctgatgccgttgtaaagctgaaagacaataagactaactcagagaagtgggttagcaaaaccgatatggaaggatcacctgctctcaaattggatgtttcattcagcaggcctataattgttatgccccgtgaaactaatagtaatgactttttggagcttgatgttctatacataacagtccaaaatgaattccaatggataggtggtgataagaatgagatgagcactgttcacttagacattttaacagttacagtacgggacataaatttagttattggtatgaatatggtgcgtggtgaaaccataattcaagatgtagaaggtctctcctttgaacttcgtagatcattgcgtgatttgagacatcagttgccagtggtggaggcagcaattaaggtggatgttttgaaagcaacactatccaatcgagaatatgaaattatttctgaatgtgcattgtctaacttctctgagacaccacatcctgtgcctactctggatgatcctcgatatggcacttccactactccatcccatgtatcagcttcttcttcagaaagtattcatgtcttgtccgaaggtgcagaaacatggatagctaataaattttctgtctcaataaatctggttgagctttctctgcattcaggatcgacaagagattctcctctggcgagcgttcaggcgagtggagcatggcttttctataaatcaaacacacggggagaaaattttatgtatgctactctcaaaggattttctgtttttgatgatcgtgaaggaaccaaagatgagttaaggcttgccattgggaaatcagcatctgttcgggacacatcatctgttgatggctatgataatcctaatgaacttgattcaggtgaacgaagaatacaaaaggatctaggccttgagccaatcccctcgatgcttattcttgatgccatcttccgaaaatcttcgtcatccgtctctgtctgtgttcagcggcccaagtttcttgtggcacttgacttcttactagcagtaatcgaattctttgtgccatctgctcagagtcttctatccaatgatgaagacaaggaccttttacatatgatcactccagtagtattgaatgatcaaatttatttccaggagcattcaacatttagtctttcacctcagaagcccttgattgttgataatgaaagatttgatcacttcgtatatgatgggaagggtggaaagttatatttgctggatagtgaggggaaaattctctcaagcccttgtactgagagtttcattcatgtgcttgggtgtaagagattgcaatttcggaatgtcactatagtgaatggtgaatatttggattcctgtatctctctcggtgatgatagctgttattcagcatcaaggaatgaccatgtctacttagtaagagaagatgatgggtccttgtcaacccccagcaaggaaattagaggagacagtgttaaaaatgggagtgctgatatatcaaccgaatttattatggaactacaggctattggaccagagcttactttctatagtacatcaaggaatgctggtgaaaacttagcactgtcaacaaaggttattcatgcccacacagatgcattttgcaggcttataatgaaaggcgacagtatggagatgaatggaaacatacttggtttaaagatggagagtaatggcatcagagttatagaaccatttgacatggtcgtgaaatattccaatgcgtctggaaagacaaatttgcatctactagtttctgaaatatatatgaatttttccttcagtattctcagactgtttttagcagttgaggaagaaatttcagcatttcttaggatgtcgtcaaagaaaatttcactggtgtgttaccagtttgacaaagttgcaactatgcaaggtaatgctaatgatcaagtgttatctttctggcgaccgcgtgctccatctggatatgccatttttggcgattatctcacaccaatgaacgagcctcctactaaaggagttcttgctctgaacacaaacattgttagggtcaaaaggcctttatcgtacaaactagtgtggcaatctggttctccaagaacaaacatttttcatcagaaggacttggaggataagatctctaatattgaccagctctgctctgtttggttacctgtggcacctgcgggttatgttgcaatgggttgtgttgcttcatctggaactgctgaaccacctttgtcttcagctttctgtttaactgcttctttggtttcatcatgtaatctaagggattgcattgcactgagggataacactaacatgatattctggcgagttgataatgcttttggttcctttttacctggagatcctgcaagcatgagtgtggatgggaatgcttatgatcttcgacatatgctgttcgacagtgcagactcatcttccaagactgtctctagaaggcaagatagtagaaatgatttctctcaactagagagatcagaattgacctcaggtcggctatttgatgctgtggcaagctttaaactaatttggtcaaatagtgggacctcttcaccaaaaaagctctcaatatggcgtccaatgttgtctgaaggaatgttttactttggtgacatagctgttaacgggtatgaaccaccaaattcaactgttgttcttcgtgatactggtgaagacacttttctcagagctcctgaaggttttgaccttgttggtcgaattaagaagcaccggggcactgagggtgtatcattttggtttcctaaagctccttcaggttttgtggcattaggatgtgttgcatctaaaagttctccaaccaaagaggacttcagtttgttaagatgtattagaaatgacatggtggctggaggtcaattttctgaggaaagtttatgggattcatctaatgctagaacatctgaaccttttagcttatggactgttgataatgatgctggtacgtttcttgtgagaagtggatatagaaaacctccaaagaggcttgcactgaagcttgcaggtccacctacatcaagcagttcagatagcatcattgttgatgccaaaattaaaacattttctgctgtttcctttgatgattatggcggaatgtattctatgcagatggtgccattatttggggtgtcctttgacagtgttggactaagttatcatggaggtcctcatcatcttaatgcaactgtgagcttgtcttttgtggccagatcctataatgacaagtatagctcgtgggagccctttattgaaccaacagatgcatttcttaggtaccaattcgacatgaatacaccaggttctcctagacaactccgtattacctcaactcaagaccttaatttgaacatatctgtttccaatacaaacatgttatcgcaagcttatgctagctggaataatattagctgtggtgatgaattgtataagaaggaaaccttttcttctactgagcgaccagttcttgatgttcatcaaagaagaagttattatgttgtcccacaaaataaacttggacaagatatttatgtaagaactactgaaaatagaggttcacttgttactctgttgccctctggggatgataggtccataaaagttccggctttaagggatctatcagattctcatttaaatggaagatctgttaaaccatatcggttgatgataactgccattcttgcggatgcagaggtcaaggatgatgaaggattagaaactggtgaatatatgactgctgtgcggctcttttcagaaaaccattccatatctgttcaacaacagagtgcccgtacttgtgctgctattggagaacacttgtcacagaacaccagaaaggtgaactggaacgaaatgttctttttcaaagtcgaacgtgtgctatactctagagcttcttgtgcttgatgctggtaaaggtcaaccagttggtatatactctgctccattggagcaagttgtgcaaaagctccctcctacctctaatccggactctgtcaaatttgatttggctttaggagaccttatgtcaactaagacagtggaacaggaaactgttaaacctagtggaaaaataagatttgcggtacttgtttctggtagagctagtgtacaacaagggaacagagccagtcctgaaagcaagactggatatattcagattagcccttcaaaagaagggccatggacaagcatgaagttgaactatgctgtacctgcagcatgttggaggtttggtaattgtgtgattgctagtgaagcaacagtcaaggaaggcaacagatacgttagcatacgttcccttgtgtcagttactaatacaaccaatttcattgttgatttacgtctaaaaggaagaatttctcaaagtgcacgggcagatgaacagggagacagttttggtaaagaggatcaaatcctgattggaacgctggagcccaattctactattccagtcccactatcaggcctctcacatcctcttatgccctatatgttgcagttaaggccggcaaaacatcatgatcatgaaaattactcctggagtgatgtccaggagaggcgcagtcaaaccgagtttagaaaggaggagatcctagatttatgtatatcagatctgtatgaatcggaaaacttgctattctgctcacaggtagatggcacctcgaattcttgtcatggactgtggttttgcttgagcatagaaggcaaggaaataggcaaagatgtacagatggaaccaatatatgattggtgcatcattattaagtccccgttgtgtttgacatactatcttcccattgctgcacattatactgtcagttctagccacctcgataatgaagattcaagttgctcccttggcaccttaagtccgggtgaggctgtaaaggttcacaatgttgatccaagaaaccctttgtacttatccctggttccacatggaggatgggaactgatgcatgagcctgttgttatatcacatccaacccaagcaccttccaaatttatcaatctaagaagctctttatcaggaagggttgtacagattctgcttgaacaaagcagtgatagtgactatttgatggcaaggcttatcagaatatatgttccctattggatatctttttctagattgcctacacttactctgcgtctcattgatatttctggaaggaaagagaagaggcgccttctttcacgttcacatctggaaaggggtgagaagcaactctatgatataaaacacgatgaattggttgagggatacactatagcgtctggattaaattttaagggattaggacttctatcatctgttggacatggtggacggtttggatctgtgaaagaattgtcgcctcttggcgatatggatggagcagttgatctttctgcctatgatgatgatggaaaatgcatgcatattcttctttgttcaaagccatcctcgtatcaagctgttccaacaaaggttatccatgtacgcccgtatataacattcacaaacagggccggacaagatttgtacttaaaacttagtattgaggatgagccaaaggtcttacatgcatatgactggagggtttcctttatgtactccaaggggactactgacaaactgcaggtccgactagtggatacagaatggtgccaacctctggagatagtaaaagaagacactattgttatagcaatgagaaagcagggtggtactcagaaatttgtaaaagctgagatacgtggttatgaggaaggttcaagattcttgattgtattccgtctgggcccagcatatggaccaatcaggattgagaaccggacgagtcataccacaatcagtacttgccagtctggtttaggggaggagagttggatccaagtgaagccacatgcaaccagaaaatattcttgggatgacccatatggacagaaagttattgatgttagcattgataaaggcgatgatacttgtgtcctatgtgttgacctggaaaatcctattggaagttccaccagttttagggaacatggcctcatgtttactgttgataccagtgacattaagatattgaagtttgctgattacataaggaaagaggaagtatatggattgcctggatctgaactgactgatcaccaaggatcgtcattgaaggaaaatgagacagagccaggtgctggacccttggagctcattgttgaacttggagttgttggaatatctttgattgatcataagccaagagagcttttatacttgcatctgcagaaggttttcgtttcatacttgactggttatgattttgggaccactagcaggtttaaattaatccttggcgagttgcaactagataatcagttgccactgtctacaatgcctgttgttttgtctaccgagagcaggcctgattcaaatcgttctgttttcaaagcaaacgttgctgttagcaatgtaacttctaatggcattcaagtttacccacatgtctatatccgggtaactgatcaaacatggagactaaacattcatgaacctattatttgggcactgtttgacttctacagcaatcttcgttttgtcaccaccatcaacagcacaactgtcacggaagtggatcctgagatacgaatagagctcattgatatttcagagataaggctaaaaatatctctggaaactgcgcctagtcaaagacctcgtggtgtcctaggcatatggagccccatcctatctgctgtgggtaatgcactcaagattcaggtgcatctgaggaaggtcatgcacagaagccggtttatgcggaagagctccatcatccctgctatcacgaaccgaatcaagagagatctgattcacaatccgctacatctaatcttttctgtggattttcttggagtaacaaaatcaactttatcatcacttagtaaaggatttgcagagctctctactgatgggcaatttcttcagctgagatcaaagcaggtttggtcaaggagaatcactggtgttggtgatgggctagttcaagggactgaagcatttgctcagggtttggctttcggggtttctggtgttttaagaaagccagttgagagtgccagacagtatggtgttataggtattgcacctggcattggccgtgcttttgtgggtttcattgtccaacctttaagtggggctctggattttttttcactgacggttgatggaatcagtgctagttttatgagatgtgttaacattttaagtaacaaatctgttccgcagaggataagagatcctcgtgctatacatcgtgatggtatagtaagagactatgacaaatttgaagctgctggccagatggccctttatctggcagaagctagcagatattttgcatgcacggatttatttcgagaaccttctaagtacgcatggtctgattactatgaagaccattttattttaccaagccagaggattgctttagtaactaataagcgggtgatgctgcttcagtgcttggatctagataaaatggacaagaaaccttctaaaatactttgggatgttccttgggaagaagtactttcattggagctagcaaaagctgggtatcagaggccttcacatgtaatcatacatctgaagaattttaggaggtcagagaactttgtaaggcttattaagtgcaacattgacaacgaacgggaacctcaggctctttcactttgctgttcaattcggaaaatgtggagatctcaccaagcagcaatgaaagttataccattgaaggttccatcaggccagcgtcatgtgtattttgtgtcagatgatgataaaaaggaatcccacagtttatctaggcctttgctaagctcgggaggaacctctactgatgttgagcaacagttcataaacaatacagttcactttcagaaaatgtggagcagtgaaccagaaattcagagccgatgcaaactagttgccaagcagattgcggatgacggaagggtgttcagcatatggaggcctctctgccctaatgggtatgtctcaattggtgatattgcgcatgttggcatccatccaccgcattttgctgctgtatacaagaatatcaatgggaactttgcactgcctcttggctatgacctggtttggagaaattgtgctgaggattacaagagccctgtatcaatatggcttccaaggccaccggggggatacgtagctcttgggtgtgttgctgtcccttcattcaaggagcccactcttgactgtgctttctgtgtggatgagagactcgcggaggatgccgcgtatgaggagcaaatcatatgggcctcatcggatgcttacccatggggatgctatatctaccaagttcagagcgcctcaatgcagttcatggcacttcgtgtcccaaaagaacaatctgagctaaggcccaagaagatattggagtcatttctgcagcaagcatcagagactcaaacgtcccgtgcatgaagaagctgcacatgatgcttgtgcgtgcaagagaactcggctgggacaaagggcaagtctcgtgcaagaaagctcgaagaatgccacttctttcggatcactccatttctccgttgtcaaagcatacacagaggacagagccttgcatgccaacactcgggttgacggaagtgttgtatactagaatagtaggttaaaggttgtaaatgtaaagttttgtaacgtttgatatagtttttgtccagctacatttgttaaggcccatgtggacgtgggccatattagttgtggctacatattctactaagaagttctcaggactaatcatactttctctaatttaaggttgttaaggcccatgtggacgtgggccatactagttgtggctatatattctactaagggcccgtttggtaaaacttcagctcctgcttctttagcttcagattctgatcctcgtgaggagctgatcctcctgattttcctagaaaatcagaatcatttttaaaaccgtttggcaagtaaactgattcttgtcttctgagggttggtggcctatggcgattgtctg

SEQ ID NO: 80652 - DNA, 12615 bp, Zea Mays
cctggtccctggtccctactcccatttctcctcgactcgtccaagacaaggaaagtaggaaaccgcctgccctgcgtgtgggctgtctgctgtgttgctagcccagtactttctcttctcgctcacgcggcacgccgagcaaggggaccgacaggcggagcgcttctcagcccctccgcaccttcgggtctcgcgttggtggcgccggcgggcgctgccgatcgccggcggcggccgagatgttggaggaccaggtcgccttcctgctgcagaagtacctcggcaactacgtccggggcctcagcaaggaggcgctaaagatcagcgtctggagaggtgatgtagagctcacaaacatgcaactgaagccagaagctctcaattcattgaaattacctgttagagtcaaagctggctttcttggttctgtgaagctcaaggttccatggagcaggttgggacaagagccagttttggtttatcttgatcgaatttttatactagctgaaccagcaacacaagttgaaggttgcagcgaggatgctgtccaggaagcaaaaagaagtcgagttagggaaatggagatcaaattgttggagcgccaacagcaactgaaatctgaactaagttcatcatggctagggtctttcattggcactgtaattggaaatatcaagttatccattggcaatattcatatcagatacgaagacgtagagagcaatcctggccacccttttgcagcaggtctggtactttcaaagctttcagcagttacagtggatgaccttggcaaggagacttttgccacaggtggtgatttggaccgagtgaaaaagtctgttgaacttgagagtctggcggtgtattttgactctgatagcagttcttggattgtggataaaccctgggaggatttacttccatcagagtggagtcaggtttttgagtttcaggagcaggatggttccagatctgcttcgaaaaagcatgcctacattttacagcctgtatctggcaaagcaaaatatacaaagatacaacttactgaggcaaagaaaacaggacaagcattgcaaaatactgcagtggatttggatgatgttactctgtcgttgtcgaaggatggctacagggacatgttaaagttggctgataatttctctacattcaatcaacggctgagatatgctcatctccgaccatcttcaccattaaaatcggatccacgagcttggtggaagtatgcatacaaggtggtgactcaggaaatgaagaaagcaagcgggaggctatcttgggagcaattattgagaaatgcaagacttcggaagacatatgtatctttatatgcatccctcttaaaatctgacatgagtcgactggttgttgatgaccatgaggagattaagaggctggaccgtgaacttgatatggaggttattctacagtggaggatgttagctcacaagtttgtagaacagtcggtggaaacataccagtatgctcaacaaaataagaagtcctggtggtcatttggatggactggctcttcaaaggatgaggaagattcaaagagttttactgatgaagattgggaaagactaaatcggattattgggtacaaagaaaccaacgagtatgtcactgatcaacaggatatgaaactgatgcaatttgattttgaaatacgtatgaaacataatgcatcaaagcttaccattgatgattcggagtgccttgctgatctctcatgccaagatttctgctgcaacttgaaaatgtatccggaggcaaaaatatttgatctgaagctgggttcctacaggcttttatctccatatggcctgcttgctgagagtgcaagtgtcatcgattcttttgttggcctcttctcctacaaaccttttgatgagcaactggactggagtttgacagctaaagcttcgccttgttatataacttatttaaaggattcagttgatcaaattgttggcttcttcaagagtagccctaccattagccagaacctggcactagagactgctgctgctgtacagatgacactagatgaagtgaaacggactgctcaacagcaaatgactcgggtgctaaaagatcagtccaggttttcactgaacatggatattgctgctccaaaaattaccgttcctaccaagttccgaccagatgatgtacatgagactaagcttttgcttgaccttggaaatttagttcttcggacagaggaaatatgggatgcctatacttcagaagagcaggatatatatctaaactttaatttggtgcttagtgatgtctctgcatttctggtggatggtgattaccattggaatgaaacatctgatgaaaagaacttgttgccagtaattgacaaatgtgggattgctttgaaacttcagcagatccagttagaaagtcctctatatccttccacaagaatggcgatacgggtgccttccctaggatttcatttctctcctgcacgctatcatcgtttaatggaaattttaaaattttttcaagatggtgctagtgataatagcaattcagatcatgaacacttgtgggatcatgctgactttgaaggatggtcatctcttctcacatggaagggtgttggaaaccgggaagctgtttggcaacacagatatttgcgtctagtgggtccatttctctatgtatttgaaaatttaatgtctacaacgtacaagcaatggttcagtttacgcgggaaacaagttcaccaggtacctactgagcttacaaatggcgtgcataacatcctggcgctgcatgattccggccaagttaatcccaaggaacggtctagtgacacttcataacattctttttctacttcagttcccctggcataattgattatctgaataaactttattcttttacagattctggaagacactggtgctttaattttgttgtttgataatgatgagggacgaaagatatggcagaaccgtttacagggtgctatataccgtgcatcgggttctgcaatttctagctttcctggagttgctctcccatcagaggcccactcattcaaaggcaactttcttgatgttgctgacacagagaaattatttgttgcgggcattcttgatgaattaaagatatgtttttcatgtggctatgagagtaaccacaaactaaaaaaaattctactagctaaggagagcagcctgtttgaatttcgggcagttggtggccaggttgaactctcaatgaaaggtggcaatttactgataggaactattttggggtcactagaaattgaagaccagtattactatccagggagtcctgtgccaaggttcttggcaaggtcttttattaatagcatgcaaactcaagaactcccgtctcttagccgaaagaacagtgcaggacctagaaacaccccattgatgaaaaatgacagtgaggaaaactttttcgaagcatcagatgattttgatgaatttgaaacacctatgcatcaaaagaggactatatcagactattttagcacccagaaatttttgcctactagcgttccttccctacagccgccaacatttaagcgcattcctgatttgataccagatactgaacttcaaactggcaaattcacattggaaggtagtggcactttcaatagttttgtgaaagctcagatagtgatttatgatcaacattctccccagtacaacagcttggataacagggtagttgtaactgttgccactttatccttcttttgccatcggccaactgttattgcaatcatggaatttatgaatgccatcaaccttgcaaacgggtctgatactgataaagataaaagcacttatcctgctactgtagaagatagtgcaattgaggaatctaagtctgatctggaatcagagccatcaataaaacccttactggctaaaggtaaaagcagaatagtttttcatcttacatccagcatggcagaggcacagatattactgatgaatgaaaatggtgaccggcttgctactttatcacaaaataatctctcgactgatataaaggtgttcacatcatcattcagcataaaggctgcactcggaaaccttaaaataagtgatgatagccttcttagcagccacccttacttttgggtttgtgatatgcgaaatcctggaggtcgttcatttgtggagatcgactttagttcatacaatgttggtgatgaagactattgtggttatgactatagccttgtagggcagctttcagaagttagaattgtttacctcaaccgttttgttcaagagattatcagttattttatgggacttgtgccaaaaagttctgatgccgttgtaaagctgaaagacaataagactaactcagagaagtgggttagcaaaaccgatatggaaggatcacctgctctcaaattggatgtttcattcagcaggcctataattgttatgccccgtgaaactaatagtaatgagtaaggatccttttgtgtatctgaatatggtttgttcatttacttggatcatgtgtttaagacgatcacttcactttgcagctttttggagcttgatgttctatacataacagtccaaaatgaattccaatggataggtggtgataagaatgagatgagcactgttcacttagacattttaacagttacagtacgggacataaatttagttattggtatgaatatggtgcgtggtgaaaccataattcaagatgtagaaggtctctcctttgaacttcgtagatcattgcgtgatttgagacatcagttgccagtggtggaggcagcaattaaggtggatgttttgaaagcaacactatccaatcgagaatatgaaattatttctgaatgtgcattgtctaacttctctgagacaccacatcctgtgcctactctggatgatcctcgatatggcacttccactactccatcccatgtatcagcttcttcttcagaaagtattcatgtcttgtccgaaggtgcagaaacatggatagctaataaattttctgtctcaataaatctggttgagctttctctgcattcaggatcgacaagagattctcctctggcgagcgttcaggcgagtggagcatggcttttctataaatcaaacacacggggagaaaattttatgtatgctactctcaaaggattttctgtttttgatgatcgtgaaggaaccaaagatgagttaaggcttgccattgggaaatcagcatctgttcgggacacatcatctgttgatggctatgataatcctaatgaacttgattcaggtgaacgaagaatacaaaaggatctaggccttgagccaatcccctcgatgcttattcttgatgccatcttccgaaaatcttcgtcatccgtctctgtctgtgttcagcggcccaagtttcttgtggcacttgacttcttactagcagtaatcgaattctttgtgccatctgctcagagtcttctatccaatgatgaagacaaggaccttttacatatgatcactccagtagtattgaatgatcaaatttatttccaggagcattcaacatttagtctttcacctcagaagcccttgattgttgataatgaaagatttgatcacttcgtatatgatgggaagggtggaaagttatatttgctggatagtgaggggaaaattctctcaagcccttgtactgagagtttcattcatgtgcttgggtgtaagagattgcaatttcggaatgtcactatagtgaatggtgaatatttggattcctgtatctctctcggtgatgatagctgttattcagcatcaaggaatgaccatgtctacttagtaagagaagatgatgggtccttgtcaacccccagcaaggaaattagaggagacagtgttaaaaatgggagtgctgatatatcaaccgaatttattatggaactacaggctattggaccagagcttactttctatagtacatcaaggaatgctggtgaaaacttagcactgtcaacaaaggttattcatgcccacacagatgcattttgcaggcttataatgaaaggcgacagtatggagatgaatggaaacatacttggtttaaagatggagagtaatggcatcagagttatagaaccatttgacatggtcgtgaaatattccaatgcgtctggaaagacaaatttgcatctactagtttctgaaatatatatgaatttttccttcagtattctcagactgtttttagcagttgaggaagaaatttcagcatttcttaggatgtcgtcaaagaaaatttcactggtgtgttaccagtttgacaaagttgcaactatgcaaggtaatgctaatgatcaagtgttatctttctggcgaccgcgtgctccatctggatatgccatttttggcgattatctcacaccaatgaacgagcctcctactaaaggagttcttgctctgaacacaaacattgttagggtcaaaaggcctttatcgtacaaactagtgtggcaatctggttctccaagaacaaacatttttcatcagaaggacttggaggataagatctctaatattgaccagctctgctctgtttggttacctgtggcacctgcgggttatgttgcaatgggttgtgttgcttcatctggaactgctgaaccacctttgtcttcagctttctgtttaactgcttctttggtttcatcatgtaatctaagggattgcattgcactgagggataacactaacatgatattctggcgagttgataatgcttttggttcctttttacctggagatcctgcaagcatgagtgtggatgggaatgcttatgatcttcgacatatgctgttcgacagtgcagactcatcttccaagactgtctctagaaggcaagatagtagaaatgatttctctcaactagagagatcagaattgacctcaggtcggctatttgatgctgtggcaagctttaaactaatttggtcaaatagtgggacctcttcaccaaaaaagctctcaatatggcgtccaatgttgtctgaaggaatgttttactttggtgacatagctgttaacgggtatgaaccaccaaattcaactgttgttcttcgtgatactggtgaagacacttttctcagagctcctgaaggttttgaccttgttggtcgaattaagaagcaccggggcactgagggtgtatcattttggtttcctaaagctccttcaggttttgtggcattaggatgtgttgcatctaaaagttctccaaccaaagaggacttcagtttgttaagatgtattagaaatgacatggtggctggaggtcaattttctgaggaaagtttatgggattcatctaatgctagaacatctgaaccttttagcttatggactgttgataatgatgctggtacgtttcttgtgagaagtggatatagaaaacctccaaagaggcttgcactgaagcttgcaggtccacctacatcaagcagttcagatagcatcattgttgatgccaaaattaaaacattttctgctgtttcctttgatgattatggcggaatgatggtgccattatttggggtgtcctttgacagtgttggactaagttatcatggaggtcctcatcatcttaatgcaactgtgagcttgtcttttgtggccagatcctataatgacaagtatagctcgtgggagccctttattgaaccaacagatgcatttcttaggtaccaattcgacatgaatacaccaggttctcctagacaactccgtattacctcaactcaagaccttaatttgaacatatctgtttccaatacaaacatgttatcgcaagcttatgctagctggaataatattagctgtggtgatgaattgtataagaaggaaaccttttcttctactgagcgaccagttcttgatgttcatcaaagaagaagttattatgttgtcccacaaaataaacttggacaagatatttatgtaagaactactgaaaatagaggttcacttgttactctgttgccctctggggatgataggtccataaaagttccggctttaagggatctatcagattctcatttaaatggaagatctgttaaaccatatcggttgatgataactgccattcttgcggatgcagaggtcaaggatgatgaaggattagaaactggtgaatatatgactgctgtgcggctcttttcagaaaaccattccatatctgttcaacaacagagtgcccgtacttgtgctgctattggagaacacttgtcacagaacaccagaaaggtgaactggaacgaaatgttctttttcaaagtcgaacgtgtggacagctatactctagagcttcttgtgcttgatgctggtaaaggttcgtgattttagttcacaacaaatgcctttttttttgttttttcccaactctagtttatagtttatgttgagaacaggtcaaccagttggtatatactctgctccattggagcaagttgtgcaaaagctccctcctacctctaatccggactctgtcaaatttgatttggctttaggagaccttatgtcaactaagacagtggaaactgttaaacctagtggaaaaataagatttgcggtacttgtttctggtagagctagtgtacaacaagggaacagagccagtcctgaaagcaagactggatatattcagattagcccttcaaaagaagggccatggacaagcatgaagttgaactatgctgtacctgcagcatgttggaggtttggtaattgtgtgattgctagtgaagcaacagtcaaggaaggcaacagatacgttagcatacgttcccttgtgtcagttactaatacaaccaatttcattgttgatttacgtctaaaaggaagaatttctcaaagtgcacgggcagatgaacagggagacagttttggtaaagaggatcaaatcctgattggaacgctggagcccaattctactattccagtcccactatcaggcctctcacatcctcttatgccctatatgttgcagttaaggccggcaaaacatcatgatcatgaaaattactcctggagtgatgtccaggagaggcgcagtcaaaccgagtttagaaaggaggagatcctagatttatgtatatcagatctgtatgaatcggaaaacttgctattctgctcacaggtagatggcacctcgaattcttgtcatggactgtggttttgcttgagcatagaaggcaaggaaataggcaaagatgtacagatggaaccaatatatgattggtgcatcattattaagtccccgttgtgtttgacatactatcttcccattgctgcacattatactgtcagttctagccacctcgataatgaagattcaagttgctcccttggcaccttaagtccgggtgaggctgtaaaggttcacaatgttgatccaagaaaccctttgtacttatccctggttccacatggaggatgggaactgatgcatgagcctgttgttatatcacatccaacccaagcaccttccaaatttatcaatctaagaagctctttatcaggaagattgcctacacttactctgcgtctcattgatatttctggaaggaaagagaagaggcgccttctttcacgttcacatctggaaaggggtgagaagcaactctatgatataaaacacgatgaattggttgagggatacactatagcgtctggattaaattttaagggattaggacttctatcatctgttggacatggtggacggtttggatctgtgaaagaattgtcgcctcttggcgatatggatggagcagttgatctttctgcctatgatgatgatggaaaatgcatgcatattcttctttgttcaaagccatcctcgtatcaagctgttccaacaaaggttatccatgtacgcccgtatataacattcacaaacagggccggacaagatttgtacttaaaacttagtattgaggatgagccaaaggtcttacatgcatatgactggagggtttcctttatgtactccaaggggactactgacaaactgcaggtttaaattaatccttggcgagttgcaactagataatcagttgccactgtctacaatgcctgttgttttgtctaccgagagcaggcctgattcaaatcgttctgttttcaaagcaaacgttgctgttagcaatgtaacttctaatggcattcaagtttacccacatgtctatatccgggtaactgatcaaacatggagactaaacattcatgaacctattatttgggcactgtttgacttctacagcaatcttcgttttgtcaccaccatcaacagcacaactgtcacggaagtggatcctgagatacgaatagagtgcatctgaggaaggtcatgcacagaagccggtttatgcggaagagctccatcatccctgctatcacgaaccgaatcaagagagatctgattcacaatccgctacatctaatcttttctgtggattttcttggagtaacaaaatcaactttatcatcacttagtaaaggatttgcagagctctctactgatgggcaatttcttcagctgagatcaaagcaggtttggtcaaggagaatcactggtgttggtgatgggctagttcaagggactgaagcatttgctcagggtttggctttcggggtttctggtgttttaagaaagccagttgagagtgccagacagtatggtgttataggtattgcacctggcattggccgtgcttttgtgggtttcattgtccaacctttaagtggggctctggattttttttcactgacggttgatggaatcagtgctagttttatgagatgtgttaacattttaagtaacaaatctgttccgcagaggataagagatcctcgtgctatacatcgtgatggtatagtaagagactatgacaaatttgaagctgctggccagatggccctttatctggcagaagctagcagatattttgcatgcacggatttatttcgagaaccttctaagtacgcatggtctgattactatgaagaccattttattttaccaagccagaggattgctttagtaactaataagcgggtgatgctgcttcagtgcttggatctagataaaatggacaagaaaccttctaaaatactttgggatgttccttgggaagaagtactttcattggagctagcaaaagctgggtatcagaggccttcacatgtaatcatacatctgaagaattttaggaggtcagagaactttgtaaggcttattaagtgcaacattgacaacgaacgggaacctcaggctctttcactttgctgttcaattcggaaaatgtggagatctcaccaagcagcaatgaaagttataccattgaaggttccatcaggccagcgtcatgtgtattttgtgtcagatgatgataaaaaggaatcccacagtttatctaggcctttgctaagctcgggaggaacctctactgatgttgagcaacagttcataaacaatacagttcactttcagaaaatgtggagcagtgaaccagaaattcagagccgatgcaaactagttgccaagcagattgcggatgacggaagggtgttcagcatatggaggcctctctgccctaatgggtttggagaaattgtgctgaggattacaagagccctgtatcaatatggcttccaaggccaccggggggatacgtagctcttgggtgtgttgctgtcccttcattcaaggagcccactcttgactgtgctttctgtgtggatgagagactcgcggaggatgccgcgtatgaggagcaaatcatatgggcctcatcggatgcttacccatggggatgctatatctaccaagttcagagcgcctcaatgcagttcatggcacttcgtgtcccaaaagaacaatctgagctaaggcccaagaagatattggagtcatttctgcagcaagcatcagagactcaaacgtcccgtgcatgaagaagctgcacatgatgcttgtgcgtgcaagagaactcggctgggacaaagggcaagtctcgtgcaagaaagctcgaagaatgccacttctttcggatcactccatttctccgttgtcaaagcatacacagaggacagagccttgcatgccaacactcgggttgacggaagtgttgtatactagaatagtaggttaaaggttgtaaatgtaaagttttgtaacgtttgatatagtttttgtccagctacatttgttaaggcccatgtggacgtgggccatattagttgtggctacatattctactaagaagttctcaggactaatcatactttctctaatttaaggttgttaaggcccatgtggacgtgggccatactagttgtggctatatattctactaagggcccgtttggtaaaacttcagctcctgcttctttagcttcagattctgatcctcgtgaggagctgatcctcctgattttcctagaaaatcagaatcatttttaaaaccgtttggcaagtaaactgattcttgtcttctgagggttggtggcctatggcgattgtctg

SEQ ID NO: 80653 - DNA, 13311 bp, Zea Mays
ctcccatttctcctcgactcgtccaagacaaggaaagtaggaaaccgcctgccctgcgtgtgggctgtctgctgtgttgctagcccagtactttctcttctcgctcacgcggcacgccgagcaaggggaccgacaggcggagcgcttctcagcccctccgcaccttcgggtctcgcgttggtggcgccggcgggcgctgccgatcgccggcggcggccgagatgttggaggaccaggtcgccttcctgctgcagaagtacctcggcaactacgtccggggcctcagcaaggaggcgctaaagatcagcgtctggagaggtgatgtagagctcacaaacatgcaactgaagccagaagctctcaattcattgaaattacctgttagagtcaaagctggctttcttggttctgtgaagctcaaggttccatggagcaggttgggacaagagccagttttggtttatcttgatcgaatttttatactagctgaaccagcaacacaagttgaaggttgcagcgaggatgctgtccaggaagcaaaaagaagtcgagttagggaaatggagatcaaattgttggagcgccaacagcaactgaaatctgaactaagttcatcatggctagggtctttcattggcactgtaattggaaatatcaagttatccattggcaatattcatatcagatacgaagacgtagagagcaatcctggccacccttttgcagcaggtctggtactttcaaagctttcagcagttacagtggatgaccttggcaaggagacttttgccacaggtggtgatttggaccgagtgaaaaagtctgttgaacttgagagtctggcggtgtattttgactctgatagcagttcttggattgtggataaaccctgggaggatttacttccatcagagtggagtcaggtttttgagtttcaggagcaggatggttccagatctgcttcgaaaaagcatgcctacattttacagcctgtatctggcaaagcaaaatatacaaagatacaacttactgaggcaaagaaaacaggacaagcattgcaaaatactgcagtggatttggatgatgttactctgtcgttgtcgaaggatggctacagggacatgttaaagttggctgataatttctctacattcaatcaacggctgagatatgctcatctccgaccatcttcaccattaaaatcggatccacgagcttggtggaagtatgcatacaaggtggtgactcaggaaatgaagaaagcaagcgggaggctatcttgggagcaattattgagaaatgcaagacttcggaagacatatgtatctttatatgcatccctcttaaaatctgacatgagtcgactggttgttgatgaccatgaggagattaagaggctggaccgtgaacttgatatggaggttattctacagtggaggatgttagctcacaagtttgtagaacagtcggtggaaacataccagtatgctcaacaaaataagaagtcctggtggtcatttggatggactggctcttcaaaggatgaggaagattcaaagagttttactgatgaagattgggaaagactaaatcggattattgggtacaaagaaaccaacgagtatgtcactgatcaacaggatatgaaactgatgcaatttgattttgaaatacgtatgaaacataatgcatcaaagcttaccattgatgattcggagtgccttgctgatctctcatgccaagatttctgctgcaacttgaaaatgtatccggaggcaaaaatatttgatctgaagctgggttcctacaggcttttatctccatatggcctgcttgctgagagtgcaagtgtcatcgattcttttgttggcctcttctcctacaaaccttttgatgagcaactggactggagtttgacagctaaagcttcgccttgttatataacttatttaaaggattcagttgatcaaattgttggcttcttcaagagtagccctaccattagccagaacctggcactagagactgctgctgctgtacagatgacactagatgaagtgaaacggactgctcaacagcaaatgactcgggtgctaaaagatcagtccaggttttcactgaacatggatattgctgctccaaaaattaccgttcctaccaagttccgaccagatgatgtacatgagactaagcttttgcttgaccttggaaatttagttcttcggacagaggaaatatgggatgcctatacttcagaagagcaggatatatatctaaactttaatttggtgcttagtgatgtctctgcatttctggtggatggtgattaccattggaatgaaacatctgatgaaaagaacttgttgccagtaattgacaaatgtgggattgctttgaaacttcagcagatccagttagaaagtcctctatatccttccacaagaatggcgatacgggtgccttccctaggatttcatttctctcctgcacgctatcatcgtttaatggaaattttaaaattttttcaagatggtgctagtgataatagcaattcagatcatgaacacttgtgggatcatgctgactttgaaggatggtcatctcttctcacatggaagggtgttggaaaccgggaagctgtttggcaacacagatatttgcgtctagtgggtccatttctctatgtatttgaaaatttaatgtctacaacgtacaagcaatggttcagtttacgcgggaaacaagttcaccaggtacctactgagcttacaaatggcgtgcataacatcctggcgctgcatgattccggccaagttaatcccaaggaacggtctagtgacacttcataacattctttttctacttcagttcccctggcataattgattatctgaataaactttattcttttacagattctggaagacactggtgctttaattttgttgtttgataatgatgagggacgaaagatatggcagaaccgtttacagggtgctatataccgtgcatcgggttctgcaatttctagctttcctggagttgctctcccatcagaggcccactcattcaaaggcaactttcttgatgttgctgacacagagaaattatttgttgcgggcattcttgatgaattaaagatatgtttttcatgtggctatgaggttgaactctcaatgaaaggtggcaatttactgataggaactattttggggtcactagaaattgaagaccagtattactatccagggagtcctgtgccaaggttcttggcaaggtcttttattaatagcatgcaaactcaagaactcccgtctcttagccgaaagaacagtgcaggacctagaaacaccccattgatgaaaaatgacagtgaggaaaactttttcgaagcatcagatgattttgatgaatttgaaacacctatgcatcaaaagaggactatatcagactattttagcacccagaaatttttgcctactagcgttccttccctacagccgccaacatttaagcgcattcctgatttgataccagatactgaacttcaaactggcaaattcacattggaaggtagtggcactttcaatagttttgtgaaagctcagatagtgatttatgatcaacattctccccagtacaacagcttggataacagggtagttgtaactgttgccactttatccttcttttgccatcggccaactgttattgcaatcatggaatttatgaatgccatcaaccttgcaaacgggtctgatactgataaagataaaagcacttatcctgctactgtagaagatagtgcaattgaggaatctaagtctgatctggaatcagagccatcaataaaacccttactggctaaaggtaaaagcagaatagtttttcatcttacatccagcatggcagaggcacagatattactgatgaatgaaaatggtgaccggcttgctactttatcacaaaataatctctcgactgatataaaggtgttcacatcatcattcagcataaaggctgcactcggaaaccttaaaataagtgatgatagccttcttagcagccacccttacttttgggtttgtgatatgcgaaatcctggaggtcgttcatttgtggagatcgactttagttcatacaatgttggtgatgaagactattgtggttatgactatagccttgtagggcagctttcagaagttagaattgtttacctcaaccgttttgttcaagagattatcagttattttatgggacttgtgccaaaaagttctgatgccgttgtaaagctgaaagacaataagactaactcagagaagtgggttagcaaaaccgatatggaaggatcacctgctctcaaattggatgtttcattcagcaggcctataattgttatgccccgtgaaactaatagtaatgactttttggagcttgatgttctatacataacagtccaaaatgaattccaatggataggtggtgataagaatgagatgagcactgttcacttagacattttaacagttacagtacgggacataaatttagttattggtatgaatatggtgcgtggtgaaaccataattcaagatgtagaaggtctctcctttgaacttcgtagatcattgcgtgatttgagacatcagttgccagtggtggaggcagcaattaaggtggatgttttgaaagcaacactatccaatcgagaatatgaaattatttctgaatgtgcattgtctaacttctctgagacaccacatcctgtgcctactctggatgatcctcgatatggcacttccactactccatcccatgtatcagcttcttcttcagaaagtattcatgtcttgtccgaaggtgcagaaacatggatagctaataaattttctgtctcaataaatctggttgagctttctctgcattcaggatcgacaagagattctcctctggcgagcgttcaggcgagtggagcatggcttttctataaatcaaacacacggggagaaaattttatgtatgctactctcaaaggattttctgtttttgatgatcgtgaaggaaccaaagatgagttaaggcttgccattgggaaatcagcatctgttcgggacacatcatctgttgatggctatgataatcctaatgaacttgattcaggtgaacgaagaatacaaaaggatctaggccttgagccaatcccctcgatgcttattcttgatgccatcttccgaaaatcttcgtcatccgtctctgtctgtgttcagcggcccaagtttcttgtggcacttgacttcttactagcagtaatcgaattctttgtgccatctgctcagagtcttctatccaatgatgaagacaaggaccttttacatatgatcactccagtagtattgaatgatcaaatttatttccaggagcattcaacatttagtctttcacctcagaagcccttgattgttgataatgaaagatttgatcacttcgtatatgatgggaagggtggaaagttatatttgctggatagtgaggggaaaattctctcaagcccttgtactgagagtttcattcatgtgcttgggtgtaagagattgcaatttcggaatgtcactatagtgaatggtgaatatttggattcctgtatctctctcggtgatgatagctgttattcagcatcaaggaatgaccatgtctacttagtaagagaagatgatgggtccttgtcaacccccagcaaggaaattagaggagacagtgttaaaaatgggagtgctgatatatcaaccgaatttattatggaactacaggctattggaccagagcttactttctatagtacatcaaggaatgctggtgaaaacttagcactgtcaacaaaggttattcatgcccacacagatgcattttgcaggcttataatgaaaggcgacagtatggagatgaatggaaacatacttggtttaaagatggagagtaatggcatcagagttatagaaccatttgacatggtcgtgaaatattccaatgcgtctggaaagacaaatttgcatctactagtttctgaaatatatatgaatttttccttcagtattctcagactgtttttagcagttgaggaagaaatttcagcatttcttaggatgtcgtcaaagaaaatttcactggtgtgttaccagtttgacaaagttgcaactatgcaaggtaatgctaatgatcaagtgttatctttctggcgaccgcgtgctccatctggatatgccatttttggcgattatctcacaccaatgaacgagcctcctactaaaggagttcttgctctgaacacaaacattgttagggtcaaaaggcctttatcgtacaaactagtgtggcaatctggttctccaagaacaaacatttttcatcagaaggacttggaggataagatctctaatattgaccagctctgctctgtttggttacctgtggcacctgcgggttatgttgcaatgggttgtgttgcttcatctggaactgctgaaccacctttgtcttcagctttctgtttaactgcttctttggtttcatcatgtaatctaagggattgcattgcactgagggataacactaacatgatattctggcgagttgataatgcttttggttcctttttacctggagatcctgcaagcatgagtgtggatgggaatgcttatgatcttcgacatatgctgttcgacagtgcagactcatcttccaagactgtctctagaaggcaagatagtagaaatgatttctctcaactagagagatcagaattgacctcaggtcggctatttgatgctgtggcaagctttaaactaatttggtcaaatagtgggacctcttcaccaaaaaagctctcaatatggcgtccaatgttgtctgaaggaatgttttactttggtgacatagctgttaacgggtatgaaccaccaaattcaactgttgttcttcgtgatactggtgaagacacttttctcagagctcctgaaggttttgaccttgttggtcgaattaagaagcaccggggcactgagggtgtatcattttggtttcctaaagctccttcaggttttgtggcattaggatgtgttgcatctaaaagttctccaaccaaagaggacttcagtttgttaagatgtattagaaatgacatggtggctggaggtcaattttctgaggaaagtttatgggattcatctaatgctagaacatctgaaccttttagcttatggactgttgataatgatgctggtacgtttcttgtgagaagtggatatagaaaacctccaaagaggcttgcactgaagcttgcaggtccacctacatcaagcagttcagatagcatcattgttgatgccaaaattaaaacattttctgctgtttcctttgatgattatggcggaatgtattctatgcagatggtgccattatttggggtgtcctttgacagtgttggactaagttatcatggaggtcctcatcatcttaatgcaactgtgagcttgtcttttgtggccagatcctataatgacaagtatagctcgtgggagccctttattgaaccaacagatgcatttcttaggtaccaattcgacatgaatacaccaggttctcctagacaactccgtattacctcaactcaagaccttaatttgaacatatctgtttccaatacaaacatgttatcgcaagcttatgctagctggaataatattagctgtggtgatgaattgtataagaaggaaaccttttcttctactgagcgaccagttcttgatgttcatcaaagaagaagttattatgttgtcccacaaaataaacttggacaagatatttatgtaagaactactgaaaatagaggttcacttgttactctgttgccctctggggatgataggtccataaaagttccggctttaagggatctatcagattctcatttaaatggaagatctgttaaaccatatcggttgatgataactgccattcttgcggatgcagaggtcaaggatgatgaaggattagaaactggtgaatatatgactgctgtgcggctcttttcagaaaaccattccatatctgttcaacaacagagtgcccgtacttgtgctgctattggagaacacttgtcacagaacaccagaaaggtgaactggaacgaaatgttctttttcaaagtcgaacgtgtggacagctatactctagagcttcttgtgcttgatgctggtaaaggtcaaccagttggtatatactctgctccattggagcaagttgtgcaaaagctccctcctacctctaatccggactctgtcaaatttgatttggctttaggagaccttatgtcaactaagacagtggaacaggaaactgttaaacctagtggaaaaataagatttgcggtacttgtttctggtagagctagtgtacaacaagggaacagagccagtcctgaaagcaagactggatatattcagattagcccttcaaaagaagggccatggacaagcatgaagttgaactatgctgtacctgcagcatgttggaggtttggtaattgtgtgattgctagtgaagcaacagtcaaggaaggcaacagatacgttagcatacgttcccttgtgtcagttactaatacaaccaatttcattgttgatttacgtctaaaaggaagaatttctcaaagtgcacgggcagatgaacagggagacagttttggtaaagaggatcaaatcctgattggaacgctggagcccaattctactattccagtcccactatcaggcctctcacatcctcttatgccctatatgttgcagttaaggccggcaaaacatcatgatcatgaaaattactcctggagtgatgtccaggagaggcgcagtcaaaccgagtttagaaaggaggagatcctagatttatgtatatcagatctgtatgaatcggaaaacttgctattctgctcacaggtagatggcacctcgaattcttgtcatggactgtggttttgcttgagcatagaaggcaaggaaataggcaaagatgtacagatggaaccaatatatgattggtgcatcattattaagtccccgttgtgtttgacatactatcttcccattgctgcacattatactgtcagttctagccacctcgataatgaagattcaagttgctcccttggcaccttaagtccgggtgaggctgtaaaggttcacaatgttgatccaagaaaccctttgtacttatccctggttccacatggaggatgggaactgatgcatgagcctgttgttatatcacatccaacccaagcaccttccaaatttatcaatctaagaagctctttatcaggaagattgcctacacttactctgcgtctcattgatatttctggaaggaaagagaagaggcgccttctttcacgttcacatctggaaaggggtgagaagcaactctatgatataaaacacgatgaattggttgagggatacactatagcgtctggattaaattttaagggattaggacttctatcatctgttggacatggtggacggtttggatctgtgaaagaattgtcgcctcttggcgatatggatggagcagttgatctttctgcctatgatgatgatggaaaatgcatgcatattcttctttgttcaaagccatcctcgtatcaagctgttccaacaaaggttatccatgtacgcccgtatataacattcacaaacagggccggacaagatttgtacttaaaacttagtattgaggatgagccaaaggtcttacatgcatatgactggagggtttcctttatgtactccaaggggactactgacaaactgcaggtccgactagtggatacagaatggtgccaacctctggagatagtaaaagaagacactattgttatagcaatgagaaagcagggtggtactcagaaatttgtaaaagctgagatacgtggttatgaggaaggttcaagattcttgattgtattccgtctgggcccagcatatggaccaatcaggattgagaaccggacgagtcataccacaatcagtacttgccagtctggtttaggggaggagagttggatccaagtgaagccacatgcaaccagaaaatattcttgggatgacccatatggacagaaagttattgatgttagcattgataaaggcgatgatacttgtgtcctatgtgttgacctggaaaatcctattggaagttccaccagttttagggaacatggcctcatgtttactgttgataccagtgacattaagatattgaagtttgctgattacataaggaaagaggaagtatatggattgcctggatctgaactgactgatcaccaaggatcgtcattgaaggaaaatgagacagagccaggtgctggacccttggagctcattgttgaacttggagttgttggaatatctttgattgatcataagccaagagagcttttatacttgcatctgcagaaggttttcgtttcatacttgactggttatgattttgggaccactagcaggtttaaattaatccttggcgagttgcaactagataatcagttgccactgtctacaatgcctgttgttttgtctaccgagagcaggcctgattcaaatcgttctgttttcaaagcaaacgttgctgttagcaatgtaacttctaatggcattcaagtttacccacatgtctatatccgggtaactgatcaaacatggagactaaacattcatgaacctattatttgggcactgtttgacttctacagcaatcttcgttttgtcaccaccatcaacagcacaactgtcacggaagtggatcctgagatacgaatagagctcattgatatttcagagataaggctaaaaatatctctggaaactgcgcctagtcaaagacctcgtggtgtcctaggcatatggagccccatcctatctgctgtgggtaatgcactcaagattcaggtgcatctgaggaaggtcatgcacagaagccggtttatgcggaagagctccatcatccctgctatcacgaaccgaatcaagagagatctgattcacaatccgctacatctaatcttttctgtggattttcttggagtaacaaaatcaactttatcatcacttagtaaaggatttgcagagctctctactgatgggcaatttcttcagctgagatcaaagcaggtttggtcaaggagaatcactggtgttggtgatgggctagttcaagggactgaagcatttgctcagggtttggctttcggggtttctggtgttttaagaaagccagttgagagtgccagacagtatggtgttataggtattgcacctggcattggccgtgcttttgtgggtttcattgtccaacctttaagtggggctctggattttttttcactgacggttgatggaatcagtgctagttttatgagatgtgttaacattttaagtaacaaatctgttccgcagaggataagagatcctcgtgctatacatcgtgatggtatagtaagagactatgacaaatttgaagctgctggccagatggccctttatctggcagaagctagcagatattttgcatgcacggatttatttcgagaaccttctaagtacgcatggtctgattactatgaagaccattttattttaccaagccagaggattgctttagtaactaataagcgggtgatgctgcttcagtgcttggatctagataaaatggacaagaaaccttctaaaatactttgggatgttccttgggaagaagtactttcattggagctagcaaaagctgggtatcagaggccttcacatgtaatcatacatctgaagaattttaggaggtcagagaactttgtaaggcttattaagtgcaacattgacaacgaacgggaacctcaggctctttcactttgctgttcaattcggaaaatgtggagatctcaccaagcagcaatgaaagttataccattgaaggttccatcaggccagcgtcatgtgtattttgtgtcagatgatgataaaaaggaatcccacagtttatctaggcctttgctaagctcgggaggaacctctactgatgttgagcaacagttcataaacaatacagttcactttcagaaaatgtggagcagtgaaccagaaattcagagccgatgcaaactagttgccaagcagattgcggatgacggaagggtgttcagcatatggaggcctctctgccctaatgggtatgtctcaattggtgatattgcgcatgttggcatccatccaccgcattttgctgctgtatacaagaatatcaatgggaactttgcactgcctcttggctatgacctggtttggagaaattgtgctgaggattacaagagccctgtatcaatatggcttccaaggccaccggggggatacgtagctcttgggtgtgttgctgtcccttcattcaaggagcccactcttgactgtgctttctgtgtggatgagagactcgcggaggatgccgcgtatgaggagcaaatcatatgggcctcatcggatgcttacccatggggatgctatatctaccaagttcagagcgcctcaatgcagttcatggcacttcgtgtcccaaaagaacaatctgagctaaggcccaagaagatattggagtcatttctgcagcaagcatcagagactcaaacgtcccgtgcatgaagaagctgcacatgatgcttgtgcgtgcaagagaactcggctgggacaaagggcaagtctcgtgcaagaaagctcgaagaatgccacttctttcggatcactccatttctccgttgtcaaagcatacacagaggacagagccttgcatgccaacactcgggttgacggaagtgttgtatactagaatagtaggttaaaggttgtaaatgtaaagttttgtaacgtttgatatagtttttgtccagctacatttgttaaggcccatgtggacgtgggccatattagttgtggctacatattctactaagaagttctcaggactaatcatactttctctaatttaaggttgttaaggcccatgtggacgtgggccatactagttgtggctatatattctactaagggcccgtttggtaaaacttcagctcctgcttctttagcttcagattctgatcctcgtgaggagctgatcctcctgattttcctagaaaatcagaatcatttttaaaaccgtttggcaagtaaactgattcttgtcttctgagggttggtggcctatggcgattgtctg

SEQ ID NO: 80654 - DNA, 13291 bp, Zea Mays
atttctcctcgactcgtccaagacaaggaaagtaggaaaccgcctgccctgcgtgtgggctgtctgctgtgttgctagcccagtactttctcttctcgctcacgcggcacgccgagcaaggggaccgacaggcggagcgcttctcagcccctccgcaccttcgggtctcgcgttggtggcgccggcgggcgctgccgatcgccggcggcggccgagatgttggaggaccaggtcgccttcctgctgcagaagtacctcggcaactacgtccggggcctcagcaaggaggcgctaaagatcagcgtctggagaggtgatgtagagctcacaaacatgcaactgaagccagaagctctcaattcattgaaattacctgttagagtcaaagctggctttcttggttctgtgaagctcaaggttccatggagcaggttgggacaagagccagttttggtttatcttgatcgaatttttatactagctgaaccagcaacacaagttgaaggttgcagcgaggatgctgtccaggaagcaaaaagaagtcgagttagggaaatggagatcaaattgttggagcgccaacagcaactgaaatctgaactaagttcatcatggctagggtctttcattggcactgtaattggaaatatcaagttatccattggcaatattcatatcagatacgaagacgtagagagcaatcctggccacccttttgcagcaggtctggtactttcaaagctttcagcagttacagtggatgaccttggcaaggagacttttgccacaggtggtgatttggaccgagtgaaaaagtctgttgaacttgagagtctggcggtgtattttgactctgatagcagttcttggattgtggataaaccctgggaggatttacttccatcagagtggagtcaggtttttgagtttcaggagcaggatggttccagatctgcttcgaaaaagcatgcctacattttacagcctgtatctggcaaagcaaaatatacaaagatacaacttactgaggcaaagaaaacaggacaagcattgcaaaatactgcagtggatttggatgatgttactctgtcgttgtcgaaggatggctacagggacatgttaaagttggctgataatttctctacattcaatcaacggctgagatatgctcatctccgaccatcttcaccattaaaatcggatccacgagcttggtggaagtatgcatacaaggtggtgactcaggaaatgaagaaagcaagcgggaggctatcttgggagcaattattgagaaatgcaagacttcggaagacatatgtatctttatatgcatccctcttaaaatctgacatgagtcgactggttgttgatgaccatgaggagattaagaggctggaccgtgaacttgatatggaggttattctacagtggaggatgttagctcacaagtttgtagaacagtcggtggaaacataccagtatgctcaacaaaataagaagtcctggtggactggctcttcaaaggatgaggaagattcaaagagttttactgatgaagattgggaaagactaaatcggattattgggtacaaagaaaccaacgagtatgtcactgatcaacaggatatgaaactgatgcaatttgattttgaaatacgtatgaaacataatgcatcaaagcttaccattgatgattcggagtgccttgctgatctctcatgccaagatttctgctgcaacttgaaaatgtatccggaggcaaaaatatttgatctgaagctgggttcctacaggcttttatctccatatggcctgcttgctgagagtgcaagtgtcatcgattcttttgttggcctcttctcctacaaaccttttgatgagcaactggactggagtttgacagctaaagcttcgccttgttatataacttatttaaaggattcagttgatcaaattgttggcttcttcaagagtagccctaccattagccagaacctggcactagagactgctgctgctgtacagatgacactagatgaagtgaaacggactgctcaacagcaaatgactcgggtgctaaaagatcagtccaggttttcactgaacatggatattgctgctccaaaaattaccgttcctaccaagttccgaccagatgatgtacatgagactaagcttttgcttgaccttggaaatttagttcttcggacagaggaaatatgggatgcctatacttcagaagagcaggatatatatctaaactttaatttggtgcttagtgatgtctctgcatttctggtggatggtgattaccattggaatgaaacatctgatgaaaagaacttgttgccagtaattgacaaatgtgggattgctttgaaacttcagcagatccagttagaaagtcctctatatccttccacaagaatggcgatacgggtgccttccctaggatttcatttctctcctgcacgctatcatcgtttaatggaaattttaaaattttttcaagatggtgctagtgataatagcaattcagatcatgaacacttgtgggatcatgctgactttgaaggatggtcatctcttctcacatggaagggtgttggaaaccgggaagctgtttggcaacacagatatttgcgtctagtgggtccatttctctatgtatttgaaaatttaatgtctacaacgtacaagcaatggttcagtttacgcgggaaacaagttcaccagattctggaagacactggtgctttaattttgttgtttgataatgatgagggacgaaagatatggcagaaccgtttacagggtgctatataccgtgcatcgggttctgcaatttctagctttcctggagttgctctcccatcagaggcccactcattcaaaggcaactttcttgatgttgctgacacagagaaattatttgttgcgggcattcttgatgaattaaagatatgtttttcatgtggctatgagagtaaccacaaactaaaaaaaattctactagctaaggagagcagcctgtttgaatttcgggcagttggtggccaggttgaactctcaatgaaaggtggcaatttactgataggaactattttggggtcactagaaattgaagaccagtattactatccagggagtcctgtgccaaggttcttggcaaggtcttttattaatagcatgcaaactcaagaactcccgtctcttagccgaaagaacagtgcaggacctagaaacaccccattgatgaaaaatgacagtgaggaaaactttttcgaagcatcagatgattttgatgaatttgaaacacctatgcatcaaaagaggactatatcagactattttagcacccagaaatttttgcctactagcgttccttccctacagccgccaacatttaagcgcattcctgatttgataccagatactgaacttcaaactggcaaattcacattggaaggtagtggcactttcaatagttttgtgaaagctcagatagtgatttatgatcaacattctccccagtacaacagcttggataacagggtagttgtaactgttgccactttatccttcttttgccatcggccaactgttattgcaatcatggaatttatgaatgccatcaaccttgcaaacgggtctgatactgataaagataaaagcacttatcctgctactgtagaagatagtgcaattgaggaatctaagtctgatctggaatcagagccatcaataaaacccttactggctaaaggtaaaagcagaatagtttttcatcttacatccagcatggcagaggcacagatattactgatgaatgaaaatggtgaccggcttgctactttatcacaaaataatctctcgactgatataaaggtgttcacatcatcattcagcataaaggctgcactcggaaaccttaaaataagtgatgatagccttcttagcagccacccttacttttgggtttgtgatatgcgaaatcctggaggtcgttcatttgtggagatcgactttagttcatacaatgttggtgatgaagactattgtggttatgactatagccttgtagggcagctttcagaagttagaattgtttacctcaaccgttttgttcaagagattatcagttattttatgggacttgtgccaaaaagttctgatgccgttgtaaagctgaaagacaataagactaactcagagaagtgggttagcaaaaccgatatggaaggatcacctgctctcaaattggatgtttcattcagcaggcctataattgttatgccccgtgaaactaatagtaatgactttttggagcttgatgttctatacataacagtccaaaatgaattccaatggataggtggtgataagaatgagatgagcactgttcacttagacattttaacagttacagtacgggacataaatttagttattggtatgaatatggtgcgtggtgaaaccataattcaagatgtagaaggtctctcctttgaacttcgtagatcattgcgtgatttgagacatcagttgccagtggtggaggcagcaattaaggtggatgttttgaaagcaacactatccaatcgagaatatgaaattatttctgaatgtgcattgtctaacttctctgagacaccacatcctgtgcctactctggatgatcctcgatatggcacttccactactccatcccatgtatcagcttcttcttcagaaagtattcatgtcttgtccgaaggtgcagaaacatggatagctaataaattttctgtctcaataaatctggttgagctttctctgcattcaggatcgacaagagattctcctctggcgagcgttcaggcgagtggagcatggcttttctataaatcaaacacacggggagaaaattttatgtatgctactctcaaaggattttctgtttttgatgatcgtgaaggaaccaaagatgagttaaggcttgccattgggaaatcagcatctgttcgggacacatcatctgttgatggctatgataatcctaatgaacttgattcaggtgaacgaagaatacaaaaggatctaggccttgagccaatcccctcgatgcttattcttgatgccatcttccgaaaatcttcgtcatccgtctctgtctgtgttcagcggcccaagtttcttgtggcacttgacttcttactagcagtaatcgaattctttgtgccatctgctcagagtcttctatccaatgatgaagacaaggaccttttacatatgatcactccagtagtattgaatgatcaaatttatttccaggagcattcaacatttagtctttcacctcagaagcccttgattgttgataatgaaagatttgatcacttcgtatatgatgggaagggtggaaagttatatttgctggatagtgaggggaaaattctctcaagcccttgtactgagagtttcattcatgtgcttgggtgtaagagattgcaatttcggaatgtcactatagtgaatggtgaatatttggattcctgtatctctctcggtgatgatagctgttattcagcatcaaggaatgaccatgtctacttagtaagagaagatgatgggtccttgtcaacccccagcaaggaaattagaggagacagtgttaaaaatgggagtgctgatatatcaaccgaatttattatggaactacaggctattggaccagagcttactttctatagtacatcaaggaatgctggtgaaaacttagcactgtcaacaaaggttattcatgcccacacagatgcattttgcaggcttataatgaaaggcgacagtatggagatgaatggaaacatacttggtttaaagatggagagtaatggcatcagagttatagaaccatttgacatggtcgtgaaatattccaatgcgtctggaaagacaaatttgcatctactagtttctgaaatatatatgaatttttccttcagtattctcagactgtttttagcagttgaggaagaaatttcagcatttcttaggatgtcgtcaaagaaaatttcactggtgtgttaccagtttgacaaagttgcaactatgcaaggtaatgctaatgatcaagtgttatctttctggcgaccgcgtgctccatctggatatgccatttttggcgattatctcacaccaatgaacgagcctcctactaaaggagttcttgctctgaacacaaacattgttagggtcaaaaggcctttatcgtacaaactagtgtggcaatctggttctccaagaacaaacatttttcatcagaaggacttggaggataagatctctaatattgaccagctctgctctgtttggttacctgtggcacctgcgggttatgttgcaatgggttgtgttgcttcatctggaactgctgaaccacctttgtcttcagctttctgtttaactgcttctttggtttcatcatgtaatctaagggattgcattgcactgagggataacactaacatgatattctggcgagttgataatgcttttggttcctttttacctggagatcctgcaagcatgagtgtggatgggaatgcttatgatcttcgacatatgctgttcgacagtgcagactcatcttccaagactgtctctagaaggcaagatagtagaaatgatttctctcaactagagagatcagaattgacctcaggtcggctatttgatgctgtggcaagctttaaactaatttggtcaaatagtgggacctcttcaccaaaaaagctctcaatatggcgtccaatgttgtctgaaggaatgttttactttggtgacatagctgttaacgggtatgaaccaccaaattcaactgttgttcttcgtgatactggtgaagacacttttctcagagctcctgaaggttttgaccttgttggtcgaattaagaagcaccggggcactgagggtgtatcattttggtttcctaaagctccttcaggttttgtggcattaggatgtgttgcatctaaaagttctccaaccaaagaggacttcagtttgttaagatgtattagaaatgacatggtggctggaggtcaattttctgaggaaagtttatgggattcatctaatgctagaacatctgaaccttttagcttatggactgttgataatgatgctggtacgtttcttgtgagaagtggatatagaaaacctccaaagaggcttgcactgaagcttgcaggtccacctacatcaagcagttcagatagcatcattgttgatgccaaaattaaaacattttctgctgtttcctttgatgattatggcggaatgatggtgccattatttggggtgtcctttgacagtgttggactaagttatcatggaggtcctcatcatcttaatgcaactgtgagcttgtcttttgtggccagatcctataatgacaagtatagctcgtgggagccctttattgaaccaacagatgcatttcttaggtaccaattcgacatgaatacaccaggttctcctagacaactccgtattacctcaactcaagaccttaatttgaacatatctgtttccaatacaaacatgttatcgcaagcttatgctagctggaataatattagctgtggtgatgaattgtataagaaggaaaccttttcttctactgagcgaccagttcttgatgttcatcaaagaagaagttattatgttgtcccacaaaataaacttggacaagatatttatgtaagaactactgaaaatagaggttcacttgttactctgttgccctctggggatgataggtccataaaagttccggctttaagggatctatcagattctcatttaaatggaagatctgttaaaccatatcggttgatgataactgccattcttgcggatgcagaggtcaaggatgatgaaggattagaaactggtgaatatatgactgctgtgcggctcttttcagaaaaccattccatatctgttcaacaacagagtgcccgtacttgtgctgctattggagaacacttgtcacagaacaccagaaaggtgaactggaacgaaatgttctttttcaaagtcgaacgtgtggacagctatactctagagcttcttgtgcttgatgctggtaaaggtcaaccagttggtatatactctgctccattggagcaagttgtgcaaaagctccctcctacctctaatccggactctgtcaaatttgatttggctttaggagaccttatgtcaactaagacagtggaacaggaaactgttaaacctagtggaaaaataagatttgcggtacttgtttctggtagagctagtgtacaacaagggaacagagccagtcctgaaagcaagactggatatattcagattagcccttcaaaagaagggccatggacaagcatgaagttgaactatgctgtacctgcagcatgttggaggtttggtaattgtgtgattgctagtgaagcaacagtcaaggaaggcaacagatacgttagcatacgttcccttgtgtcagttactaatacaaccaatttcattgttgatttacgtctaaaaggaagaatttctcaaagtgcacgggcagatgaacagggagacagttttggtaaagaggatcaaatcctgattggaacgctggagcccaattctactattccagtcccactatcaggcctctcacatcctcttatgccctatatgttgcagttaaggccggcaaaacatcatgatcatgaaaattactcctggagtgatgtccaggagaggcgcagtcaaaccgagtttagaaaggaggagatcctagatttatgtatatcagatctgtatgaatcggaaaacttgctattctgctcacaggtagatggcacctcgaattcttgtcatggactgtggttttgcttgagcatagaaggcaaggaaataggcaaagatgtacagatggaaccaatatatgattggtgcatcattattaagtccccgttgtgtttgacatactatcttcccattgctgcacattatactgtcagttctagccacctcgataatgaagattcaagttgctcccttggcaccttaagtccgggtgaggctgtaaaggttcacaatgttgatccaagaaaccctttgtacttatccctggttccacatggaggatgggaactgatgcatgagcctgttgttatatcacatccaacccaagcaccttccaaatttatcaatctaagaagctctttatcaggaagggttgtacagattctgcttgaacaaagcagtgatagtgactatttgatggcaaggcttatcagaatatatgttccctattggatatctttttctagattgcctacacttactctgcgtctcattgatatttctggaaggaaagagaagaggcgccttctttcacgttcacatctggaaaggggtgagaagcaactctatgatataaaacacgatgaattggttgagggatacactatagcgtctggattaaattttaagggattaggacttctatcatctgttggacatggtggacggtttggatctgtgaaagaattgtcgcctcttggcgatatggatggagcagttgatctttctgcctatgatgatgatggaaaatgcatgcatattcttctttgttcaaagccatcctcgtatcaagctgttccaacaaaggttatccatgtacgcccgtatataacattcacaaacagggccggacaagatttgtacttaaaacttagtattgaggatgagccaaaggtcttacatgcatatgactggagggtttcctttatgtactccaaggggactactgacaaactgcaggtccgactagtggatacagaatggtgccaacctctggagatagtaaaagaagacactattgttatagcaatgagaaagcagggtggtactcagaaatttgtaaaagctgagatacgtggttatgaggaaggttcaagattcttgattgtattccgtctgggcccagcatatggaccaatcaggattgagaaccggacgagtcataccacaatcagtacttgccagtctggtttaggggaggagagttggatccaagtgaagccacatgcaaccagaaaatattcttgggatgacccatatggacagaaagttattgatgttagcattgataaaggcgatgatacttgtgtcctatgtgttgacctggaaaatcctattggaagttccaccagttttagggaacatggcctcatgtttactgttgataccagtgacattaagatattgaagtttgctgattacataaggaaagaggaagtatatggattgcctggatctgaactgactgatcaccaaggatcgtcattgaaggaaaatgagacagagccaggtgctggacccttggagctcattgttgaacttggagttgttggaatatctttgattgatcataagccaagagagcttttatacttgcatctgcagaaggttttcgtttcatacttgactggttatgattttgggaccactagcaggtttaaattaatccttggcgagttgcaactagataatcagttgccactgtctacaatgcctgttgttttgtctaccgagagcaggcctgattcaaatcgttctgttttcaaagcaaacgttgctgttagcaatgtaacttctaatggcattcaagtttacccacatgtctatatccgggtaactgatcaaacatggagactaaacattcatgaacctattatttgggcactgtttgacttctacagcaatcttcgttttgtcaccaccatcaacagcacaactgtcacggaagtggatcctgagatacgaatagagctcattgatatttcagagataaggctaaaaatatctctggaaactgcgcctagtcaaagacctcgtggtgtcctaggcatatggagccccatcctatctgctgtgggtaatgcactcaagattcaggtgcatctgaggaaggtcatgcacagaagccggtttatgcggaagagctccatcatccctgctatcacgaaccgaatcaagagagatctgattcacaatccgctacatctaatcttttctgtggattttcttggagtaacaaaatcaactttatcatcacttagtaaaggatttgcagagctctctactgatgggcaatttcttcagctgagatcaaagcaggtttggtcaaggagaatcactggtgttggtgatgggctagttcaagggactgaagcatttgctcagggtttggctttcggggtttctggtgttttaagaaagccagttgagagtgccagacagtatggtgttataggtattgcacctggcattggccgtgcttttgtgggtttcattgtccaacctttaagtggggctctggattttttttcactgacggttgatggaatcagtgctagttttatgagatgtgttaacattttaagtaacaaatctgttccgcagaggataagagatcctcgtgctatacatcgtgatggtatagtaagagactatgacaaatttgaagctgctggccagatggccctttatctggcagaagctagcagatattttgcatgcacggatttatttcgagaaccttctaagtacgcatggtctgattactatgaagaccattttattttaccaagccagaggattgctttagtaactaataagcgggtgatgctgcttcagtgcttggatctagataaaatggacaagaaaccttctaaaatactttgggatgttccttgggaagaagtactttcattggagctagcaaaagctgggtatcagaggccttcacatgtaatcatacatctgaagaattttaggaggtcagagaactttgtaaggcttattaagtgcaacattgacaacgaacgggaacctcaggctctttcactttgctgttcaattcggaaaatgtggagatctcaccaagcagcaatgaaagttataccattgaaggttccatcaggccagcgtcatgtgtattttgtgtcagatgatgataaaaaggaatcccacagtttatctaggcctttgctaagctcgggaggaacctctactgatgttgagcaacagttcataaacaatacagttcactttcagaaaatgtggagcagtgaaccagaaattcagagccgatgcaaactagttgccaagcagattgcggatgacggaagggtgttcagcatatggaggcctctctgccctaatgggtatgtctcaattggtgatattgcgcatgttggcatccatccaccgcattttgctgctgtatacaagaatatcaatgggaactttgcactgcctcttggctatgacctggtttggagaaattgtgctgaggattacaagagccctgtatcaatatggcttccaaggccaccggggggatacgtagctcttgggtgtgttgctgtcccttcattcaaggagcccactcttgactgtgctttctgtgtggatgagagactcgcggaggatgccgcgtatgaggagcaaatcatatgggcctcatcggatgcttacccatggggatgctatatctaccaagttcagagcgcctcaatgcagttcatggcacttcgtgtcccaaaagaacaatctgagctaaggcccaagaagatattggagtcatttctgcagcaagcatcagagactcaaacgtcccgtgcatgaagaagctgcacatgatgcttgtgcgtgcaagagaactcggctgggacaaagggcaagtctcgtgcaagaaagctcgaagaatgccacttctttcggatcactccatttctccgttgtcaaagcatacacagaggacagagccttgcatgccaacactcgggttgacggaagtgttgtatactagaatagtaggttaaaggttgtaaatgtaaagttttgtaacgtttgatatagtttttgtccagctacatttgttaaggcccatgtggacgtgggccatattagttgtggctacatattctactaagaagttctcaggactaatcatactttctctaatttaaggttgttaaggcccatgtggacgtgggccatactagttgtggctatatattctactaagggcccgtttggtaaaacttcagctcctgcttctttagcttcagattctgatcctcgtgaggagctgatcctcctgattttcctagaaaatcagaatcatttttaaaaccgtttggcaagtaaactgattcttgtcttctgagggttggtggcctatggcgattgtctg

SEQ ID NO: 80655 - DNA, 13069 bp, Zea Mays
aaggaaagtaggaaaccgcctgccctgcgtgtgggctgtctgctgtgttgctagcccagtactttctcttctcgctcacgcggcacgccgagcaaggggaccgacaggcggagcgcttctcagcccctccgcaccttcgggtctcgcgttggtggcgccggcgggcgctgccgatcgccggcggcggccgagatgttggaggaccaggtcgccttcctgctgcagaagtacctcggcaactacgtccggggcctcagcaaggaggcgctaaagatcagcgtctggagaggtgatgtagagctcacaaacatgcaactgaagccagaagctctcaattcattgaaattacctgttagagtcaaagctggctttcttggttctgtgaagctcaaggttccatggagcaggttgggacaagagccagttttggtttatcttgatcgaatttttatactagctgaaccagcaacacaagttgaaggttgcagcgaggatgctgtccaggaagcaaaaagaagtcgagttagggaaatggagatcaaattgttggagcgccaacagcaactgaaatctgaactaagttcatcatggctagggtctttcattggcactgtaattggaaatatcaagttatccattggcaatattcatatcagatacgaagacgtagagagcaatcctggccacccttttgcagcaggtctggtactttcaaagctttcagcagttacagtggatgaccttggcaaggagacttttgccacaggtggtgatttggaccgagtgaaaaagtctgttgaacttgagagtctggcggtgtattttgactctgatagcagttcttggattgtggataaaccctgggaggatttacttccatcagagtggagtcaggtttttgagtttcaggagcaggatggttccagatctgcttcgaaaaagcatgcctacattttacagcctgtatctggcaaagcaaaatatacaaagatacaacttactgaggcaaagaaaacaggacaagcattgcaaaatactgcagtggatttggatgatgttactctgtcgttgtcgaaggatggctacagggacatgttaaagttggctgataatttctctacattcaatcaacggctgagatatgctcatctccgaccatcttcaccattaaaatcggatccacgagcttggtggaagtatgcatacaaggtggtgactcaggaaatgaagaaagcaagcgggaggctatcttgggagcaattattgagaaatgcaagacttcggaagacatatgtatctttatatgcatccctcttaaaatctgacatgagtcgactggttgttgatgaccatgaggagattaagaggctggaccgtgaacttgatatggaggttattctacagtggaggatgttagctcacaagtttgtagaacagtcggtggaaacataccagtatgctcaacaaaataagaagtcctggtggtcatttggatggactggctcttcaaaggatgaggaagattcaaagagttttactgatgaagattgggaaagactaaatcggattattgggtacaaagaaaccaacgagtatgtcactgatcaacaggatatgaaactgatgcaatttgattttgaaatacgtatgaaacataatgcatcaaagcttaccattgatgattcggagtgccttgctgatctctcatgccaagatttctgctgcaacttgaaaatgtatccggaggcaaaaatatttgatctgaagctgggttcctacaggcttttatctccatatggcctgcttgctgagagtgcaagtgtcatcgattcttttgttggcctcttctcctacaaaccttttgatgagcaactggactggagtttgacagctaaagcttcgccttgttatataacttatttaaaggattcagttgatcaaattgttggcttcttcaagagtagccctaccattagccagaacctggcactagagactgctgctgctgtacagatgacactagatgaagtgaaacggactgctcaacagcaaatgactcgggtgctaaaagatcagtccaggttttcactgaacatggatattgctgctccaaaaattaccgttcctaccaagttccgaccagatgatgtacatgagactaagcttttgcttgaccttggaaatttagttcttcggacagaggaaatatgggatgcctatacttcagaagagcaggatatatatctaaactttaatttggtgcttagtgatgtctctgcatttctggtggatggtgattaccattggaatgaaacatctgatgaaaagaacttgttgccagtaattgacaaatgtgggattgctttgaaacttcagcagggtgttggaaaccgggaagctgtttggcaacacagatatttgcgtctagtgggtccatttctctatgtatttgaaaatttaatgtctacaacgtacaagcaatggttcagtttacgcgggaaacaagttcaccagattctggaagacactggtgctttaattttgttgtttgataatgatgagggacgaaagatatggcagaaccgtttacagggtgctatataccgtgcatcgggttctgcaatttctagctttcctggagttgctctcccatcagaggcccactcattcaaaggcaactttcttgatgttgctgacacagagaaattatttgttgcgggcattcttgatgaattaaagatatgtttttcatgtggctatgagagtaaccacaaactaaaaaaaattctactagctaaggagagcagcctgtttgaatttcgggcagttggtggccaggttgaactctcaatgaaaggtggcaatttactgataggaactattttggggtcactagaaattgaagaccagtattactatccagggagtcctgtgccaaggttcttggcaaggtcttttattaatagcatgcaaactcaagaactcccgtctcttagccgaaagaacagtgcaggacctagaaacaccccattgatgaaaaatgacagtgaggaaaactttttcgaagcatcagatgattttgatgaatttgaaacacctatgcatcaaaagaggactatatcagactattttagcacccagaaatttttgcctactagcgttccttccctacagccgccaacatttaagcgcattcctgatttgataccagatactgaacttcaaactggcaaattcacattggaaggtagtggcactttcaatagttttgtgaaagctcagatagtgatttatgatcaacattctccccagtacaacagcttggataacagggtagttgtaactgttgccactttatccttcttttgccatcggccaactgttattgcaatcatggaatttatgaatgccatcaaccttgcaaacgggtctgatactgataaagataaaagcacttatcctgctactgtagaagatagtgcaattgaggaatctaagtctgatctggaatcagagccatcaataaaacccttactggctaaaggtaaaagcagaatagtttttcatcttacatccagcatggcagaggcacagatattactgatgaatgaaaatggtgaccggcttgctactttatcacaaaataatctctcgactgatataaaggtgttcacatcatcattcagcataaaggctgcactcggaaaccttaaaataagtgatgatagccttcttagcagccacccttacttttgggtttgtgatatgcgaaatcctggaggtcgttcatttgtggagatcgactttagttcatacaatgttggtgatgaagactattgtggttatgactatagccttgtagggcagctttcagaagttagaattgtttacctcaaccgttttgttcaagagattatcagttattttatgggacttgtgccaaaaagttctgatgccgttgtaaagctgaaagacaataagactaactcagagaagtgggttagcaaaaccgatatggaaggatcacctgctctcaaattggatgtttcattcagcaggcctataattgttatgccccgtgaaactaatagtaatgactttttggagcttgatgttctatacataacagtccaaaatgaattccaatggataggtggtgataagaatgagatgagcactgttcacttagacattttaacagttacagtacgggacataaatttagttattggtatgaatatggtgcgtggtgaaaccataattcaagatgtagaaggtctctcctttgaacttcgtagatcattgcgtgatttgagacatcagttgccagtggtggaggcagcaattaaggtggatgttttgaaagcaacactatccaatcgagaatatgaaattatttctgaatgtgcattgtctaacttctctgagacaccacatcctgtgcctactctggatgatcctcgatatggcacttccactactccatcccatgtatcagcttcttcttcagaaagtattcatgtcttgtccgaaggtgcagaaacatggatagctaataaattttctgtctcaataaatctggttgagctttctctgcattcaggatcgacaagagattctcctctggcgagcgttcaggcgagtggagcatggcttttctataaatcaaacacacggggagaaaattttatgtatgctactctcaaaggattttctgtttttgatgatcgtgaaggaaccaaagatgagttaaggcttgccattgggaaatcagcatctgttcgggacacatcatctgttgatggctatgataatcctaatgaacttgattcaggtgaacgaagaatacaaaaggatctaggccttgagccaatcccctcgatgcttattcttgatgccatcttccgaaaatcttcgtcatccgtctctgtctgtgttcagcggcccaagtttcttgtggcacttgacttcttactagcagtaatcgaattctttgtgccatctgctcagagtcttctatccaatgatgaagacaaggaccttttacatatgatcactccagtagtattgaatgatcaaatttatttccaggagcattcaacatttagtctttcacctcagaagcccttgattgttgataatgaaagatttgatcacttcgtatatgatgggaagggtggaaagttatatttgctggatagtgaggggaaaattctctcaagcccttgtactgagagtttcattcatgtgcttgggtgtaagagattgcaatttcggaatgtcactatagtgaatggtgaatatttggattcctgtatctctctcggtgatgatagctgttattcagcatcaaggaatgaccatgtctacttagtaagagaagatgatgggtccttgtcaacccccagcaaggaaattagaggagacagtgttaaaaatgggagtgctgatatatcaaccgaatttattatggaactacaggctattggaccagagcttactttctatagtacatcaaggaatgctggtgaaaacttagcactgtcaacaaaggttattcatgcccacacagatgcattttgcaggcttataatgaaaggcgacagtatggagatgaatggaaacatacttggtttaaagatggagagtaatggcatcagagttatagaaccatttgacatggtcgtgaaatattccaatgcgtctggaaagacaaatttgcatctactagtttctgaaatatatatgaatttttccttcagtattctcagactgtttttagcagttgaggaagaaatttcagcatttcttaggatgtcgtcaaagaaaatttcactggtgtgttaccagtttgacaaagttgcaactatgcaaggtaatgctaatgatcaagtgttatctttctggcgaccgcgtgctccatctggatatgccatttttggcgattatctcacaccaatgaacgagcctcctactaaaggagttcttgctctgaacacaaacattgttagggtcaaaaggcctttatcgtacaaactagtgtggcaatctggttctccaagaacaaacatttttcatcagaaggacttggaggataagatctctaatattgaccagctctgctctgtttggttacctgtggcacctgcgggttatgttgcaatgggttgtgttgcttcatctggaactgctgaaccacctttgtcttcagctttctgtttaactgcttctttggtttcatcatgtaatctaagggattgcattgcactgagggataacactaacatgatattctggcgagttgataatgcttttggttcctttttacctggagatcctgcaagcatgagtgtggatgggaatgcttatgatcttcgacatatgctgttcgacagtgcagactcatcttccaagactgtctctagaaggcaagatagtagaaatgatttctctcaactagagagatcagaattgacctcaggtcggctatttgatgctgtggcaagctttaaactaatttggtcaaatagtgggacctcttcaccaaaaaagctctcaatatggcgtccaatgttgtctgaaggaatgttttactttggtgacatagctgttaacgggtatgaaccaccaaattcaactgttgttcttcgtgatactggtgaagacacttttctcagagctcctgaaggttttgaccttgttggtcgaattaagaagcaccggggcactgagggtgtatcattttggtttcctaaagctccttcaggttttgtggcattaggatgtgttgcatctaaaagttctccaaccaaagaggacttcagtttgttaagatgtattagaaatgacatggtggctggaggtcaattttctgaggaaagtttatgggattcatctaatgctagaacatctgaaccttttagcttatggactgttgataatgatgctggtacgtttcttgtgagaagtggatatagaaaacctccaaagaggcttgcactgaagcttgcaggtccacctacatcaagcagttcagatagcatcattgttgatgccaaaattaaaacattttctgctgtttcctttgatgattatggcggaatgatggtgccattatttggggtgtcctttgacagtgttggactaagttatcatggaggtcctcatcatcttaatgcaactgtgagcttgtcttttgtggccagatcctataatgacaagtatagctcgtgggagccctttattgaaccaacagatgcatttcttaggtaccaattcgacatgaatacaccaggttctcctagacaactccgtattacctcaactcaagaccttaatttgaacatatctgtttccaatacaaacatgttatcgcaagcttatgctagctggaataatattagctgtggtgatgaattgtataagaaggaaaccttttcttctactgagcgaccagttcttgatgttcatcaaagaagaagttattatgttgtcccacaaaataaacttggacaagatatttatgtaagaactactgaaaatagaggttcacttgttactctgttgccctctggggatgataggtccataaaagttccggctttaagggatctatcagattctcatttaaatggaagatctgttaaaccatatcggttgatgataactgccattcttgcggatgcagaggtcaaggatgatgaaggattagaaactggtgaatatatgactgctgtgcggctcttttcagaaaaccattccatatctgttcaacaacagagtgcccgtacttgtgctgctattggagaacacttgtcacagaacaccagaaaggtgaactggaacgaaatgttctttttcaaagtcgaacgtgtggacagctatactctagagcttcttgtgcttgatgctggtaaaggtcaaccagttggtatatactctgctccattggagcaagttgtgcaaaagctccctcctacctctaatccggactctgtcaaatttgatttggctttaggagaccttatgtcaactaagacagtggaacaggaaactgttaaacctagtggaaaaataagatttgcggtacttgtttctggtagagctagtgtacaacaagggaacagagccagtcctgaaagcaagactggatatattcagattagcccttcaaaagaagggccatggacaagcatgaagttgaactatgctgtacctgcagcatgttggaggtttggtaattgtgtgattgctagtgaagcaacagtcaaggaaggcaacagatacgttagcatacgttcccttgtgtcagttactaatacaaccaatttcattgttgatttacgtctaaaaggaagaatttctcaaagtgcacgggcagatgaacagggagacagttttggtaaagaggatcaaatcctgattggaacgctggagcccaattctactattccagtcccactatcaggcctctcacatcctcttatgccctatatgttgcagttaaggccggcaaaacatcatgatcatgaaaattactcctggagtgatgtccaggagaggcgcagtcaaaccgagtttagaaaggaggagatcctagatttatgtatatcagatctgtatgaatcggaaaacttgctattctgctcacaggtagatggcacctcgaattcttgtcatggactgtggttttgcttgagcatagaaggcaaggaaataggcaaagatgtacagatggaaccaatatatgattggtgcatcattattaagtccccgttgtgtttgacatactatcttcccattgctgcacattatactgtcagttctagccacctcgataatgaagattcaagttgctcccttggcaccttaagtccgggtgaggctgtaaaggttcacaatgttgatccaagaaaccctttgtacttatccctggttccacatggaggatgggaactgatgcatgagcctgttgttatatcacatccaacccaagcaccttccaaatttatcaatctaagaagctctttatcaggaagggttgtacagattctgcttgaacaaagcagtgatagtgactatttgatggcaaggcttatcagaatatatgttccctattggatatctttttctagattgcctacacttactctgcgtctcattgatatttctggaaggaaagagaagaggcgccttctttcacgttcacatctggaaaggggtgagaagcaactctatgatataaaacacgatgaattggttgagggatacactatagcgtctggattaaattttaagggattaggacttctatcatctgttggacatggtggacggtttggatctgtgaaagaattgtcgcctcttggcgatatggatggagcagttgatctttctgcctatgatgatgatggaaaatgcatgcatattcttctttgttcaaagccatcctcgtatcaagctgttccaacaaaggttatccatgtacgcccgtatataacattcacaaacagggccggacaagatttgtacttaaaacttagtattgaggatgagccaaaggtcttacatgcatatgactggagggtttcctttatgtactccaaggggactactgacaaactgcaggtccgactagtggatacagaatggtgccaacctctggagatagtaaaagaagacactattgttatagcaatgagaaagcagggtggtactcagaaatttgtaaaagctgagatacgtggttatgaggaaggttcaagattcttgattgtattccgtctgggcccagcatatggaccaatcaggattgagaaccggacgagtcataccacaatcagtacttgccagtctggtttaggggaggagagttggatccaagtgaagccacatgcaaccagaaaatattcttgggatgacccatatggacagaaagttattgatgttagcattgataaaggcgatgatacttgtgtcctatgtgttgacctggaaaatcctattggaagttccaccagttttagggaacatggcctcatgtttactgttgataccagtgacattaagatattgaagtttgctgattacataaggaaagaggaagtatatggattgcctggatctgaactgactgatcaccaaggatcgtcattgaaggaaaatgagacagagccaggtgctggacccttggagctcattgttgaacttggagttgttggaatatctttgattgatcataagccaagagagcttttatacttgcatctgcagaaggttttcgtttcatacttgactggttatgattttgggaccactagcaggtttaaattaatccttggcgagttgcaactagataatcagttgccactgtctacaatgcctgttgttttgtctaccgagagcaggcctgattcaaatcgttctgttttcaaagcaaacgttgctgttagcaatgtaacttctaatggcattcaagtttacccacatgtctatatccgggtaactgatcaaacatggagactaaacattcatgaacctattatttgggcactgtttgacttctacagcaatcttcgttttgtcaccaccatcaacagcacaactgtcacggaagtggatcctgagatacgaatagagctcattgatatttcagagataaggctaaaaatatctctggaaactgcgcctagtcaaagacctcgtggtgtcctaggcatatggagccccatcctatctgctgtgggtaatgcactcaagattcaggtgcatctgaggaaggtcatgcacagaagccggtttatgcggaagagctccatcatccctgctatcacgaaccgaatcaagagagatctgattcacaatccgctacatctaatcttttctgtggattttcttggagtaacaaaatcaactttatcatcacttagtaaaggatttgcagagctctctactgatgggcaatttcttcagctgagatcaaagcaggtttggtcaaggagaatcactggtgttggtgatgggctagttcaagggactgaagcatttgctcagggtttggctttcggggtttctggtgttttaagaaagccagttgagagtgccagacagtatggtgttataggtattgcacctggcattggccgtgcttttgtgggtttcattgtccaacctttaagtggggctctggattttttttcactgacggttgatggaatcagtgctagttttatgagatgtgttaacattttaagtaacaaatctgttccgcagaggataagagatcctcgtgctatacatcgtgatggtatagtaagagactatgacaaatttgaagctgctggccagatggccctttatctggcagaagctagcagatattttgcatgcacggatttatttcgagaaccttctaagtacgcatggtctgattactatgaagaccattttattttaccaagccagaggattgctttagtaactaataagcgggtgatgctgcttcagtgcttggatctagataaaatggacaagaaaccttctaaaatactttgggatgttccttgggaagaagtactttcattggagctagcaaaagctgggtatcagaggccttcacatgtaatcatacatctgaagaattttaggaggtcagagaactttgtaaggcttattaagtgcaacattgacaacgaacgggaacctcaggctctttcactttgctgttcaattcggaaaatgtggagatctcaccaagcagcaatgaaagttataccattgaaggttccatcaggccagcgtcatgtgtattttgtgtcagatgatgataaaaaggaatcccacagtttatctaggcctttgctaagctcgggaggaacctctactgatgttgagcaacagttcataaacaatacagttcactttcagaaaatgtggagcagtgaaccagaaattcagagccgatgcaaactagttgccaagcagattgcggatgacggaagggtgttcagcatatggaggcctctctgccctaatgggtatgtctcaattggtgatattgcgcatgttggcatccatccaccgcattttgctgctgtatacaagaatatcaatgggaactttgcactgcctcttggctatgacctggtttggagaaattgtgctgaggattacaagagccctgtatcaatatggcttccaaggccaccggggggatacgtagctcttgggtgtgttgctgtcccttcattcaaggagcccactcttgactgtgctttctgtgtggatgagagactcgcggaggatgccgcgtatgaggagcaaatcatatgggcctcatcggatgcttacccatggggatgctatatctaccaagttcagagcgcctcaatgcagttcatggcacttcgtgtcccaaaagaacaatctgagctaaggcccaagaagatattggagtcatttctgcagcaagcatcagagactcaaacgtcccgtgcatgaagaagctgcacatgatgcttgtgcgtgcaagagaactcggctgggacaaagggcaagtctcgtgcaagaaagctcgaagaatgccacttctttcggatcactccatttctccgttgtcaaagcatacacagaggacagagccttgcatgccaacactcgggttgacggaagtgttgtatactagaatagtaggttaaaggttgtaaatgtaaagttttgtaacgtttgatatagtttttgtccagctacatttgttaaggcccatgtggacgtgggccatattagttgtggctacatattctactaagaagttctcaggactaatcatactttctctaatttaaggttgttaaggcccatgtggacgtgggccatactagttgtggctatatattctactaagggcccgtttggtaaaacttcagctcctgcttctttagcttcagattctgatcctcgtgaggagctgatcctcctgattttcctagaaaatcagaatcatttttaaaaccgtttggcaagtaaactgattcttgtcttctgagggttggtggcctatggcgattgtctg

SEQ ID NO: 80656 - DNA, 13406 bp, Zea Mays
aaggaaagtaggaaaccgcctgccctgcgtgtgggctgtctgctgtgttgctagcccagtactttctcttctcgctcacgcggcacgccgagcaaggggaccgacaggcggagcgcttctcagcccctccgcaccttcgggtctcgcgttggtggcgccggcgggcgctgccgatcgccggcggcggccgagatgttggaggaccaggtcgccttcctgctgcagaagtacctcggcaactacgtccggggcctcagcaaggaggcgctaaagatcagcgtctggagaggtgatgtagagctcacaaacatgcaactgaagccagaagctctcaattcattgaaattacctgttagagtcaaagctggctttcttggttctgtgaagctcaaggttccatggagcaggttgggacaagagccagttttggtttatcttgatcgaatttttatactagctgaaccagcaacacaagttgaaggttgcagcgaggatgctgtccaggaagcaaaaagaagtcgagttagggaaatggagatcaaattgttggagcgccaacagcaactgaaatctgaactaagttcatcatggctagggtctttcattggcactgtaattggaaatatcaagttatccattggcaatattcatatcagatacgaagacgtagagagcaatcctggccacccttttgcagcaggtctggtactttcaaagctttcagcagttacagtggatgaccttggcaaggagacttttgccacaggtggtgatttggaccgagtgaaaaagtctgttgaacttgagagtctggcggtgtattttgactctgatagcagttcttggattgtggataaaccctgggaggatttacttccatcagagtggagtcaggtttttgagtttcaggagcaggatggttccagatctgcttcgaaaaagcatgcctacattttacagcctgtatctggcaaagcaaaatatacaaagatacaacttactgaggcaaagaaaacaggacaagcattgcaaaatactgcagtggatttggatgatgttactctgtcgttgtcgaaggatggctacagggacatgttaaagttggctgataatttctctacattcaatcaacggctgagatatgctcatctccgaccatcttcaccattaaaatcggatccacgagcttggtggaagtatgcatacaaggtggtgactcaggaaatgaagaaagcaagcgggaggctatcttgggagcaattattgagaaatgcaagacttcggaagacatatgtatctttatatgcatccctcttaaaatctgacatgagtcgactggttgttgatgaccatgaggagattaagaggctggaccgtgaacttgatatggaggttattctacagtggaggatgttagctcacaagtttgtagaacagtcggtggaaacataccagtatgctcaacaaaataagaagtcctggtggactggctcttcaaaggatgaggaagattcaaagagttttactgatgaagattgggaaagactaaatcggattattgggtacaaagaaaccaacgagtatgtcactgatcaacaggatatgaaactgatgcaatttgattttgaaatacgtatgaaacataatgcatcaaagcttaccattgatgattcggagtgccttgctgatctctcatgccaagatttctgctgcaacttgaaaatgtatccggaggcaaaaatatttgatctgaagctgggttcctacaggcttttatctccatatggcctgcttgctgagagtgcaagtgtcatcgattcttttgttggcctcttctcctacaaaccttttgatgagcaactggactggagtttgacagctaaagcttcgccttgttatataacttatttaaaggattcagttgatcaaattgttggcttcttcaagagtagccctaccattagccagaacctggcactagagactgctgctgctgtacagatgacactagatgaagtgaaacggactgctcaacagcaaatgactcgggtgctaaaagatcagtccaggttttcactgaacatggatattgctgctccaaaaattaccgttcctaccaagttccgaccagatgatgtacatgagactaagcttttgcttgaccttggaaatttagttcttcggacagaggaaatatgggatgcctatacttcagaagagcaggatatatatctaaactttaatttggtgcttagtgatgtctctgcatttctggtggatggtgattaccattggaatgaaacatctgatgaaaagaacttgttgccagtaattgacaaatgtgggattgctttgaaacttcagcagatccagttagaaagtcctctatatccttccacaagaatggcgatacgggtgccttccctaggatttcatttctctcctgcacgctatcatcgtttaatggaaattttaaaattttttcaagatggtgctagtgataatagcaattcagatcatgaacacttgtgggatcatgctgactttgaaggatggtcatctcttctcacatggaagggtgttggaaaccgggaagctgtttggcaacacagatatttgcgtctagtgggtccatttctctatgtatttgaaaatttaatgtctacaacgtacaagcaatggttcagtttacgcgggaaacaagttcaccaggtacctactgagcttacaaatggcgtgcataacatcctggcgctgcatgattccggccaagttaatcccaaggaacggtctagtgacacttcataacattctttttctacttcagttcccctggcataattgattatctgaataaactttattcttttacagattctggaagacactggtgctttaattttgttgtttgataatgatgagggacgaaagatatggcagaaccgtttacagggtgctatataccgtgcatcgggttctgcaatttctagctttcctggagttgctctcccatcagaggcccactcattcaaaggcaactttcttgatgttgctgacacagagaaattatttgttgcgggcattcttgatgaattaaagatatgtttttcatgtggctatgagagtaaccacaaactaaaaaaaattctactagctaaggagagcagcctgtttgaatttcgggcagttggtggccaggttgaactctcaatgaaaggtggcaatttactgataggaactattttggggtcactagaaattgaagaccagtattactatccagggagtcctgtgccaaggttcttggcaaggtcttttattaatagcatgcaaactcaagaactcccgtctcttagccgaaagaacagtgcaggacctagaaacaccccattgatgaaaaatgacagtgaggaaaactttttcgaagcatcagatgattttgatgaatttgaaacacctatgcatcaaaagaggactatatcagactattttagcacccagaaatttttgcctactagcgttccttccctacagccgccaacatttaagcgcattcctgatttgataccagatactgaacttcaaactggcaaattcacattggaaggtagtggcactttcaatagttttgtgaaagctcagatagtgatttatgatcaacattctccccagtacaacagcttggataacagggtagttgtaactgttgccactttatccttcttttgccatcggccaactgttattgcaatcatggaatttatgaatgccatcaaccttgcaaacgggtctgatactgataaagataaaagcacttatcctgctactgtagaagatagtgcaattgaggaatctaagtctgatctggaatcagagccatcaataaaacccttactggctaaaggtaaaagcagaatagtttttcatcttacatccagcatggcagaggcacagatattactgatgaatgaaaatggtgaccggcttgctactttatcacaaaataatctctcgactgatataaaggtgttcacatcatcattcagcataaaggctgcactcggaaaccttaaaataagtgatgatagccttcttagcagccacccttacttttgggtttgtgatatgcgaaatcctggaggtcgttcatttgtggagatcgactttagttcatacaatgttggtgatgaagactattgtggttatgactatagccttgtagggcagctttcagaagttagaattgtttacctcaaccgttttgttcaagagattatcagttattttatgggacttgtgccaaaaagttctgatgccgttgtaaagctgaaagacaataagactaactcagagaagtgggttagcaaaaccgatatggaaggatcacctgctctcaaattggatgtttcattcagcaggcctataattgttatgccccgtgaaactaatagtaatgactttttggagcttgatgttctatacataacagtccaaaatgaattccaatggataggtggtgataagaatgagatgagcactgttcacttagacattttaacagttacagtacgggacataaatttagttattggtatgaatatggtgcgtggtgaaaccataattcaagatgtagaaggtctctcctttgaacttcgtagatcattgcgtgatttgagacatcagttgccagtggtggaggcagcaattaaggtggatgttttgaaagcaacactatccaatcgagaatatgaaattatttctgaatgtgcattgtctaacttctctgagacaccacatcctgtgcctactctggatgatcctcgatatggcacttccactactccatcccatgtatcagcttcttcttcagaaagtattcatgtcttgtccgaaggtgcagaaacatggatagctaataaattttctgtctcaataaatctggttgagctttctctgcattcaggatcgacaagagattctcctctggcgagcgttcaggcgagtggagcatggcttttctataaatcaaacacacggggagaaaattttatgtatgctactctcaaaggattttctgtttttgatgatcgtgaaggaaccaaagatgagttaaggcttgccattgggaaatcagcatctgttcgggacacatcatctgttgatggctatgataatcctaatgaacttgattcaggtgaacgaagaatacaaaaggatctaggccttgagccaatcccctcgatgcttattcttgatgccatcttccgaaaatcttcgtcatccgtctctgtctgtgttcagcggcccaagtttcttgtggcacttgacttcttactagcagtaatcgaattctttgtgccatctgctcagagtcttctatccaatgatgaagacaaggaccttttacatatgatcactccagtagtattgaatgatcaaatttatttccaggagcattcaacatttagtctttcacctcagaagcccttgattgttgataatgaaagatttgatcacttcgtatatgatgggaagggtggaaagttatatttgctggatagtgaggggaaaattctctcaagcccttgtactgagagtttcattcatgtgcttgggtgtaagagattgcaatttcggaatgtcactatagtgaatggtgaatatttggattcctgtatctctctcggtgatgatagctgttattcagcatcaaggaatgaccatgtctacttagtaagagaagatgatgggtccttgtcaacccccagcaaggaaattagaggagacagtgttaaaaatgggagtgctgatatatcaaccgaatttattatggaactacaggctattggaccagagcttactttctatagtacatcaaggaatgctggtgaaaacttagcactgtcaacaaaggttattcatgcccacacagatgcattttgcaggcttataatgaaaggcgacagtatggagatgaatggaaacatacttggtttaaagatggagagtaatggcatcagagttatagaaccatttgacatggtcgtgaaatattccaatgcgtctggaaagacaaatttgcatctactagtttctgaaatatatatgaatttttccttcagtattctcagactgtttttagcagttgaggaagaaatttcagcatttcttaggatgtcgtcaaagaaaatttcactggtgtgttaccagtttgacaaagttgcaactatgcaaggtaatgctaatgatcaagtgttatctttctggcgaccgcgtgctccatctggatatgccatttttggcgattatctcacaccaatgaacgagcctcctactaaaggagttcttgctctgaacacaaacattgttagggtcaaaaggcctttatcgtacaaactagtgtggcaatctggttctccaagaacaaacatttttcatcagaaggacttggaggataagatctctaatattgaccagctctgctctgtttggttacctgtggcacctgcgggttatgttgcaatgggttgtgttgcttcatctggaactgctgaaccacctttgtcttcagctttctgtttaactgcttctttggtttcatcatgtaatctaagggattgcattgcactgagggataacactaacatgatattctggcgagttgataatgcttttggttcctttttacctggagatcctgcaagcatgagtgtggatgggaatgcttatgatcttcgacatatgctgttcgacagtgcagactcatcttccaagactgtctctagaaggcaagatagtagaaatgatttctctcaactagagagatcagaattgacctcaggtcggctatttgatgctgtggcaagctttaaactaatttggtcaaatagtgggacctcttcaccaaaaaagctctcaatatggcgtccaatgttgtctgaaggaatgttttactttggtgacatagctgttaacgggtatgaaccaccaaattcaactgttgttcttcgtgatactggtgaagacacttttctcagagctcctgaaggttttgaccttgttggtcgaattaagaagcaccggggcactgagggtgtatcattttggtttcctaaagctccttcaggttttgtggcattaggatgtgttgcatctaaaagttctccaaccaaagaggacttcagtttgttaagatgtattagaaatgacatggtggctggaggtcaattttctgaggaaagtttatgggattcatctaatgctagaacatctgaaccttttagcttatggactgttgataatgatgctggtacgtttcttgtgagaagtggatatagaaaacctccaaagaggcttgcactgaagcttgcaggtccacctacatcaagcagttcagatagcatcattgttgatgccaaaattaaaacattttctgctgtttcctttgatgattatggcggaatgatggtgccattatttggggtgtcctttgacagtgttggactaagttatcatggaggtcctcatcatcttaatgcaactgtgagcttgtcttttgtggccagatcctataatgacaagtatagctcgtgggagccctttattgaaccaacagatgcatttcttaggtaccaattcgacatgaatacaccaggttctcctagacaactccgtattacctcaactcaagaccttaatttgaacatatctgtttccaatacaaacatgttatcgcaagcttatgctagctggaataatattagctgtggtgatgaattgtataagaaggaaaccttttcttctactgagcgaccagttcttgatgttcatcaaagaagaagttattatgttgtcccacaaaataaacttggacaagatatttatgtaagaactactgaaaatagaggttcacttgttactctgttgccctctggggatgataggtccataaaagttccggctttaagggatctatcagattctcatttaaatggaagatctgttaaaccatatcggttgatgataactgccattcttgcggatgcagaggtcaaggatgatgaaggattagaaactggtgaatatatgactgctgtgcggctcttttcagaaaaccattccatatctgttcaacaacagagtgcccgtacttgtgctgctattggagaacacttgtcacagaacaccagaaaggtgaactggaacgaaatgttctttttcaaagtcgaacgtgtggacagctatactctagagcttcttgtgcttgatgctggtaaaggtcaaccagttggtatatactctgctccattggagcaagttgtgcaaaagctccctcctacctctaatccggactctgtcaaatttgatttggctttaggagaccttatgtcaactaagacagtggaacaggaaactgttaaacctagtggaaaaataagatttgcggtacttgtttctggtagagctagtgtacaacaagggaacagagccagtcctgaaagcaagactggatatattcagattagcccttcaaaagaagggccatggacaagcatgaagttgaactatgctgtacctgcagcatgttggaggtttggtaattgtgtgattgctagtgaagcaacagtcaaggaaggcaacagatacgttagcatacgttcccttgtgtcagttactaatacaaccaatttcattgttgatttacgtctaaaaggaagaatttctcaaagtgcacgggcagatgaacagggagacagttttggtaaagaggatcaaatcctgattggaacgctggagcccaattctactattccagtcccactatcaggcctctcacatcctcttatgccctatatgttgcagttaaggccggcaaaacatcatgatcatgaaaattactcctggagtgatgtccaggagaggcgcagtcaaaccgagtttagaaaggaggagatcctagatttatgtatatcagatctgtatgaatcggaaaacttgctattctgctcacaggtagatggcacctcgaattcttgtcatggactgtggttttgcttgagcatagaaggcaaggaaataggcaaagatgtacagatggaaccaatatatgattggtgcatcattattaagtccccgttgtgtttgacatactatcttcccattgctgcacattatactgtcagttctagccacctcgataatgaagattcaagttgctcccttggcaccttaagtccgggtgaggctgtaaaggttcacaatgttgatccaagaaaccctttgtacttatccctggttccacatggaggatgggaactgatgcatgagcctgttgttatatcacatccaacccaagcaccttccaaatttatcaatctaagaagctctttatcaggaagattgcctacacttactctgcgtctcattgatatttctggaaggaaagagaagaggcgccttctttcacgttcacatctggaaaggggtgagaagcaactctatgatataaaacacgatgaattggttgagggatacactatagcgtctggattaaattttaagggattaggacttctatcatctgttggacatggtggacggtttggatctgtgaaagaattgtcgcctcttggcgatatggatggagcagttgatctttctgcctatgatgatgatggaaaatgcatgcatattcttctttgttcaaagccatcctcgtatcaagctgttccaacaaaggttatccatgtacgcccgtatataacattcacaaacagggccggacaagatttgtacttaaaacttagtattgaggatgagccaaaggtcttacatgcatatgactggagggtttcctttatgtactccaaggggactactgacaaactgcaggtccgactagtggatacagaatggtgccaacctctggagatagtaaaagaagacactattgttatagcaatgagaaagcagggtggtactcagaaatttgtaaaagctgagatacgtggttatgaggaaggttcaagattcttgattgtattccgtctgggcccagcatatggaccaatcaggattgagaaccggacgagtcataccacaatcagtacttgccagtctggtttaggggaggagagttggatccaagtgaagccacatgcaaccagaaaatattcttgggatgacccatatggacagaaagttattgatgttagcattgataaaggcgatgatacttgtgtcctatgtgttgacctggaaaatcctattggaagttccaccagttttagggaacatggcctcatgtttactgttgataccagtgacattaagatattgaagtttgctgattacataaggaaagaggaagtatatggattgcctggatctgaactgactgatcaccaaggatcgtcattgaaggaaaatgagacagagccaggtgctggacccttggagctcattgttgaacttggagttgttggaatatctttgattgatcataagccaagagagcttttatacttgcatctgcagaaggttttcgtttcatacttgactggttatgattttgggaccactagcaggtttaaattaatccttggcgagttgcaactagataatcagttgccactgtctacaatgcctgttgttttgtctaccgagagcaggcctgattcaaatcgttctgttttcaaagcaaacgttgctgttagcaatgtaacttctaatggcattcaagtttacccacatgtctatatccgggtaactgatcaaacatggagactaaacattcatgaacctattatttgggcactgtttgacttctacagcaatcttcgttttgtcaccaccatcaacagcacaactgtcacggaagtggatcctgagatacgaatagagctcattgatatttcagagataaggctaaaaatatctctggaaactgcgcctagtcaaagacctcgtggtgtcctaggcatatggagccccatcctatctgctgtgggtaatgcactcaagattcaggtgcatctgaggaaggtcatgcacagaagccggtttatgcggaagagctccatcatccctgctatcacgaaccgaatcaagagagatctgattcacaatccgctacatctaatcttttctgtggattttcttggagtaacaaaatcaactttatcatcacttagtaaaggatttgcagagctctctactgatgggcaatttcttcagctgagatcaaagcaggtgcaatagcttgtggttttttttgtccttgtttatgtcacttttttaaacatttacgcttcatgtgattcaggtttggtcaaggagaatcactggtgttggtgatgggctagttcaagggactgaagcatttgctcagggtttggctttcggggtttctggtgttttaagaaagccagttgagagtgccagacagtatggtgttataggtattgcacctggcattggccgtgcttttgtgggtttcattgtccaacctttaagtggggctctggattttttttcactgacggttgatggaatcagtgctagttttatgagatgtgttaacattttaagtaacaaatctgttccgcagaggataagagatcctcgtgctatacatcgtgatggtatagtaagagactatgacaaatttgaagctgctggccagatggccctttatctggcagaagctagcagatattttgcatgcacggatttatttcgagaaccttctaagtacgcatggtctgattactatgaagaccattttattttaccaagccagaggattgctttagtaactaataagcgggtgatgctgcttcagtgcttggatctagataaaatggacaagaaaccttctaaaatactttgggatgttccttgggaagaagtactttcattggagctagcaaaagctgggtatcagaggccttcacatgtaatcatacatctgaagaattttaggaggtcagagaactttgtaaggcttattaagtgcaacattgacaacgaacgggaacctcaggctctttcactttgctgttcaattcggaaaatgtggagatctcaccaagcagcaatgaaagttataccattgaaggttccatcaggccagcgtcatgtgtattttgtgtcagatgatgataaaaaggaatcccacagtttatctaggcctttgctaagctcgggaggaacctctactgatgttgagcaacagttcataaacaatacagttcactttcagaaaatgtggagcagtgaaccagaaattcagagccgatgcaaactagttgccaagcagattgcggatgacggaagggtgttcagcatatggaggcctctctgccctaatgggtatgtctcaattggtgatattgcgcatgttggcatccatccaccgcattttgctgctgtatacaagaatatcaatgggaactttgcactgcctcttggctatgacctggtttggagaaattgtgctgaggattacaagagccctgtatcaatatggcttccaaggccaccggggggatacgtagctcttgggtgtgttgctgtcccttcattcaaggagcccactcttgactgtgctttctgtgtggatgagagactcgcggaggatgccgcgtatgaggagcaaatcatatgggcctcatcggatgcttacccatggggatgctatatctaccaagttcagagcgcctcaatgcagttcatggcacttcgtgtcccaaaagaacaatctgagctaaggcccaagaagatattggagtcatttctgcagcaagcatcagagactcaaacgtcccgtgcatgaagaagctgcacatgatgcttgtgcgtgcaagagaactcggctgggacaaagggcaagtctcgtgcaagaaagctcgaagaatgccacttctttcggatcactccatttctccgttgtcaaagcatacacagaggacagagccttgcatgccaacactcgggttgacggaagtgttgtatactagaatagtaggttaaaggttgtaaatgtaaagttttgtaacgtttgatatagtttttgtccagctacatttgttaaggcccatgtggacgtgggccatattagttgtggctacatattctactaagaagttctcaggactaatcatactttctctaatttaaggttgttaaggcccatgtggacgtgggccatactagttgtggctatatattctactaagggcccgtttggtaaaacttcagctcctgcttctttagcttcagattctgatcctcgtgaggagctgatcctcctgattttcctagaaaatcagaatcatttttaaaaccgtttggcaagtaaactgattcttgtcttctgagggttggtggcctatggcgattgtctg

SEQ ID NO: 80657 - DNA, 9785 bp, Zea Mays
cttctcgctcacgcggcacgccgagcaaggggaccgacaggcggagcgcttctcagcccctccgcaccttcgggtctcgcgttggtggcgccggcgggcgctgccgatcgccggcggcggccgagatgttggaggaccaggtcgccttcctgctgcagaagtacctcggcaactacgtccggggcctcagcaaggaggcgctaaagatcagcgtctggagaggtgatgtagagctcacaaacatgcaactgaagccagaagctctcaattcattgaaattacctgttagagtcaaagctggctttcttggttctgtgaagctcaaggttccatggagcaggttgggacaagagccagttttggtttatcttgatcgaatttttatactagctgaaccagcaacacaagttgaaggttgcagcgaggatgctgtccaggaagcaaaaagaagtcgagttagggaaatggagatcaaattgttggagcgccaacagcaactgaaatctgaactaagttcatcatggctagggtctttcattggcactgtaattggaaatatcaagttatccattggcaatattcatatcagatacgaagacgtagagagcaatcctggccacccttttgcagcaggtctggtactttcaaagctttcagcagttacagtggatgaccttggcaaggagacttttgccacaggtggtgatttggaccgagtgaaaaagtctgttgaacttgagagtctggcggtgtattttgactctgatagcagttcttggattgtggataaaccctgggaggatttacttccatcagagtggagtcaggtttttgagtttcaggagcaggatggttccagatctgcttcgaaaaagcatgcctacattttacagcctgtatctggcaaagcaaaatatacaaagatacaacttactgaggcaaagaaaacaggacaagcattgcaaaatactgcagtggatttggatgatgttactctgtcgttgtcgaaggatggctacagggacatgttaaagttggctgataatttctctacattcaatcaacggctgagatatgctcatctccgaccatcttcaccattaaaatcggatccacgagcttggtggaagtatgcatacaaggtggtgactcaggaaatgaagaaagcaagcgggaggctatcttgggagcaattattgagaaatgcaagacttcggaagacatatgtatctttatatgcatccctcttaaaatctgacatgagtcgactggttgttgatgaccatgaggagattaagaggctggaccgtgaacttgatatggaggttattctacagtggaggatgttagctcacaagtttgtagaacagtcggtggaaacataccagtatgctcaacaaaataagaagtcctggtggactggctcttcaaaggatgaggaagattcaaagagttttactgatgaagattgggaaagactaaatcggattattgggtacaaagaaaccaacgagtatgtcactgatcaacaggatatgaaactgatgcaatttgattttgaaatacgtatgaaacataatgcatcaaagcttaccattgatgattcggagtgccttgctgatctctcatgccaagatttctgctgcaacttgaaaatgtatccggaggcaaaaatatttgatctgaagctgggttcctacaggcttttatctccatatggcctgcttgctgagagtgcaagtgtcatcgattcttttgttggcctcttctcctacaaaccttttgatgagcaactggactggagtttgacagctaaagcttcgccttgttatataacttatttaaaggattcagttgatcaaattgttggcttcttcaagagtagccctaccattagccagaacctggcactagagactgctgctgctgtacagatgacactagatgaagtgaaacggactgctcaacagcaaatgactcgggtgctaaaagatcagtccaggttttcactgaacatggatattgctgctccaaaaattaccgttcctaccaagttccgaccagatgatgtacatgagactaagcttttgcttgaccttggaaatttagttcttcggacagaggaaatatgggatgcctatacttcagaagagcaggatatatatctaaactttaatttggtgcttagtgatgtctctgcatttctggtggatggtgattaccattggaatgaaacatctgatgaaaagaacttgttgccagtaattgacaaatgtgggattgctttgaaacttcagcagatccagttagaaagtcctctatatccttccacaagaatggcgatacgggtgccttccctaggatttcatttctctcctgcacgctatcatcgtttaatggaaattttaaaattttttcaagatggtgctagtgataatagcaattcagatcatgaacacttgtgggatcatgctgactttgaaggatggtcatctcttctcacatggaagggtgttggaaaccgggaagctgtttggcaacacagatatttgcgtctagtgggtccatttctctatgtatttgaaaatttaatgtctacaacgtacaagcaatggttcagtttacgcgggaaacaagttcaccagattctggaagacactggtgctttaattttgttgtttgataatgatgagggacgaaagatatggcagaaccgtttacagggtgctatataccgtgcatcgggttctgcaatttctagctttcctggagttgctctcccatcagaggcccactcattcaaaggcaactttcttgatgttgctgacacagagaaattatttgttgcgggcattcttgatgaattaaagatatgtttttcatgtggctatgagagtaaccacaaactaaaaaaaattctactagctaaggagagcagcctgtttgaatttcgggcagttggtggccaggttgaactctcaatgaaaggtggcaatttactgataggaactattttggggtcactagaaattgaagaccagtattactatccagggagtcctgtgccaaggttcttggcaaggtcttttattaatagcatgcaaactcaagaactcccgtctcttagccgaaagaacagtgcaggacctagaaacaccccattgatgaaaaatgacagtgaggaaaactttttcgaagcatcagatgattttgatgaatttgaaacacctatgcatcaaaagaggactatatcagactattttagcacccagaaatttttgcctactagcgttccttccctacagccgccaacatttaagcgcattcctgatttgataccagatactgaacttcaaactggcaaattcacattggaaggtagtggcactttcaatagttttgtgaaagctcagatagtgatttatgatcaacattctccccagtacaacagcttggataacagggtagttgtaactgttgccactttatccttcttttgccatcggccaactgttattgcaatcatggaatttatgaatgccatcaaccttgcaaacgggtctgatactgataaagataaaagcacttatcctgctactgtagaagatagtgcaattgaggaatctaagtctgatctggaatcagagccatcaataaaacccttactggctaaaggtaaaagcagaatagtttttcatcttacatccagcatggcagaggcacagatattactgatgaatgaaaatggtgaccggcttgctactttatcacaaaataatctctcgactgatataaaggtgttcacatcatcattcagcataaaggctgcactcggaaaccttaaaataagtgatgatagccttcttagcagccacccttacttttgggtttgtgatatgcgaaatcctggaggtcgttcatttgtggagatcgactttagttcatacaatgttggtgatgaagactattgtggttatgactatagccttgtagggcagctttcagaagttagaattgtttacctcaaccgttttgttcaagagattatcagttattttatgggacttgtgccaaaaagttctgatgccgttgtaaagctgaaagacaataagactaactcagagaagtgggttagcaaaaccgatatggaaggatcacctgctctcaaattggatgtttcattcagcaggcctataattgttatgccccgtgaaactaatagtaatgactttttggagcttgatgttctatacataacagtccaaaatgaattccaatggataggtggtgataagaatgagatgagcactgttcacttagacattttaacagttacagtacgggacataaatttagttattggtatgaatatggtgcgtggtgaaaccataattcaagatgtagaaggtctctcctttgaacttcgtagatcattgcgtgatttgagacatcagttgccagtggtggaggcagcaattaaggtggatgttttgaaagcaacactatccaatcgagaatatgaaattatttctgaatgtgcattgtctaacttctctgagacaccacatcctgtgcctactctggatgatcctcgatatggcacttccactactccatcccatgtatcagcttcttcttcagaaagtattcatgtcttgtccgaaggtgcagaaacatggatagctaataaattttctgtctcaataaatctggttgagctttctctgcattcaggatcgacaagagattctcctctggcgagcgttcaggcgagtggagcatggcttttctataaatcaaacacacggggagaaaattttatgtatgctactctcaaaggattttctgtttttgatgatcgtgaaggaaccaaagatgagttaaggcttgccattgggaaatcagcatctgttcgggacacatcatctgttgatggctatgataatcctaatgaacttgattcaggtgaacgaagaatacaaaaggatctaggccttgagccaatcccctcgatgcttattcttgatgccatcttccgaaaatcttcgtcatccgtctctgtctgtgttcagcggcccaagtttcttgtggcacttgacttcttactagcagtaatcgaattctttgtgccatctgctcagagtcttctatccaatgatgaagacaaggaccttttacatatgatcactccagtagtattgaatgatcaaatttatttccaggagcattcaacatttagtctttcacctcagaagcccttgattgttgataatgaaagatttgatcacttcgtatatgatgggaagggtggaaagttatatttgctggatagtgaggggaaaattctctcaagcccttgtactgagagtttcattcatgtgcttgggtgtaagagattgcaatttcggaatgtcactatagtgaatggtgaatatttggattcctgtatctctctcggtgatgatagctgttattcagcatcaaggaatgaccatgtctacttagtaagagaagatgatgggtccttgtcaacccccagcaaggaaattagaggagacagtgttaaaaatgggagtgctgatatatcaaccgaatttattatggaactacaggctattggaccagagcttactttctatagtacatcaaggaatgctggtgaaaacttagcactgtcaacaaaggttattcatgcccacacagatgcattttgcaggcttataatgaaaggcgacagtatggagatgaatggaaacatacttggtttaaagatggagagtaatggcatcagagttatagaaccatttgacatggtcgtgaaatattccaatgcgtctggaaagacaaatttgcatctactagtttctgaaatatatatgaatttttccttcagtattctcagactgtttttagcagttgaggaagaaatttcagcatttcttaggatgtcgtcaaagaaaatttcactggtgtgttaccagtttgacaaagttgcaactatgcaaggtaatgctaatgatcaagtgttatctttctggcgaccgcgtgctccatctggatatgccatttttggcgattatctcacaccaatgaacgagcctcctactaaaggagttcttgctctgaacacaaacattgttagggtcaaaaggcctttatcgtacaaactagtgtggcaatctggttctccaagaacaaacatttttcatcagaaggacttggaggataagatctctaatattgaccagctctgctctgtttggttacctgtggcacctgcgggttatgttgcaatgggttgtgttgcttcatctggaactgctgaaccacctttgtcttcagctttctgtttaactgcttctttggtttcatcatgtaatctaagggattgcattgcactgagggataacactaacatgatattctggcgagttgataatgcttttggttcctttttacctggagatcctgcaagcatgagtgtggatgggaatgcttatgatcttcgacatatgctgttcgacagtgcagactcatcttccaagactgtctctagaaggcaagatagtagaaatgatttctctcaactagagagatcagaattgacctcaggtcggctatttgatgctgtggcaagctttaaactaatttggtcaaatagtgggacctcttcaccaaaaaagctctcaatatggcgtccaatgttgtctgaaggaatgttttactttggtgacatagctgttaacgggtatgaaccaccaaattcaactgttgttcttcgtgatactggtgaagacacttttctcagagctcctgaaggttttgaccttgttggtcgaattaagaagcaccggggcactgagggtgtatcattttggtttcctaaagctccttcaggttttgtggcattaggatgtgttgcatctaaaagttctccaaccaaagaggacttcagtttgttaagatgtattagaaatgacatggtggctggaggtcaattttctgaggaaagtttatgggattcatctaatgctagaacatctgaaccttttagcttatggactgttgataatgatgctggtacgtttcttgtgagaagtggatatagaaaacctccaaagaggcttgcactgaagcttgcaggtccacctacatcaagcagttcagatagcatcattgttgatgccaaaattaaaacattttctgctgtttcctttgatgattatggcggaatgatggtgccattatttggggtgtcctttgacagtgttggactaagttatcatggaggtcctcatcatcttaatgcaactgtgagcttgtcttttgtggccagatcctataatgacaagtatagctcgtgggagccctttattgaaccaacagatgcatttcttaggtaccaattcgacatgaatacaccaggttctcctagacaactccgtattacctcaactcaagaccttaatttgaacatatctgtttccaatacaaacatgttatcgcaagcttatgctagctggaataatattagctgtggtgatgaattgtataagaaggaaaccttttcttctactgagcgaccagttcttgatgttcatcaaagaagaagttattatgttgtcccacaaaataaacttggacaagatatttatgtaagaactactgaaaatagaggttcacttgttactctgttgccctctggggatgataggtccataaaagttccggctttaagggatctatcagattctcatttaaatggaagatctgttaaaccatatcggttgatgataactgccattcttgcggatgcagaggtcaaggatgatgaaggattagaaactggtgaatatatgactgctgtgcggctcttttcagaaaaccattccatatctgttcaacaacagagtgcccgtacttgtgctgctattggagaacacttgtcacagaacaccagaaaggtgaactggaacgaaatgttctttttcaaagtcgaacgtgtggacagctatactctagagcttcttgtgcttgatgctggtaaaggtcaaccagttggtatatactctgctccattggagcaagttgtgcaaaagctccctcctacctctaatccggactctgtcaaatttgatttggctttaggagaccttatgtcaactaagacagtggaaactgttaaacctagtggaaaaataagatttgcggtacttgtttctggtagagctagtgtacaacaagggaacagagccagtcctgaaagcaagactggatatattcagattagcccttcaaaagaagggccatggacaagcatgaagttgaactatgctgtacctgcagcatgttggaggtttggtaattgtgtgattgctagtgaagcaacagtcaaggaaggcaacagatacgttagcatacgttcccttgtgtcagttactaatacaaccaatttcattgttgatttacgtctaaaaggaagaatttctcaaagtgcacgggcagatgaacagggagacagttttggtaaagaggatcaaatcctgattggaacgctggagcccaattctactattccagtcccactatcaggcctctcacatcctcttatgccctatatgttgcagttaaggccggcaaaacatcatgatcatgaaaattactcctggagtgatgtccaggagaggcgcagtcaaaccgagtttagaaaggaggagatcctagatttatgtatatcagatctgtatgaatcggaaaacttgctattctgctcacaggtagatggcacctcgaattcttgtcatggactgtggttttgcttgagcatagaaggcaaggaaataggcaaagatgtacagatggaaccaatatatgattggtgcatcattattaagtccccgttgtgtttgacatactatcttcccattgctgcacattatactgtcagttctagccacctcgataatgaagattcaagttgctcccttggcaccttaagtccgggtgaggctgtaaaggttcacaatgttgatccaagaaaccctttgtacttatccctggttccacatggaggatgggaactgatgcatgagcctgttgttatatcacatccaacccaagcaccttccaaatttatcaatctaagaagctctttatcaggaagggttgtacagattctgcttgaacaaagcagtgatagtgactatttgatggcaaggcttatcagaatatatgttccctattggatatctttttctagattgcctacacttactctgcgtctcattgatatttctggaaggaaagagaagaggcgccttctttcacgttcacatctggaaaggggtgagaagcaactctatgatataaaacacgatgaattggttgagggatacactatagcgtctggattaaattttaagggattaggacttctatcatctgttggacatggtggacggtttggatctgtgaaagaattgtcgcctcttggcgatatggatggagcagttgatctttctgcctatgatgatgatggaaaatgcatgcatattcttctttgttcaaagccatcctcgtatcaagctgttccaacaaaggttatccatgtacgcccgtatataacattcacaaacagggccggacaagatttgtacttaaaacttagtattgaggatgagccaaaggtcttacatgcatatgactggagggtttcctttatgtactccaaggggactactgacaaactgcaggtactacaatattctcagcgaagcaccatttag

SEQ ID NO: 80658 - DNA, 13027 bp, Zea Mays
ctcgctcacgcggcacgccgagcaaggggaccgacaggcggagcgcttctcagcccctccgcaccttcgggtctcgcgttggtggcgccggcgggcgctgccgatcgccggcggcggccgagatgttggaggaccaggtcgccttcctgctgcagaagtacctcggcaactacgtccggggcctcagcaaggaggcgctaaagatcagcgtctggagaggtgatgtagagctcacaaacatgcaactgaagccagaagctctcaattcattgaaattacctgttagagtcaaagctggctttcttggttctgtgaagctcaaggttccatggagcaggttgggacaagagccagttttggtttatcttgatcgaatttttatactagctgaaccagcaacacaagttgaaggttgcagcgaggatgctgtccaggaagcaaaaagaagtcgagttagggaaatggagatcaaattgttggagcgccaacagcaactgaaatctgaactaagttcatcatggctagggtctttcattggcactgtaattggaaatatcaagttatccattggcaatattcatatcagatacgaagacgtagagagcaatcctggccacccttttgcagcaggtctggtactttcaaagctttcagcagttacagtggatgaccttggcaaggagacttttgccacaggtggtgatttggaccgagtgaaaaagtctgttgaacttgagagtctggcggtgtattttgactctgatagcagttcttggattgtggataaaccctgggaggatttacttccatcagagtggagtcaggtttttgagtttcaggagcaggatggttccagatctgcttcgaaaaagcatgcctacattttacagcctgtatctggcaaagcaaaatatacaaagatacaacttactgaggcaaagaaaacaggacaagcattgcaaaatactgcagtggatttggatgatgttactctgtcgttgtcgaaggatggctacagggacatgttaaagttggctgataatttctctacattcaatcaacggctgagatatgctcatctccgaccatcttcaccattaaaatcggatccacgagcttggtggaagtatgcatacaaggtggtgactcaggaaatgaagaaagcaagcgggaggctatcttgggagcaattattgagaaatgcaagacttcggaagacatatgtatctttatatgcatccctcttaaaatctgacatgagtcgactggttgttgatgaccatgaggagattaagaggctggaccgtgaacttgatatggaggttattctacagtggaggatgttagctcacaagtttgtagaacagtcggtggaaacataccagtatgctcaacaaaataagaagtcctggtggtcatttggatggactggctcttcaaaggatgaggaagattcaaagagttttactgatgaagattgggaaagactaaatcggattattgggtacaaagaaaccaacgagtatgtcactgatcaacaggatatgaaactgatgcaatttgattttgaaatacgtatgaaacataatgcatcaaagcttaccattgatgattcggagtgccttgctgatctctcatgccaagatttctgctgcaacttgaaaatgtatccggaggcaaaaatatttgatctgaagctgggttcctacaggcttttatctccatatggcctgcttgctgagagtgcaagtgtcatcgattcttttgttggcctcttctcctacaaaccttttgatgagcaactggactggagtttgacagctaaagcttcgccttgttatataacttatttaaaggattcagttgatcaaattgttggcttcttcaagagtagccctaccattagccagaacctggcactagagactgctgctgctgtacagatgacactagatgaagtgaaacggactgctcaacagcaaatgactcgggtgctaaaagatcagtccaggttttcactgaacatggatattgctgctccaaaaattaccgttcctaccaagttccgaccagatgatgtacatgagactaagcttttgcttgaccttggaaatttagttcttcggacagaggaaatatgggatgcctatacttcagaagagcaggatatatatctaaactttaatttggtgcttagtgatgtctctgcatttctggtggatggtgattaccattggaatgaaacatctgatgaaaagaacttgttgccagtaattgacaaatgtgggattgctttgaaacttcagcagatccagttagaaagtcctctatatccttccacaagaatggcgatacgggtgccttccctaggatttcatttctctcctgcacgctatcatcgtttaatggaaattttaaaattttttcaagatggtgctagtgataatagcaattcagatcatgaacacttgtgggatcatgctgactttgaaggatggtcatctcttctcacatggaagggtgttggaaaccgggaagctgtttggcaacacagatatttgcgtctagtgggtccatttctctatgtatttgaaaatttaatgtctacaacgtacaagcaatggttcagtttacgcgggaaacaagttcaccagattctggaagacactggtgctttaattttgttgtttgataatgatgagggacgaaagatatggcagaaccgtttacagggtgctatataccgtgcatcgggttctgcaatttctagctttcctggagttgctctcccatcagaggcccactcattcaaaggcaactttcttgatgttgctgacacagagaaattatttgttgcgggcattcttgatgaattaaagatatgtttttcatgtggctatgaggttgaactctcaatgaaaggtggcaatttactgataggaactattttggggtcactagaaattgaagaccagtattactatccagggagtcctgtgccaaggttcttggcaaggtcttttattaatagcatgcaaactcaagaactcccgtctcttagccgaaagaacagtgcaggacctagaaacaccccattgatgaaaaatgacagtgaggaaaactttttcgaagcatcagatgattttgatgaatttgaaacacctatgcatcaaaagaggactatatcagactattttagcacccagaaatttttgcctactagcgttccttccctacagccgccaacatttaagcgcattcctgatttgataccagatactgaacttcaaactggcaaattcacattggaaggtagtggcactttcaatagttttgtgaaagctcagatagtgatttatgatcaacattctccccagtacaacagcttggataacagggtagttgtaactgttgccactttatccttcttttgccatcggccaactgttattgcaatcatggaatttatgaatgccatcaaccttgcaaacgggtctgatactgataaagataaaagcacttatcctgctactgtagaagatagtgcaattgaggaatctaagtctgatctggaatcagagccatcaataaaacccttactggctaaaggtaaaagcagaatagtttttcatcttacatccagcatggcagaggcacagatattactgatgaatgaaaatggtgaccggcttgctactttatcacaaaataatctctcgactgatataaaggtgttcacatcatcattcagcataaaggctgcactcggaaaccttaaaataagtgatgatagccttcttagcagccacccttacttttgggtttgtgatatgcgaaatcctggaggtcgttcatttgtggagatcgactttagttcatacaatgttggtgatgaagactattgtggttatgactatagccttgtagggcagctttcagaagttagaattgtttacctcaaccgttttgttcaagagattatcagttattttatgggacttgtgccaaaaagttctgatgccgttgtaaagctgaaagacaataagactaactcagagaagtgggttagcaaaaccgatatggaaggatcacctgctctcaaattggatgtttcattcagcaggcctataattgttatgccccgtgaaactaatagtaatgactttttggagcttgatgttctatacataacagtccaaaatgaattccaatggataggtggtgataagaatgagatgagcactgttcacttagacattttaacagttacagtacgggacataaatttagttattggtatgaatatggtgcgtggtgaaaccataattcaagatgtagaaggtctctcctttgaacttcgtagatcattgcgtgatttgagacatcagttgccagtggtggaggcagcaattaaggtggatgttttgaaagcaacactatccaatcgagaatatgaaattatttctgaatgtgcattgtctaacttctctgagacaccacatcctgtgcctactctggatgatcctcgatatggcacttccactactccatcccatgtatcagcttcttcttcagaaagtattcatgtcttgtccgaaggtgcagaaacatggatagctaataaattttctgtctcaataaatctggttgagctttctctgcattcaggatcgacaagagattctcctctggcgagcgttcaggcgagtggagcatggcttttctataaatcaaacacacggggagaaaattttatgtatgctactctcaaaggattttctgtttttgatgatcgtgaaggaaccaaagatgagttaaggcttgccattgggaaatcagcatctgttcgggacacatcatctgttgatggctatgataatcctaatgaacttgattcaggtgaacgaagaatacaaaaggatctaggccttgagccaatcccctcgatgcttattcttgatgccatcttccgaaaatcttcgtcatccgtctctgtctgtgttcagcggcccaagtttcttgtggcacttgacttcttactagcagtaatcgaattctttgtgccatctgctcagagtcttctatccaatgatgaagacaaggaccttttacatatgatcactccagtagtattgaatgatcaaatttatttccaggagcattcaacatttagtctttcacctcagaagcccttgattgttgataatgaaagatttgatcacttcgtatatgatgggaagggtggaaagttatatttgctggatagtgaggggaaaattctctcaagcccttgtactgagagtttcattcatgtgcttgggtgtaagagattgcaatttcggaatgtcactatagtgaatggtgaatatttggattcctgtatctctctcggtgatgatagctgttattcagcatcaaggaatgaccatgtctacttagtaagagaagatgatgggtccttgtcaacccccagcaaggaaattagaggagacagtgttaaaaatgggagtgctgatatatcaaccgaatttattatggaactacaggctattggaccagagcttactttctatagtacatcaaggaatgctggtgaaaacttagcactgtcaacaaaggttattcatgcccacacagatgcattttgcaggcttataatgaaaggcgacagtatggagatgaatggaaacatacttggtttaaagatggagagtaatggcatcagagttatagaaccatttgacatggtcgtgaaatattccaatgcgtctggaaagacaaatttgcatctactagtttctgaaatatatatgaatttttccttcagtattctcagactgtttttagcagttgaggaagaaatttcagcatttcttaggatgtcgtcaaagaaaatttcactggtgtgttaccagtttgacaaagttgcaactatgcaaggtaatgctaatgatcaagtgttatctttctggcgaccgcgtgctccatctggatatgccatttttggcgattatctcacaccaatgaacgagcctcctactaaaggagttcttgctctgaacacaaacattgttagggtcaaaaggcctttatcgtacaaactagtgtggcaatctggttctccaagaacaaacatttttcatcagaaggacttggaggataagatctctaatattgaccagctctgctctgtttggttacctgtggcacctgcgggttatgttgcaatgggttgtgttgcttcatctggaactgctgaaccacctttgtcttcagctttctgtttaactgcttctttggtttcatcatgtaatctaagggattgcattgcactgagggataacactaacatgatattctggcgagttgataatgcttttggttcctttttacctggagatcctgcaagcatgagtgtggatgggaatgcttatgatcttcgacatatgctgttcgacagtgcagactcatcttccaagactgtctctagaaggcaagatagtagaaatgatttctctcaactagagagatcagaattgacctcaggtcggctatttgatgctgtggcaagctttaaactaatttggtcaaatagtgggacctcttcaccaaaaaagctctcaatatggcgtccaatgttgtctgaaggaatgttttactttggtgacatagctgttaacgggtatgaaccaccaaattcaactgttgttcttcgtgatactggtgaagacacttttctcagagctcctgaaggttttgaccttgttggtcgaattaagaagcaccggggcactgagggtgtatcattttggtttcctaaagctccttcaggttttgtggcattaggatgtgttgcatctaaaagttctccaaccaaagaggacttcagtttgttaagatgtattagaaatgacatggtggctggaggtcaattttctgaggaaagtttatgggattcatctaatgctagaacatctgaaccttttagcttatggactgttgataatgatgctggtacgtttcttgtgagaagtggatatagaaaacctccaaagaggcttgcactgaagcttgcaggtccacctacatcaagcagttcagatagcatcattgttgatgccaaaattaaaacattttctgctgtttcctttgatgattatggcggaatgtattctatgcagatggtgccattatttggggtgtcctttgacagtgttggactaagttatcatggaggtcctcatcatcttaatgcaactgtgagcttgtcttttgtggccagatcctataatgacaagtatagctcgtgggagccctttattgaaccaacagatgcatttcttaggtaccaattcgacatgaatacaccaggttctcctagacaactccgtattacctcaactcaagaccttaatttgaacatatctgtttccaatacaaacatgttatcgcaagcttatgctagctggaataatattagctgtggtgatgaattgtataagaaggaaaccttttcttctactgagcgaccagttcttgatgttcatcaaagaagaagttattatgttgtcccacaaaataaacttggacaagatatttatgtaagaactactgaaaatagaggttcacttgttactctgttgccctctggggatgataggtccataaaagttccggctttaagggatctatcagattctcatttaaatggaagatctgttaaaccatatcggttgatgataactgccattcttgcggatgcagaggtcaaggatgatgaaggattagaaactggtgaatatatgactgctgtgcggctcttttcagaaaaccattccatatctgttcaacaacagagtgcccgtacttgtgctgctattggagaacacttgtcacagaacaccagaaaggtgaactggaacgaaatgttctttttcaaagtcgaacgtgtggacagctatactctagagcttcttgtgcttgatgctggtaaaggtcaaccagttggtatatactctgctccattggagcaagttgtgcaaaagctccctcctacctctaatccggactctgtcaaatttgatttggctttaggagaccttatgtcaactaagacagtggaaactgttaaacctagtggaaaaataagatttgcggtacttgtttctggtagagctagtgtacaacaagggaacagagccagtcctgaaagcaagactggatatattcagattagcccttcaaaagaagggccatggacaagcatgaagttgaactatgctgtacctgcagcatgttggaggtttggtaattgtgtgattgctagtgaagcaacagtcaaggaaggcaacagatacgttagcatacgttcccttgtgtcagttactaatacaaccaatttcattgttgatttacgtctaaaaggaagaatttctcaaagtgcacgggcagatgaacagggagacagttttggtaaagaggatcaaatcctgattggaacgctggagcccaattctactattccagtcccactatcaggcctctcacatcctcttatgccctatatgttgcagttaaggccggcaaaacatcatgatcatgaaaattactcctggagtgatgtccaggagaggcgcagtcaaaccgagtttagaaaggaggagatcctagatttatgtatatcagatctgtatgaatcggaaaacttgctattctgctcacaggtagatggcacctcgaattcttgtcatggactgtggttttgcttgagcatagaaggcaaggaaataggcaaagatgtacagatggaaccaatatatgattggtgcatcattattaagtccccgttgtgtttgacatactatcttcccattgctgcacattatactgtcagttctagccacctcgataatgaagattcaagttgctcccttggcaccttaagtccgggtgaggctgtaaaggttcacaatgttgatccaagaaaccctttgtacttatccctggttccacatggaggatgggaactgatgcatgagcctgttgttatatcacatccaacccaagcaccttccaaatttatcaatctaagaagctctttatcaggaagattgcctacacttactctgcgtctcattgatatttctggaaggaaagagaagaggcgccttctttcacgttcacatctggaaaggggtgagaagcaactctatgatataaaacacgatgaattggttgagggatacactatagcgtctggattaaattttaagggattaggacttctatcatctgttggacatggtggacggtttggatctgtgaaagaattgtcgcctcttggcgatatggatggagcagttgatctttctgcctatgatgatgatggaaaatgcatgcatattcttctttgttcaaagccatcctcgtatcaagctgttccaacaaaggttatccatgtacgcccgtatataacattcacaaacagggccggacaagatttgtacttaaaacttagtattgaggatgagccaaaggtcttacatgcatatgactggagggtttcctttatgtactccaaggggactactgacaaactgcaggtccgactagtggatacagaatggtgccaacctctggagatagtaaaagaagacactattgttatagcaatgagaaagcagggtggtactcagaaatttgtaaaagctgagatacgtggttatgaggaaggttcaagattcttgattgtattccgtctgggcccagcatatggaccaatcaggattgagaaccggacgagtcataccacaatcagtacttgccagtctggtttaggggaggagagttggatccaagtgaagccacatgcaaccagaaaatattcttgggatgacccatatggacagaaagttattgatgttagcattgataaaggcgatgatacttgtgtcctatgtgttgacctggaaaatcctattggaagttccaccagttttagggaacatggcctcatgtttactgttgataccagtgacattaagatattgaagtttgctgattacataaggaaagaggaagtatatggattgcctggatctgaactgactgatcaccaaggatcgtcattgaaggaaaatgagacagagccaggtgctggacccttggagctcattgttgaacttggagttgttggaatatctttgattgatcataagccaagagagcttttatacttgcatctgcagaaggttttcgtttcatacttgactggttatgattttgggaccactagcaggtttaaattaatccttggcgagttgcaactagataatcagttgccactgtctacaatgcctgttgttttgtctaccgagagcaggcctgattcaaatcgttctgttttcaaagcaaacgttgctgttagcaatgtaacttctaatggcattcaagtttacccacatgtctatatccgggtaactgatcaaacatggagactaaacattcatgaacctattatttgggcactgtttgacttctacagcaatcttcgttttgtcaccaccatcaacagcacaactgtcacggaagtggatcctgagatacgaatagaagataaggctaaaaatatctctggaaactgcgcctagtcaaagacctcgtggtgtcctaggcatatggagccccatcctatctgctgtgggtaatgcactcaagattcaggtgcatctgaggaaggtcatgcacagaagccggtttatgcggaagagctccatcatccctgctatcacgaaccgaatcaagagagatctgattcacaatccgctacatctaatcttttctgtggattttcttggagtaacaaaatcaactttatcatcacttagtaaaggatttgcagagctctctactgatgggcaatttcttcagctgagatcaaagcaggtttggtcaaggagaatcactggtgttggtgatgggctagttcaagggactgaagcatttgctcagggtttggctttcggggtttctggtgttttaagaaagccagttgagagtgccagacagtatggtgttataggtattgcacctggcattggccgtgcttttgtgggtttcattgtccaacctttaagtggggctctggattttttttcactgacggttgatggaatcagtgctagttttatgagatgtgttaacattttaagtaacaaatctgttccgcagaggataagagatcctcgtgctatacatcgtgatggtatagtaagagactatgacaaatttgaagctgctggccagatggccctttatctggcagaagctagcagatattttgcatgcacggatttatttcgagaaccttctaagtacgcatggtctgattactatgaagaccattttattttaccaagccagaggattgctttagtaactaataagcgggtgatgctgcttcagtgcttggatctagataaaatggacaagaaaccttctaaaatactttgggatgttccttgggaagaagtactttcattggagctagcaaaagctgggtatcagaggccttcacatgtaatcatacatctgaagaattttaggaggtcagagaactttgtaaggcttattaagtgcaacattgacaacgaacgggaacctcaggctctttcactttgctgttcaattcggaaaatgtggagatctcaccaagcagcaatgaaagttataccattgaaggttccatcaggccagcgtcatgtgtattttgtgtcagatgatgataaaaaggaatcccacagtttatctaggcctttgctaagctcgggaggaacctctactgatgttgagcaacagttcataaacaatacagttcactttcagaaaatgtggagcagtgaaccagaaattcagagccgatgcaaactagttgccaagcagattgcggatgacggaagggtgttcagcatatggaggcctctctgccctaatgggtatgtctcaattggtgatattgcgcatgttggcatccatccaccgcattttgctgctgtatacaagaatatcaatgggaactttgcactgcctcttggctatgacctggtttggagaaattgtgctgaggattacaagagccctgtatcaatatggcttccaaggccaccggggggatacgtagctcttgggtgtgttgctgtcccttcattcaaggagcccactcttgactgtgctttctgtgtggatgagagactcgcggaggatgccgcgtatgaggagcaaatcatatgggcctcatcggatgcttacccatggggatgctatatctaccaagttcagagcgcctcaatgcagttcatggcacttcgtgtcccaaaagaacaatctgagctaaggcccaagaagatattggagtcatttctgcagcaagcatcagagactcaaacgtcccgtgcatgaagaagctgcacatgatgcttgtgcgtgcaagagaactcggctgggacaaagggcaagtctcgtgcaagaaagctcgaagaatgccacttctttcggatcactccatttctccgttgtcaaagcatacacagaggacagagccttgcatgccaacactcgggttgacggaagtgttgtatactagaatagtaggttaaaggttgtaaatgtaaagttttgtaacgtttgatatagtttttgtccagctacatttgttaaggcccatgtggacgtgggccatattagttgtggctacatattctactaagaagttctcaggactaatcatactttctctaatttaaggttgttaaggcccatgtggacgtgggccatactagttgtggctatatattctactaagggcccgtttggtaaaacttcagctcctgcttctttagcttcagattctgatcctcgtgaggagctgatcctcctgattttcctagaaaatcagaatcatttttaaaaccgtttggcaagtaaactgattcttgtcttctgagggttggtggcctatggcgattgtctg

SEQ ID NO: 80659 - DNA, 13051 bp, Zea Mays
ccgacaggcggagcgcttctcagcccctccgcaccttcgggtctcgcgttggtggcgccggcgggcgctgccgatcgccggcggcggccgagatgttggaggaccaggtcgccttcctgctgcagaagtacctcggcaactacgtccggggcctcagcaaggaggcgctaaagatcagcgtctggagaggtgatgtagagctcacaaacatgcaactgaagccagaagctctcaattcattgaaattacctgttagagtcaaagctggctttcttggttctgtgaagctcaaggttccatggagcaggttgggacaagagccagttttggtttatcttgatcgaatttttatactagctgaaccagcaacacaagttgaaggttgcagcgaggatgctgtccaggaagcaaaaagaagtcgagttagggaaatggagatcaaattgttggagcgccaacagcaactgaaatctgaactaagttcatcatggctagggtctttcattggcactgtaattggaaatatcaagttatccattggcaatattcatatcagatacgaagacgtagagagcaatcctggccacccttttgcagcaggtctggtactttcaaagctttcagcagttacagtggatgaccttggcaaggagacttttgccacaggtggtgatttggaccgagtgaaaaagtctgttgaacttgagagtctggcggtgtattttgactctgatagcagttcttggattgtggataaaccctgggaggatttacttccatcagagtggagtcaggtttttgagtttcaggagcaggatggttccagatctgcttcgaaaaagcatgcctacattttacagcctgtatctggcaaagcaaaatatacaaagatacaacttactgaggcaaagaaaacaggacaagcattgcaaaatactgcagtggatttggatgatgttactctgtcgttgtcgaaggatggctacagggacatgttaaagttggctgataatttctctacattcaatcaacggctgagatatgctcatctccgaccatcttcaccattaaaatcggatccacgagcttggtggaagtatgcatacaaggtggtgactcaggaaatgaagaaagcaagcgggaggctatcttgggagcaattattgagaaatgcaagacttcggaagacatatgtatctttatatgcatccctcttaaaatctgacatgagtcgactggttgttgatgaccatgaggagattaagaggctggaccgtgaacttgatatggaggttattctacagtggaggatgttagctcacaagtttgtagaacagtcggtggaaacataccagtatgctcaacaaaataagaagtcctggtggtcatttggatggactggctcttcaaaggatgaggaagattcaaagagttttactgatgaagattgggaaagactaaatcggattattgggtacaaagaaaccaacgagtatgtcactgatcaacaggatatgaaactgatgcaatttgattttgaaatacgtatgaaacataatgcatcaaagcttaccattgatgattcggagtgccttgctgatctctcatgccaagatttctgctgcaacttgaaaatgtatccggaggcaaaaatatttgatctgaagctgggttcctacaggcttttatctccatatggcctgcttgctgagagtgcaagtgtcatcgattcttttgttggcctcttctcctacaaaccttttgatgagcaactggactggagtttgacagctaaagcttcgccttgttatataacttatttaaaggattcagttgatcaaattgttggcttcttcaagagtagccctaccattagccagaacctggcactagagactgctgctgctgtacagatgacactagatgaagtgaaacggactgctcaacagcaaatgactcgggtgctaaaagatcagtccaggttttcactgaacatggatattgctgctccaaaaattaccgttcctaccaagttccgaccagatgatgtacatgagactaagcttttgcttgaccttggaaatttagttcttcggacagaggaaatatgggatgcctatacttcagaagagcaggatatatatctaaactttaatttggtgcttagtgatgtctctgcatttctggtggatggtgattaccattggaatgaaacatctgatgaaaagaacttgttgccagtaattgacaaatgtgggattgctttgaaacttcagcagggtgttggaaaccgggaagctgtttggcaacacagatatttgcgtctagtgggtccatttctctatgtatttgaaaatttaatgtctacaacgtacaagcaatggttcagtttacgcgggaaacaagttcaccagattctggaagacactggtgctttaattttgttgtttgataatgatgagggacgaaagatatggcagaaccgtttacagggtgctatataccgtgcatcgggttctgcaatttctagctttcctggagttgctctcccatcagaggcccactcattcaaaggcaactttcttgatgttgctgacacagagaaattatttgttgcgggcattcttgatgaattaaagatatgtttttcatgtggctatgaggttgaactctcaatgaaaggtggcaatttactgataggaactattttggggtcactagaaattgaagaccagtattactatccagggagtcctgtgccaaggttcttggcaaggtcttttattaatagcatgcaaactcaagaactcccgtctcttagccgaaagaacagtgcaggacctagaaacaccccattgatgaaaaatgacagtgaggaaaactttttcgaagcatcagatgattttgatgaatttgaaacacctatgcatcaaaagaggactatatcagactattttagcacccagaaatttttgcctactagcgttccttccctacagccgccaacatttaagcgcattcctgatttgataccagatactgaacttcaaactggcaaattcacattggaaggtagtggcactttcaatagttttgtgaaagctcagatagtgatttatgatcaacattctccccagtacaacagcttggataacagggtagttgtaactgttgccactttatccttcttttgccatcggccaactgttattgcaatcatggaatttatgaatgccatcaaccttgcaaacgggtctgatactgataaagataaaagcacttatcctgctactgtagaagatagtgcaattgaggaatctaagtctgatctggaatcagagccatcaataaaacccttactggctaaaggtaaaagcagaatagtttttcatcttacatccagcatggcagaggcacagatattactgatgaatgaaaatggtgaccggcttgctactttatcacaaaataatctctcgactgatataaaggtgttcacatcatcattcagcataaaggctgcactcggaaaccttaaaataagtgatgatagccttcttagcagccacccttacttttgggtttgtgatatgcgaaatcctggaggtcgttcatttgtggagatcgactttagttcatacaatgttggtgatgaagactattgtggttatgactatagccttgtagggcagctttcagaagttagaattgtttacctcaaccgttttgttcaagagattatcagttattttatgggacttgtgccaaaaagttctgatgccgttgtaaagctgaaagacaataagactaactcagagaagtgggttagcaaaaccgatatggaaggatcacctgctctcaaattggatgtttcattcagcaggcctataattgttatgccccgtgaaactaatagtaatgactttttggagcttgatgttctatacataacagtccaaaatgaattccaatggataggtggtgataagaatgagatgagcactgttcacttagacattttaacagttacagtacgggacataaatttagttattggtatgaatatggtgcgtggtgaaaccataattcaagatgtagaaggtctctcctttgaacttcgtagatcattgcgtgatttgagacatcagttgccagtggtggaggcagcaattaaggtggatgttttgaaagcaacactatccaatcgagaatatgaaattatttctgaatgtgcattgtctaacttctctgagacaccacatcctgtgcctactctggatgatcctcgatatggcacttccactactccatcccatgtatcagcttcttcttcagaaagtattcatgtcttgtccgaaggtgcagaaacatggatagctaataaattttctgtctcaataaatctggttgagctttctctgcattcaggatcgacaagagattctcctctggcgagcgttcaggcgagtggagcatggcttttctataaatcaaacacacggggagaaaattttatgtatgctactctcaaaggattttctgtttttgatgatcgtgaaggaaccaaagatgagttaaggcttgccattgggaaatcagcatctgttcgggacacatcatctgttgatggctatgataatcctaatgaacttgattcaggtgaacgaagaatacaaaaggatctaggccttgagccaatcccctcgatgcttattcttgatgccatcttccgaaaatcttcgtcatccgtctctgtctgtgttcagcggcccaagtttcttgtggcacttgacttcttactagcagtaatcgaattctttgtgccatctgctcagagtcttctatccaatgatgaagacaaggaccttttacatatgatcactccagtagtattgaatgatcaaatttatttccaggagcattcaacatttagtctttcacctcagaagcccttgattgttgataatgaaagatttgatcacttcgtatatgatgggaagggtggaaagttatatttgctggatagtgaggggaaaattctctcaagcccttgtactgagagtttcattcatgtgcttgggtgtaagagattgcaatttcggaatgtcactatagtgaatggtgaatatttggattcctgtatctctctcggtgatgatagctgttattcagcatcaaggaatgaccatgtctacttagtaagagaagatgatgggtccttgtcaacccccagcaaggaaattagaggagacagtgttaaaaatgggagtgctgatatatcaaccgaatttattatggaactacaggctattggaccagagcttactttctatagtacatcaaggaatgctggtgaaaacttagcactgtcaacaaaggttattcatgcccacacagatgcattttgcaggcttataatgaaaggcgacagtatggagatgaatggaaacatacttggtttaaagatggagagtaatggcatcagagttatagaaccatttgacatggtcgtgaaatattccaatgcgtctggaaagacaaatttgcatctactagtttctgaaatatatatgaatttttccttcagtattctcagactgtttttagcagttgaggaagaaatttcagcatttcttaggatgtcgtcaaagaaaatttcactggtgtgttaccagtttgacaaagttgcaactatgcaaggtaatgctaatgatcaagtgttatctttctggcgaccgcgtgctccatctggatatgccatttttggcgattatctcacaccaatgaacgagcctcctactaaaggagttcttgctctgaacacaaacattgttagggtcaaaaggcctttatcgtacaaactagtgtggcaatctggttctccaagaacaaacatttttcatcagaaggacttggaggataagatctctaatattgaccagctctgctctgtttggttacctgtggcacctgcgggttatgttgcaatgggttgtgttgcttcatctggaactgctgaaccacctttgtcttcagctttctgtttaactgcttctttggtttcatcatgtaatctaagggattgcattgcactgagggataacactaacatgatattctggcgagttgataatgcttttggttcctttttacctggagatcctgcaagcatgagtgtggatgggaatgcttatgatcttcgacatatgctgttcgacagtgcagactcatcttccaagactgtctctagaaggcaagatagtagaaatgatttctctcaactagagagatcagaattgacctcaggtcggctatttgatgctgtggcaagctttaaactaatttggtcaaatagtgggacctcttcaccaaaaaagctctcaatatggcgtccaatgttgtctgaaggaatgttttactttggtgacatagctgttaacgggtatgaaccaccaaattcaactgttgttcttcgtgatactggtgaagacacttttctcagagctcctgaaggttttgaccttgttggtcgaattaagaagcaccggggcactgagggtgtatcattttggtttcctaaagctccttcaggttttgtggcattaggatgtgttgcatctaaaagttctccaaccaaagaggacttcagtttgttaagatgtattagaaatgacatggtggctggaggtcaattttctgaggaaagtttatgggattcatctaatgctagaacatctgaaccttttagcttatggactgttgataatgatgctggtacgtttcttgtgagaagtggatatagaaaacctccaaagaggcttgcactgaagcttgcaggtccacctacatcaagcagttcagatagcatcattgttgatgccaaaattaaaacattttctgctgtttcctttgatgattatggcggaatgatggtgccattatttggggtgtcctttgacagtgttggactaagttatcatggaggtcctcatcatcttaatgcaactgtgagcttgtcttttgtggccagatcctataatgacaagtatagctcgtgggagccctttattgaaccaacagatgcatttcttaggtaccaattcgacatgaatacaccaggttctcctagacaactccgtattacctcaactcaagaccttaatttgaacatatctgtttccaatacaaacatgttatcgcaagcttatgctagctggaataatattagctgtggtgatgaattgtataagaaggaaaccttttcttctactgagcgaccagttcttgatgttcatcaaagaagaagttattatgttgtcccacaaaataaacttggacaagatatttatgtaagaactactgaaaatagaggttcacttgttactctgttgccctctggggatgataggtccataaaagttccggctttaagggatctatcagattctcatttaaatggaagatctgttaaaccatatcggttgatgataactgccattcttgcggatgcagagcttaagcttttgggttctctcaacagcttaagcttttgggttgaactggctagtgtgtccactctaacatggttcccatcccaggtcaaggatgatgaaggattagaaactggtgaatatatgactgctgtgcggctcttttcagaaaaccattccatatctgttcaacaacagagtgcccgtacttgtgctgctattggagaacacttgtcacagaacaccagaaaggtgaactggaacgaaatgttctttttcaaagtcgaacgtgtggacagctatactctagagcttcttgtgcttgatgctggtaaaggtcaaccagttggtatatactctgctccattggagcaagttgtgcaaaagctccctcctacctctaatccggactctgtcaaatttgatttggctttaggagaccttatgtcaactaagacagtggaacaggaaactgttaaacctagtggaaaaataagatttgcggtacttgtttctggtagagctagtgtacaacaagggaacagagccagtcctgaaagcaagactggatatattcagattagcccttcaaaagaagggccatggacaagcatgaagttgaactatgctgtacctgcagcatgttggaggtttggtaattgtgtgattgctagtgaagcaacagtcaaggaaggcaacagatacgttagcatacgttcccttgtgtcagttactaatacaaccaatttcattgttgatttacgtctaaaaggaagaatttctcaaagtgcacgggcagatgaacagggagacagttttggtaaagaggatcaaatcctgattggaacgctggagcccaattctactattccagtcccactatcaggcctctcacatcctcttatgccctatatgttgcagttaaggccggcaaaacatcatgatcatgaaaattactcctggagtgatgtccaggagaggcgcagtcaaaccgagtttagaaaggaggagatcctagatttatgtatatcagatctgtatgaatcggaaaacttgctattctgctcacaggtagatggcacctcgaattcttgtcatggactgtggttttgcttgagcatagaaggcaaggaaataggcaaagatgtacagatggaaccaatatatgattggtgcatcattattaagtccccgttgtgtttgacatactatcttcccattgctgcacattatactgtcagttctagccacctcgataatgaagattcaagttgctcccttggcaccttaagtccgggtgaggctgtaaaggttcacaatgttgatccaagaaaccctttgtacttatccctggttccacatggaggatgggaactgatgcatgagcctgttgttatatcacatccaacccaagcaccttccaaatttatcaatctaagaagctctttatcaggaagggttgtacagattctgcttgaacaaagcagtgatagtgactatttgatggcaaggcttatcagaatatatgttccctattggatatctttttctagattgcctacacttactctgcgtctcattgatatttctggaaggaaagagaagaggcgccttctttcacgttcacatctggaaaggggtgagaagcaactctatgatataaaacacgatgaattggttgagggatacactatagcgtctggattaaattttaagggattaggacttctatcatctgttggacatggtggacggtttggatctgtgaaagaattgtcgcctcttggcgatatggatggagcagttgatctttctgcctatgatgatgatggaaaatgcatgcatattcttctttgttcaaagccatcctcgtatcaagctgttccaacaaaggttatccatgtacgcccgtatataacattcacaaacagggccggacaagatttgtacttaaaacttagtattgaggatgagccaaaggtcttacatgcatatgactggagggtttcctttatgtactccaaggggactactgacaaactgcaggtccgactagtggatacagaatggtgccaacctctggagatagtaaaagaagacactattgttatagcaatgagaaagcagggtggtactcagaaatttgtaaaagctgagatacgtggttatgaggaaggttcaagattcttgattgtattccgtctgggcccagcatatggaccaatcaggattgagaaccggacgagtcataccacaatcagtacttgccagtctggtttaggggaggagagttggatccaagtgaagccacatgcaaccagaaaatattcttgggatgacccatatggacagaaagttattgatgttagcattgataaaggcgatgatacttgtgtcctatgtgttgacctggaaaatcctattggaagttccaccagttttagggaacatggcctcatgtttactgttgataccagtgacattaagatattgaagtttgctgattacataaggaaagaggaagtatatggattgcctggatctgaactgactgatcaccaaggatcgtcattgaaggaaaatgagacagagccaggtgctggacccttggagctcattgttgaacttggagttgttggaatatctttgattgatcataagccaagagagcttttatacttgcatctgcagaaggttttcgtttcatacttgactggttatgattttgggaccactagcaggtttaaattaatccttggcgagttgcaactagataatcagttgccactgtctacaatgcctgttgttttgtctaccgagagcaggcctgattcaaatcgttctgttttcaaagcaaacgttgctgttagcaatgtaacttctaatggcattcaagtttacccacatgtctatatccgggtaactgatcaaacatggagactaaacattcatgaacctattatttgggcactgtttgacttctacagcaatcttcgttttgtcaccaccatcaacagcacaactgtcacggaagtggatcctgagatacgaatagaagataaggctaaaaatatctctggaaactgcgcctagtcaaagacctcgtggtgtcctaggcatatggagccccatcctatctgctgtgggtaatgcactcaagattcaggtgcatctgaggaaggtcatgcacagaagccggtttatgcggaagagctccatcatccctgctatcacgaaccgaatcaagagagatctgattcacaatccgctacatctaatcttttctgtggattttcttggagtaacaaaatcaactttatcatcacttagtaaaggatttgcagagctctctactgatgggcaatttcttcagctgagatcaaagcaggtttggtcaaggagaatcactggtgttggtgatgggctagttcaagggactgaagcatttgctcagggtttggctttcggggtttctggtgttttaagaaagccagttgagagtgccagacagtatggtgttataggtattgcacctggcattggccgtgcttttgtgggtttcattgtccaacctttaagtggggctctggattttttttcactgacggttgatggaatcagtgctagttttatgagatgtgttaacattttaagtaacaaatctgttccgcagaggataagagatcctcgtgctatacatcgtgatggtatagtaagagactatgacaaatttgaagctgctggccagatggccctttatctggcagaagctagcagatattttgcatgcacggatttatttcgagaaccttctaagtacgcatggtctgattactatgaagaccattttattttaccaagccagaggattgctttagtaactaataagcgggtgatgctgcttcagtgcttggatctagataaaatggacaagaaaccttctaaaatactttgggatgttccttgggaagaagtactttcattggagctagcaaaagctgggtatcagaggccttcacatgtaatcatacatctgaagaattttaggaggtcagagaactttgtaaggcttattaagtgcaacattgacaacgaacgggaacctcaggctctttcactttgctgttcaattcggaaaatgtggagatctcaccaagcagcaatgaaagttataccattgaaggtaatctcttgttctcctgaattgagttttttttttcaaccaaccctccttcctgaactgaactggtgcttctggacaaaaccataataggttccatcaggccagcgtcatgtgtattttgtgtcagatgatgataaaaaggaatcccacagtttatctaggcctttgctaagctcgggaggaacctctactgatgttgagcaacagttcataaacaatacagttcactttcagaaaatgtggagcagtgaaccagaaattcagagccgatgcaaactagttgccaagcagattgcggatgacggaagggtgttcagcatatggaggcctctctgccctaatgggtatgtctcaattggtgatattgcgcatgttggcatccatccaccgcattttgctgctgtatacaagaatatcaatgggaactttgcactgcctcttggctatgacctggtttggagaaattgtgctgaggattacaagagccctgtatcaatatggcttccaaggccaccggggggatacgtagctcttgggtgtgttgctgtcccttcattcaaggagcccactcttgactgtgctttctgtgtggatgagagactcgcggaggatgccgcgtatgaggagcaaatcatatgggcctcatcggatgcttacccatggggatgctatatctaccaagttcagagcgcctcaatgcagttcatggcacttcgtgtcccaaaagaacaatctgagctaaggcccaagaagatattggagtcatttctgcagcaagcatcagagactcaaacgtcccgtgcatgaagaagctgcacatgatgcttgtgcgtgcaagagaactcggctgggacaaagggcaagtctcgtgcaagaaagctcgaagaatgccacttctttcggatcactccatttctccgttgtcaaagcatacacagaggacagagccttgcatgccaacactcgggttgacggaagtgttgtatactagaatagtaggttaaaggttgtaaatgtaaagttttgtaacgtttgatatagtttttgtccagctacatttgttaaggcccatgtggacgtgggccatattagttgtggctacatattctactaagaagttctcaggactaatcatactttctctaatttaaggttgttaaggcccatgtggacgtgggccatactagttgtggctatatattctactaagggcccgtttggtaaaacttcagctcctgcttctttagcttcagattctgatcctcgtgaggagctgatcctcctgattttcctagaaaatcagaatcatttttaaaaccgtttggcaagtaaactgattcttgtcttctgagggttggtggcctatggcgattgtctg

SEQ ID NO: 80660 - DNA, 11708 bp, Zea Mays
atgagtcgactggttgttgatgaccatgaggagattaagaggctggaccgtgaacttgatatggaggttattctacagtggaggatgttagctcacaagtttgtagaacagtcggtggaaacataccagtatgctcaacaaaataagaagtcctggtggactggctcttcaaaggatgaggaagattcaaagagttttactgatgaagattgggaaagactaaatcggattattgggtacaaagaaaccaacgagtatgtcactgatcaacaggatatgaaactgatgcaatttgattttgaaatacgtatgaaacataatgcatcaaagcttaccattgatgattcggagtgccttgctgatctctcatgccaagatttctgctgcaacttgaaaatgtatccggaggcaaaaatatttgatctgaagctgggttcctacaggcttttatctccatatggcctgcttgctgagagtgcaagtgtcatcgattcttttgttggcctcttctcctacaaaccttttgatgagcaactggactggagtttgacagctaaagcttcgccttgttatataacttatttaaaggattcagttgatcaaattgttggcttcttcaagagtagccctaccattagccagaacctggcactagagactgctgctgctgtacagatgacactagatgaagtgaaacggactgctcaacagcaaatgactcgggtgctaaaagatcagtccaggttttcactgaacatggatattgctgctccaaaaattaccgttcctaccaagttccgaccagatgatgtacatgagactaagcttttgcttgaccttggaaatttagttcttcggacagaggaaatatgggatgcctatacttcagaagagcaggatatatatctaaactttaatttggtgcttagtgatgtctctgcatttctggtggatggtgattaccattggaatgaaacatctgatgaaaagaacttgttgccagtaattgacaaatgtgggattgctttgaaacttcagcagggtgttggaaaccgggaagctgtttggcaacacagatatttgcgtctagtgggtccatttctctatgtatttgaaaatttaatgtctacaacgtacaagcaatggttcagtttacgcgggaaacaagttcaccagattctggaagacactggtgctttaattttgttgtttgataatgatgagggacgaaagatatggcagaaccgtttacagggtgctatataccgtgcatcgggttctgcaatttctagctttcctggagttgctctcccatcagaggcccactcattcaaaggcaactttcttgatgttgctgacacagagaaattatttgttgcgggcattcttgatgaattaaagatatgtttttcatgtggctatgagagtaaccacaaactaaaaaaaattctactagctaaggagagcagcctgtttgaatttcgggcagttggtggccaggttgaactctcaatgaaaggtggcaatttactgataggaactattttggggtcactagaaattgaagaccagtattactatccagggagtcctgtgccaaggttcttggcaaggtcttttattaatagcatgcaaactcaagaactcccgtctcttagccgaaagaacagtgcaggacctagaaacaccccattgatgaaaaatgacagtgaggaaaactttttcgaagcatcagatgattttgatgaatttgaaacacctatgcatcaaaagaggactatatcagactattttagcacccagaaatttttgcctactagcgttccttccctacagccgccaacatttaagcgcattcctgatttgataccagatactgaacttcaaactggcaaattcacattggaaggtagtggcactttcaatagttttgtgaaagctcagatagtgatttatgatcaacattctccccagtacaacagcttggataacagggtagttgtaactgttgccactttatccttcttttgccatcggccaactgttattgcaatcatggaatttatgaatgccatcaaccttgcaaacgggtctgatactgataaagataaaagcacttatcctgctactgtagaagatagtgcaattgaggaatctaagtctgatctggaatcagagccatcaataaaacccttactggctaaaggtaaaagcagaatagtttttcatcttacatccagcatggcagaggcacagatattactgatgaatgaaaatggtgaccggcttgctactttatcacaaaataatctctcgactgatataaaggtgttcacatcatcattcagcataaaggctgcactcggaaaccttaaaataagtgatgatagccttcttagcagccacccttacttttgggtttgtgatatgcgaaatcctggaggtcgttcatttgtggagatcgactttagttcatacaatgttggtgatgaagactattgtggttatgactatagccttgtagggcagctttcagaagttagaattgtttacctcaaccgttttgttcaagagattatcagttattttatgggacttgtgccaaaaagttctgatgccgttgtaaagctgaaagacaataagactaactcagagaagtgggttagcaaaaccgatatggaaggatcacctgctctcaaattggatgtttcattcagcaggcctataattgttatgccccgtgaaactaatagtaatgactttttggagcttgatgttctatacataacagtccaaaatgaattccaatggataggtggtgataagaatgagatgagcactgttcacttagacattttaacagttacagtacgggacataaatttagttattggtatgaatatggtgcgtggtgaaaccataattcaagatgtagaaggtctctcctttgaacttcgtagatcattgcgtgatttgagacatcagttgccagtggtggaggcagcaattaaggtggatgttttgaaagcaacactatccaatcgagaatatgaaattatttctgaatgtgcattgtctaacttctctgagacaccacatcctgtgcctactctggatgatcctcgatatggcacttccactactccatcccatgtatcagcttcttcttcagaaagtattcatgtcttgtccgaaggtgcagaaacatggatagctaataaattttctgtctcaataaatctggttgagctttctctgcattcaggatcgacaagagattctcctctggcgagcgttcaggcgagtggagcatggcttttctataaatcaaacacacggggagaaaattttatgtatgctactctcaaaggattttctgtttttgatgatcgtgaaggaaccaaagatgagttaaggcttgccattgggaaatcagcatctgttcgggacacatcatctgttgatggctatgataatcctaatgaacttgattcaggtgaacgaagaatacaaaaggatctaggccttgagccaatcccctcgatgcttattcttgatgccatcttccgaaaatcttcgtcatccgtctctgtctgtgttcagcggcccaagtttcttgtggcacttgacttcttactagcagtaatcgaattctttgtgccatctgctcagagtcttctatccaatgatgaagacaaggaccttttacatatgatcactccagtagtattgaatgatcaaatttatttccaggagcattcaacatttagtctttcacctcagaagcccttgattgttgataatgaaagatttgatcacttcgtatatgatgggaagggtggaaagttatatttgctggatagtgaggggaaaattctctcaagcccttgtactgagagtttcattcatgtgcttgggtgtaagagattgcaatttcggaatgtcactatagtgaatggtgaatatttggattcctgtatctctctcggtgatgatagctgttattcagcatcaaggaatgaccatgtctacttagtaagagaagatgatgggtccttgtcaacccccagcaaggaaattagaggagacagtgttaaaaatgggagtgctgatatatcaaccgaatttattatggaactacaggctattggaccagagcttactttctatagtacatcaaggaatgctggtgaaaacttagcactgtcaacaaaggttattcatgcccacacagatgcattttgcaggcttataatgaaaggcgacagtatggagatgaatggaaacatacttggtttaaagatggagagtaatggcatcagagttatagaaccatttgacatggtcgtgaaatattccaatgcgtctggaaagacaaatttgcatctactagtttctgaaatatatatgaatttttccttcagtattctcagactgtttttagcagttgaggaagaaatttcagcatttcttaggatgtcgtcaaagaaaatttcactggtgtgttaccagtttgacaaagttgcaactatgcaaggtaatgctaatgatcaagtgttatctttctggcgaccgcgtgctccatctggatatgccatttttggcgattatctcacaccaatgaacgagcctcctactaaaggagttcttgctctgaacacaaacattgttagggtcaaaaggcctttatcgtacaaactagtgtggcaatctggttctccaagaacaaacatttttcatcagaaggacttggaggataagatctctaatattgaccagctctgctctgtttggttacctgtggcacctgcgggttatgttgcaatgggttgtgttgcttcatctggaactgctgaaccacctttgtcttcagctttctgtttaactgcttctttggtttcatcatgtaatctaagggattgcattgcactgagggataacactaacatgatattctggcgagttgataatgcttttggttcctttttacctggagatcctgcaagcatgagtgtggatgggaatgcttatgatcttcgacatatgctgttcgacagtgcagactcatcttccaagactgtctctagaaggcaagatagtagaaatgatttctctcaactagagagatcagaattgacctcaggtcggctatttgatgctgtggcaagctttaaactaatttggtcaaatagtgggacctcttcaccaaaaaagctctcaatatggcgtccaatgttgtctgaaggaatgttttactttggtgacatagctgttaacgggtatgaaccaccaaattcaactgttgttcttcgtgatactggtgaagacacttttctcagagctcctgaaggttttgaccttgttggtcgaattaagaagcaccggggcactgagggtgtatcattttggtttcctaaagctccttcaggttttgtggcattaggatgtgttgcatctaaaagttctccaaccaaagaggacttcagtttgttaagatgtattagaaatgacatggtggctggaggtcaattttctgaggaaagtttatgggattcatctaatgctagaacatctgaaccttttagcttatggactgttgataatgatgctggtacgtttcttgtgagaagtggatatagaaaacctccaaagaggcttgcactgaagcttgcaggtccacctacatcaagcagttcagatagcatcattgttgatgccaaaattaaaacattttctgctgtttcctttgatgattatggcggaatgatggtgccattatttggggtgtcctttgacagtgttggactaagttatcatggaggtcctcatcatcttaatgcaactgtgagcttgtcttttgtggccagatcctataatgacaagtatagctcgtgggagccctttattgaaccaacagatgcatttcttaggtaccaattcgacatgaatacaccaggttctcctagacaactccgtattacctcaactcaagaccttaatttgaacatatctgtttccaatacaaacatgttatcgcaagcttatgctagctggaataatattagctgtggtgatgaattgtataagaaggaaaccttttcttctactgagcgaccagttcttgatgttcatcaaagaagaagttattatgttgtcccacaaaataaacttggacaagatatttatgtaagaactactgaaaatagaggttcacttgttactctgttgccctctggggatgataggtccataaaagttccggctttaagggatctatcagattctcatttaaatggaagatctgttaaaccatatcggttgatgataactgccattcttgcggatgcagaggtcaaggatgatgaaggattagaaactggtgaatatatgactgctgtgcggctcttttcagaaaaccattccatatctgttcaacaacagagtgcccgtacttgtgctgctattggagaacacttgtcacagaacaccagaaaggtgaactggaacgaaatgttctttttcaaagtcgaacgtgtggacagctatactctagagcttcttgtgcttgatgctggtcaaccagttggtatatactctgctccattggagcaagttgtgcaaaagctccctcctacctctaatccggactctgtcaaatttgatttggctttaggagaccttatgtcaactaagacagtggaacaggaaactgttaaacctagtggaaaaataagatttgcggtacttgtttctggtagagctagtgtacaacaagggaacagagccagtcctgaaagcaagactggatatattcagattagcccttcaaaagaagggccatggacaagcatgaagttgaactatgctgtacctgcagcatgttggaggtttggtaattgtgtgattgctagtgaagcaacagtcaaggaaggcaacagatacgttagcatacgttcccttgtgtcagttactaatacaaccaatttcattgttgatttacgtctaaaaggaagaatttctcaaagtgcacgggcagatgaacagggagacagttttggtaaagaggatcaaatcctgattggaacgctggagcccaattctactattccagtcccactatcaggcctctcacatcctcttatgccctatatgttgcagttaaggccggcaaaacatcatgatcatgaaaattactcctggagtgatgtccaggagaggcgcagtcaaaccgagtttagaaaggaggagatcctagatttatgtatatcagatctgtatgaatcggaaaacttgctattctgctcacaggtagatggcacctcgaattcttgtcatggactgtggttttgcttgagcatagaaggcaaggaaataggcaaagatgtacagatggaaccaatatatgattggtgcatcattattaagtccccgttgtgtttgacatactatcttcccattgctgcacattatactgtcagttctagccacctcgataatgaagattcaagttgctcccttggcaccttaagtccgggtgaggctgtaaaggttcacaatgttgatccaagaaaccctttgtacttatccctggttccacatggaggatgggaactgatgcatgagcctgttgttatatcacatccaacccaagcaccttccaaatttatcaatctaagaagctctttatcaggaagggttgtacagattctgcttgaacaaagcagtgatagtgactatttgatggcaaggcttatcagaatatatgttccctattggatatctttttctagattgcctacacttactctgcgtctcattgatatttctggaaggaaagagaagaggcgccttctttcacgttcacatctggaaaggggtgagaagcaactctatgatataaaacacgatgaattggttgagggatacactatagcgtctggattaaattttaagggattaggacttctatcatctgttggacatggtggacggtttggatctgtgaaagaattgtcgcctcttggcgatatggatggagcagttgatctttctgcctatgatgatgatggaaaatgcatgcatattcttctttgttcaaagccatcctcgtatcaagctgttccaacaaaggttatccatgtacgcccgtatataacattcacaaacagggccggacaagatttgtacttaaaacttagtattgaggatgagccaaaggtcttacatgcatatgactggagggtttcctttatgtactccaaggggactactgacaaactgcaggtccgactagtggatacagaatggtgccaacctctggagatagtaaaagaagacactattgttatagcaatgagaaagcagggtggtactcagaaatttgtaaaagctgagatacgtggttatgaggaaggttcaagattcttgattgtattccgtctgggcccagcatatggaccaatcaggattgagaaccggacgagtcataccacaatcagtacttgccagtctggtttaggggaggagagttggatccaagtgaagccacatgcaaccagaaaatattcttgggatgacccatatggacagaaagttattgatgttagcattgataaaggcgatgatacttgtgtcctatgtgttgacctggaaaatcctattggaagttccaccagttttagggaacatggcctcatgtttactgttgataccagtgacattaagatattgaagtttgctgattacataaggaaagaggaagtatatggattgcctggatctgaactgactgatcaccaaggatcgtcattgaaggaaaatgagacagagccaggtgctggacccttggagctcattgttgaacttggagttgttggaatatctttgattgatcataagccaagagagcttttatacttgcatctgcagaaggttttcgtttcatacttgactggttatgattttgggaccactagcaggtttaaattaatccttggcgagttgcaactagataatcagttgccactgtctacaatgcctgttgttttgtctaccgagagcaggcctgattcaaatcgttctgttttcaaagcaaacgttgctgttagcaatgtaacttctaatggcattcaagtttacccacatgtctatatccgggtaactgatcaaacatggagactaaacattcatgaacctattatttgggcactgtttgacttctacagcaatcttcgttttgtcaccaccatcaacagcacaactgtcacggaagtggatcctgagatacgaatagaagataaggctaaaaatatctctggaaactgcgcctagtcaaagacctcgtggtgtcctaggcatatggagccccatcctatctgctgtgggtaatgcactcaagattcaggtgcatctgaggaaggtcatgcacagaagccggtttatgcggaagagctccatcatccctgctatcacgaaccgaatcaagagagatctgattcacaatccgctacatctaatcttttctgtggattttcttggagtaacaaaatcaactttatcatcacttagtaaaggatttgcagagctctctactgatgggcaatttcttcagctgagatcaaagcaggtttggtcaaggagaatcactggtgttggtgatgggctagttcaagggactgaagcatttgctcagggtttggctttcggggtttctggtgttttaagaaagccagttgagagtgccagacagtatggtgttataggtattgcacctggcattggccgtgcttttgtgggtttcattgtccaacctttaagtggggctctggattttttttcactgacggttgatggaatcagtgctagttttatgagatgtgttaacattttaagtaacaaatctgttccgcagaggataagagatcctcgtgctatacatcgtgatggtatagtaagagactatgacaaatttgaagctgctggccagatggccctttatctggcagaagctagcagatattttgcatgcacggatttatttcgagaaccttctaagtacgcatggtctgattactatgaagaccattttattttaccaagccagaggattgctttagtaactaataagcgggtgatgctgcttcagtgcttggatctagataaaatggacaagaaaccttctaaaatactttgggatgttccttgggaagaagtactttcattggagctagcaaaagctgggtatcagaggccttcacatgtaatcatacatctgaagaattttaggaggtcagagaactttgtaaggcttattaagtgcaacattgacaacgaacgggaacctcaggctctttcactttgctgttcaattcggaaaatgtggagatctcaccaagcagcaatgaaagttataccattgaaggttccatcaggccagcgtcatgtgtattttgtgtcagatgatgataaaaaggaatcccacagtttatctaggcctttgctaagctcgggaggaacctctactgatgttgagcaacagttcataaacaatacagttcactttcagaaaatgtggagcagtgaaccagaaattcagagccgatgcaaactagttgccaagcagattgcggatgacggaagggtgttcagcatatggaggcctctctgccctaatgggtatgtctcaattggtgatattgcgcatgttggcatccatccaccgcattttgctgctgtatacaagaatatcaatgggaactttgcactgcctcttggctatgacctggtttggagaaattgtgctgaggattacaagagccctgtatcaatatggcttccaaggccaccggggggatacgtagctcttgggtgtgttgctgtcccttcattcaaggagcccactcttgactgtgctttctgtgtggatgagagactcgcggaggatgccgcgtatgaggagcaaatcatatgggcctcatcggatgcttacccatggggatgctatatctaccaagttcagagcgcctcaatgcagttcatggcacttcgtgtcccaaaagaacaatctgagctaaggcccaagaagatattggagtcatttctgcagcaagcatcagagactcaaacgtcccgtgcatgaagaagctgcacatgatgcttgtgcgtgcaagagaactcggctgggacaaagggcaagtctcgtgcaagaaagctcgaagaatgccacttctttcggatcactccatttctccgttgtcaaagcatacacagaggacagagccttgcatgccaacactcgggttgacggaagtgttgtatactagaatagtaggttaaaggttgtaaatgtaaagttttgtaacgtttgatatagtttttgtccagctacatttgttaaggcccatgtggacgtgggccatattagttgtggctacatattctactaagaagttctcaggactaatcatactttctctaatttaaggttgttaaggcccatgtggacgtgggccatactagttgtggctatatattctactaagggcccgtttggtaaaacttcagctcctgcttctttagcttcagattctgatcctcgtgaggagctgatcctcctgattttcctagaaaatcagaatcatttttaaaaccgtttggcaagtaaactgattcttgtcttctgagggttggtggcctatggcgattgtctg

SEQ ID NO: 80661 - DNA, 11075 bp, Zea Mays
atggatattgctgctccaaaaattaccgttcctaccaagttccgaccagatgatgtacatgagactaagcttttgcttgaccttggaaatttagttcttcggacagaggaaatatgggatgcctatacttcagaagagcaggatatatatctaaactttaatttggtgcttagtgatgtctctgcatttctggtggatggtgattaccattggaatgaaacatctgatgaaaagaacttgttgccagtaattgacaaatgtgggattgctttgaaacttcagcagggtgttggaaaccgggaagctgtttggcaacacagatatttgcgtctagtgggtccatttctctatgtatttgaaaatttaatgtctacaacgtacaagcaatggttcagtttacgcgggaaacaagttcaccagattctggaagacactggtgctttaattttgttgtttgataatgatgagggacgaaagatatggcagaaccgtttacagggtgctatataccgtgcatcgggttctgcaatttctagctttcctggagttgctctcccatcagaggcccactcattcaaaggcaactttcttgatgttgctgacacagagaaattatttgttgcgggcattcttgatgaattaaagatatgtttttcatgtggctatgagagtaaccacaaactaaaaaaaattctactagctaaggagagcagcctgtttgaatttcgggcagttggtggccaggttgaactctcaatgaaaggtggcaatttactgataggaactattttggggtcactagaaattgaagaccagtattactatccagggagtcctgtgccaaggttcttggcaaggtcttttattaatagcatgcaaactcaagaactcccgtctcttagccgaaagaacagtgcaggacctagaaacaccccattgatgaaaaatgacagtgaggaaaactttttcgaagcatcagatgattttgatgaatttgaaacacctatgcatcaaaagaggactatatcagactattttagcacccagaaatttttgcctactagcgttccttccctacagccgccaacatttaagcgcattcctgatttgataccagatactgaacttcaaactggcaaattcacattggaaggtagtggcactttcaatagttttgtgaaagctcagatagtgatttatgatcaacattctccccagtacaacagcttggataacagggtagttgtaactgttgccactttatccttcttttgccatcggccaactgttattgcaatcatggaatttatgaatgccatcaaccttgcaaacgggtctgatactgataaagataaaagcacttatcctgctactgtagaagatagtgcaattgaggaatctaagtctgatctggaatcagagccatcaataaaacccttactggctaaaggtaaaagcagaatagtttttcatcttacatccagcatggcagaggcacagatattactgatgaatgaaaatggtgaccggcttgctactttatcacaaaataatctctcgactgatataaaggtgttcacatcatcattcagcataaaggctgcactcggaaaccttaaaataagtgatgatagccttcttagcagccacccttacttttgggtttgtgatatgcgaaatcctggaggtcgttcatttgtggagatcgactttagttcatacaatgttggtgatgaagactattgtggttatgactatagccttgtagggcagctttcagaagttagaattgtttacctcaaccgttttgttcaagagattatcagttattttatgggacttgtgccaaaaagttctgatgccgttgtaaagctgaaagacaataagactaactcagagaagtgggttagcaaaaccgatatggaaggatcacctgctctcaaattggatgtttcattcagcaggcctataattgttatgccccgtgaaactaatagtaatgactttttggagcttgatgttctatacataacagtccaaaatgaattccaatggataggtggtgataagaatgagatgagcactgttcacttagacattttaacagttacagtacgggacataaatttagttattggtatgaatatggtgcgtggtgaaaccataattcaagatgtagaaggtctctcctttgaacttcgtagatcattgcgtgatttgagacatcagttgccagtggtggaggcagcaattaaggtggatgttttgaaagcaacactatccaatcgagaatatgaaattatttctgaatgtgcattgtctaacttctctgagacaccacatcctgtgcctactctggatgatcctcgatatggcacttccactactccatcccatgtatcagcttcttcttcagaaagtattcatgtcttgtccgaaggtgcagaaacatggatagctaataaattttctgtctcaataaatctggttgagctttctctgcattcaggatcgacaagagattctcctctggcgagcgttcaggcgagtggagcatggcttttctataaatcaaacacacggggagaaaattttatgtatgctactctcaaaggattttctgtttttgatgatcgtgaaggaaccaaagatgagttaaggcttgccattgggaaatcagcatctgttcgggacacatcatctgttgatggctatgataatcctaatgaacttgattcaggtgaacgaagaatacaaaaggatctaggccttgagccaatcccctcgatgcttattcttgatgccatcttccgaaaatcttcgtcatccgtctctgtctgtgttcagcggcccaagtttcttgtggcacttgacttcttactagcagtaatcgaattctttgtgccatctgctcagagtcttctatccaatgatgaagacaaggaccttttacatatgatcactccagtagtattgaatgatcaaatttatttccaggagcattcaacatttagtctttcacctcagaagcccttgattgttgataatgaaagatttgatcacttcgtatatgatgggaagggtggaaagttatatttgctggatagtgaggggaaaattctctcaagcccttgtactgagagtttcattcatgtgcttgggtgtaagagattgcaatttcggaatgtcactatagtgaatggtgaatatttggattcctgtatctctctcggtgatgatagctgttattcagcatcaaggaatgaccatgtctacttagtaagagaagatgatgggtccttgtcaacccccagcaaggaaattagaggagacagtgttaaaaatgggagtgctgatatatcaaccgaatttattatggaactacaggctattggaccagagcttactttctatagtacatcaaggaatgctggtgaaaacttagcactgtcaacaaaggttattcatgcccacacagatgcattttgcaggctgcagatgcagcacgtccagggccagaaccagccaactcgtcgtaacactaagatgatgtgctatcaatggatggctttaaagatccggcacccgacaaacctcttaacaaatcttgtccaagtaactaatgaatcttatttgctaacaaacctgaacaagagccgcttccatggcaccgtgaggatggctctcgttttgtcctcccacgtctcctcccctctcgatgccccctccccacaccagcccacgtcagcgcccactccaaggccggtggccaccgcactagccgccgccgctgcagcttcccctaaccctggcgcgtcatgttccttcccctccttgtcccctcaatccgcgtccctcactgctgggggcgttccaagttcgagtggtgggtggcctcaggcctcagccctactgcctccgttggtgctgcctgcctcccagccttccttcagggatgtggtgtttgcgtcccttgtgccgacgtctgtggagagggcgaagatggttccacggccaacccacccactcgtggaaaaaccctggcgctccatgcagaacgagcctcctactaaaggagttcttgctctgaacacaaacattgttagggtcaaaaggcctttatcgtacaaactagtgtggcaatctggttctccaagaacaaacatttttcatcagaaggacttggaggataagatctctaatattgaccagctctgctctgtttggttacctgtggcacctgcgggttatgttgcaatgggttgtgttgcttcatctggaactgctgaaccacctttgtcttcagctttctgtttaactgcttctttggtttcatcatgtaatctaagggattgcattgcactgagggataacactaacatgatattctggcgagttgataatgcttttggttcctttttacctggagatcctgcaagcatgagtgtggatgggaatgcttatgatcttcgacatatgctgttcgacagtgcagactcatcttccaagactgtctctagaaggcaagatagtagaaatgatttctctcaactagagagatcagaattgacctcaggtcggctatttgatgctgtggcaagctttaaactaatttggtcaaatagtgggacctcttcaccaaaaaagctctcaatatggcgtccaatgttgtctgaaggaatgttttactttggtgacatagctgttaacgggtatgaaccaccaaattcaactgttgttcttcgtgatactggtgaagacacttttctcagagctcctgaaggttttgaccttgttggtcgaattaagaagcaccggggcactgagggtgtatcattttggtttcctaaagctccttcaggttttgtggcattaggatgtgttgcatctaaaagttctccaaccaaagaggacttcagtttgttaagatgtattagaaatgacatggtggctggaggtcaattttctgaggaaagtttatgggattcatctaatgctagaacatctgaaccttttagcttatggactgttgataatgatgctggtacgtttcttgtgagaagtggatatagaaaacctccaaagaggcttgcactgaagcttgcaggtccacctacatcaagcagttcagatagcatcattgttgatgccaaaattaaaacattttctgctgtttcctttgatgattatggcggaatgtattctatgcagatggtgccattatttggggtgtcctttgacagtgttggactaagttatcatggaggtcctcatcatcttaatgcaactgtgagcttgtcttttgtggccagatcctataatgacaagtatagctcgtgggagccctttattgaaccaacagatgcatttcttaggtaccaattcgacatgaatacaccaggttctcctagacaactccgtattacctcaactcaagaccttaatttgaacatatctgtttccaatacaaacatgttatcgcaagcttatgctagctggaataatattagctgtggtgatgaattgtataagaaggaaaccttttcttctactgagcgaccagttcttgatgttcatcaaagaagaagttattatgttgtcccacaaaataaacttggacaagatatttatgtaagaactactgaaaatagaggttcacttgttactctgttgccctctggggatgataggtccataaaagttccggctttaagggatctatcagattctcatttaaatggaagatctgttaaaccatatcggttgatgataactgccattcttgcggatgcagaggtcaaggatgatgaaggattagaaactggtgaatatatgactgctgtgcggctcttttcagaaaaccattccatatctgttcaacaacagagtgcccgtacttgtgctgctattggagaacacttgtcacagaacaccagaaaggtgaactggaacgaaatgttctttttcaaagtcgaacgtgtgctatactctagagcttcttgtgcttgatgctggtaaaggtcaaccagttggtatatactctgctccattggagcaagttgtgcaaaagctccctcctacctctaatccggactctgtcaaatttgatttggctttaggagaccttatgtcaactaagacagtggaacaggaaactgttaaacctagtggaaaaataagatttgcggtacttgtttctggtagagctagtgtacaacaagggaacagagccagtcctgaaagcaagactggatatattcagattagcccttcaaaagaagggccatggacaagcatgaagttgaactatgctgtacctgcagcatgttggaggtttggtaattgtgtgattgctagtgaagcaacagtcaaggaaggcaacagatacgttagcatacgttcccttgtgtcagttactaatacaaccaatttcattgttgatttacgtctaaaaggaagaatttctcaaagtgcacgggcagatgaacagggagacagttttggtaaagaggatcaaatcctgattggaacgctggagcccaattctactattccagtcccactatcaggcctctcacatcctcttatgccctatatgttgcagttaaggccggcaaaacatcatgatcatgaaaattactcctggagtgatgtccaggagaggcgcagtcaaaccgagtttagaaaggaggagatcctagatttatgtatatcagatctgtatgaatcggaaaacttgctattctgctcacaggtagatggcacctcgaattcttgtcatggactgtggttttgcttgagcatagaaggcaaggaaataggcaaagatgtacagatggaaccaatatatgattggtgcatcattattaagtccccgttgtgtttgacatactatcttcccattgctgcacattatactgtcagttctagccacctcgataatgaagattcaagttgctcccttggcaccttaagtccgggtgaggctgtaaaggttcacaatgttgatccaagaaaccctttgtacttatccctggttccacatggaggatgggaactgatgcatgagcctgttgttatatcacatccaacccaagcaccttccaaatttatcaatctaagaagctctttatcaggaagattgcctacacttactctgcgtctcattgatatttctggaaggaaagagaagaggcgccttctttcacgttcacatctggaaaggggtgagaagcaactctatgatataaaacacgatgaattggttgagggatacactatagcgtctggattaaattttaagggattaggacttctatcatctgttggacatggtggacggtttggatctgtgaaagaattgtcgcctcttggcgatatggatggagcagttgatctttctgcctatgatgatgatggaaaatgcatgcatattcttctttgttcaaagccatcctcgtatcaagctgttccaacaaaggttatccatgtacgcccgtatataacattcacaaacagggccggacaagatttgtacttaaaacttagtattgaggatgagccaaaggtcttacatgcatatgactggagggtttcctttatgtactccaaggggactactgacaaactgcaggtccgactagtggatacagaatggtgccaacctctggagatagtaaaagaagacactattgttatagcaatgagaaagcagggtggtactcagaaatttgtaaaagctgagatacgtggttatgaggaaggttcaagattcttgattgtattccgtctgggcccagcatatggaccaatcaggattgagaaccggacgagtcataccacaatcagtacttgccagtctggtttaggggaggagagttggatccaagtgaagccacatgcaaccagaaaatattcttgggatgacccatatggacagaaagttattgatgttagcattgataaaggcgatgatacttgtgtcctatgtgttgacctggaaaatcctattggaagttccaccagttttagggaacatggcctcatgtttactgttgataccagtgacattaagatattgaagtttgctgattacataaggaaagaggaagtatatggattgcctggatctgaactgactgatcaccaaggatcgtcattgaaggaaaatgagacagagccaggtgctggacccttggagctcattgttgaacttggagttgttggaatatctttgattgatcataagccaagagagcttttatacttgcatctgcagaaggttttcgtttcatacttgactggttatgattttgggaccactagcaggtttaaattaatccttggcgagttgcaactagataatcagttgccactgtctacaatgcctgttgttttgtctaccgagagcaggcctgattcaaatcgttctgttttcaaagcaaacgttgctgttagcaatgtaacttctaatggcattcaagtttacccacatgtctatatccgggtaactgatcaaacatggagactaaacattcatgaacctattatttgggcactgtttgacttctacagcaatcttcgttttgtcaccaccatcaacagcacaactgtcacggaagtggatcctgagatacgaatagagctcattgatatttcagagataaggctaaaaatatctctggaaactgcgcctagtcaaagacctcgtggtgtcctaggcatatggagccccatcctatctgctgtgggtaatgcactcaagattcaggtgcatctgaggaaggtcatgcacagaagccggtttatgcggaagagctccatcatccctgctatcacgaaccgaatcaagagagatctgattcacaatccgctacatctaatcttttctgtggattttcttggagtaacaaaatcaactttatcatcacttagtaaaggatttgcagagctctctactgatgggcaatttcttcagctgagatcaaagcaggtttggtcaaggagaatcactggtgttggtgatgggctagttcaagggactgaagcatttgctcagggtttggctttcggggtttctggtgttttaagaaagccagttgagagtgccagacagtatggtgttataggtattgcacctggcattggccgtgcttttgtgggtttcattgtccaacctttaagtggggctctggattttttttcactgacggttgatggaatcagtgctagttttatgagatgtgttaacattttaagtaacaaatctgttccgcagaggataagagatcctcgtgctatacatcgtgatggtatagtaagagactatgacaaatttgaagctgctggccagatggccctttatctggcagaagctagcagatattttgcatgcacggatttatttcgagaaccttctaagtacgcatggtctgattactatgaagaccattttattttaccaagccagaggattgctttagtaactaataagcgggtgatgctgcttcagtgcttggatctagataaaatggacaagaaaccttctaaaatactttgggatgttccttgggaagaagtactttcattggagctagcaaaagctgggtatcagaggccttcacatgtaatcatacatctgaagaattttaggaggtcagagaactttgtaaggcttattaagtgcaacattgacaacgaacgggaacctcaggctctttcactttgctgttcaattcggaaaatgtggagatctcaccaagcagcaatgaaagttataccattgaaggttccatcaggccagcgtcatgtgtattttgtgtcagatgatgataaaaaggaatcccacagtttatctaggcctttgctaagctcgggaggaacctctactgatgttgagcaacagttcataaacaatacagttcactttcagaaaatgtggagcagtgaaccagaaattcagagccgatgcaaactagttgccaagcagattgcggatgacggaagggtgttcagcatatggaggcctctctgccctaatgggtatgtctcaattggtgatattgcgcatgttggcatccatccaccgcattttgctgctgtatacaagaatatcaatgggaactttgcactgcctcttggctatgacctggtttggagaaattgtgctgaggattacaagagccctgtatcaatatggcttccaaggccaccggggggatacgtagctcttgggtgtgttgctgtcccttcattcaaggagcccactcttgactgtgctttctgtgtggatgagagactcgcggaggatgccgcgtatgaggagcaaatcatatgggcctcatcggatgcttacccatggggatgctatatctaccaagttcagagcgcctcaatgcagttcatggcacttcgtgtcccaaaagaacaatctgagctaaggcccaagaagatattggagtcatttctgcagcaagcatcagagactcaaacgtcccgtgcatgaagaagctgcacatgatgcttgtgcgtgcaagagaactcggctgggacaaagggcaagtctcgtgcaagaaagctcgaagaatgccacttctttcggatcactccatttctccgttgtcaaagcatacacagaggacagagccttgcatgccaacactcgggttgacggaagtgttgtatactagaatagtaggttaaaggttgtaaatgtaaagttttgtaacgtttgatatagtttttgtccagctacatttgttaaggcccatgtggacgtgggccatattagttgtggctacatattctactaagaagttctcaggactaatcatactttctctaatttaaggttgttaaggcccatgtggacgtgggccatactagttgtggctatatattctactaagggcccgtttggtaaaacttcagctcctgcttctttagcttcagattctgatcctcgtgaggagctgatcctcctgattttcctagaaaatcagaatcatttttaaaaccgtttggcaagtaaactgattcttgtcttctgagggttggtggcctatggcgattgtctg

SEQ ID NO: 80662 - DNA, 11164 bp, Zea Mays
atggatattgctgctccaaaaattaccgttcctaccaagttccgaccagatgatgtacatgagactaagcttttgcttgaccttggaaatttagttcttcggacagaggaaatatgggatgcctatacttcagaagagcaggatatatatctaaactttaatttggtgcttagtgatgtctctgcatttctggtggatggtgattaccattggaatgaaacatctgatgaaaagaacttgttgccagtaattgacaaatgtgggattgctttgaaacttcagcagggtgttggaaaccgggaagctgtttggcaacacagatatttgcgtctagtgggtccatttctctatgtatttgaaaatttaatgtctacaacgtacaagcaatggttcagtttacgcgggaaacaagttcaccagattctggaagacactggtgctttaattttgttgtttgataatgatgagggacgaaagatatggcagaaccgtttacagggtgctatataccgtgcatcgggttctgcaatttctagctttcctggagttgctctcccatcagaggcccactcattcaaaggcaactttcttgatgttgctgacacagagaaattatttgttgcgggcattcttgatgaattaaagatatgtttttcatgtggctatgagagtaaccacaaactaaaaaaaattctactagctaaggagagcagcctgtttgaatttcgggcagttggtggccaggttgaactctcaatgaaaggtggcaatttactgataggaactattttggggtcactagaaattgaagaccagtattactatccagggagtcctgtgccaaggttcttggcaaggtcttttattaatagcatgcaaactcaagaactcccgtctcttagccgaaagaacagtgcaggacctagaaacaccccattgatgaaaaatgacagtgaggaaaactttttcgaagcatcagatgattttgatgaatttgaaacacctatgcatcaaaagaggactatatcagactattttagcacccagaaatttttgcctactagcgttccttccctacagccgccaacatttaagcgcattcctgatttgataccagatactgaacttcaaactggcaaattcacattggaaggtagtggcactttcaatagttttgtgaaagctcagatagtgatttatgatcaacattctccccagtacaacagcttggataacagggtagttgtaactgttgccactttatccttcttttgccatcggccaactgttattgcaatcatggaatttatgaatgccatcaaccttgcaaacgggtctgatactgataaagataaaagcacttatcctgctactgtagaagatagtgcaattgaggaatctaagtctgatctggaatcagagccatcaataaaacccttactggctaaaggtaaaagcagaatagtttttcatcttacatccagcatggcagaggcacagatattactgatgaatgaaaatggtgaccggcttgctactttatcacaaaataatctctcgactgatataaaggtgttcacatcatcattcagcataaaggctgcactcggaaaccttaaaataagtgatgatagccttcttagcagccacccttacttttgggtttgtgatatgcgaaatcctggaggtcgttcatttgtggagatcgactttagttcatacaatgttggtgatgaagactattgtggttatgactatagccttgtagggcagctttcagaagttagaattgtttacctcaaccgttttgttcaagagattatcagttattttatgggacttgtgccaaaaagttctgatgccgttgtaaagctgaaagacaataagactaactcagagaagtgggttagcaaaaccgatatggaaggatcacctgctctcaaattggatgtttcattcagcaggcctataattgttatgccccgtgaaactaatagtaatgactttttggagcttgatgttctatacataacagtccaaaatgaattccaatggataggtggtgataagaatgagatgagcactgttcacttagacattttaacagttacagtacgggacataaatttagttattggtatgaatatggtgcgtggtgaaaccataattcaagatgtagaaggtctctcctttgaacttcgtagatcattgcgtgatttgagacatcagttgccagtggtggaggcagcaattaaggtggatgttttgaaagcaacactatccaatcgagaatatgaaattatttctgaatgtgcattgtctaacttctctgagacaccacatcctgtgcctactctggatgatcctcgatatggcacttccactactccatcccatgtatcagcttcttcttcagaaagtattcatgtcttgtccgaaggtgcagaaacatggatagctaataaattttctgtctcaataaatctggttgagctttctctgcattcaggatcgacaagagattctcctctggcgagcgttcaggcgagtggagcatggcttttctataaatcaaacacacggggagaaaattttatgtatgctactctcaaaggattttctgtttttgatgatcgtgaaggaaccaaagatgagttaaggcttgccattgggaaatcagcatctgttcgggacacatcatctgttgatggctatgataatcctaatgaacttgattcaggtgaacgaagaatacaaaaggatctaggccttgagccaatcccctcgatgcttattcttgatgccatcttccgaaaatcttcgtcatccgtctctgtctgtgttcagcggcccaagtttcttgtggcacttgacttcttactagcagtaatcgaattctttgtgccatctgctcagagtcttctatccaatgatgaagacaaggaccttttacatatgatcactccagtagtattgaatgatcaaatttatttccaggagcattcaacatttagtctttcacctcagaagcccttgattgttgataatgaaagatttgatcacttcgtatatgatgggaagggtggaaagttatatttgctggatagtgaggggaaaattctctcaagcccttgtactgagagtttcattcatgtgcttgggtgtaagagattgcaatttcggaatgtcactatagtgaatggtgaatatttggattcctgtatctctctcggtgatgatagctgttattcagcatcaaggaatgaccatgtctacttagtaagagaagatgatgggtccttgtcaacccccagcaaggaaattagaggagacagtgttaaaaatgggagtgctgatatatcaaccgaatttattatggaactacaggctattggaccagagcttactttctatagtacatcaaggaatgctggtgaaaacttagcactgtcaacaaaggttattcatgcccacacagatgcattttgcaggctgcagatgcagcacgtccagggccagaaccagccaactcgtcgtaacactaagatgatgtgctatcaatggatggctttaaagatccggcacccgacaaacctcttaacaaatcttgtccaagtaactaatgaatcttatttgctaacaaacctgaacaagagccgcttccatggcaccgtgaggatggctctcgttttgtcctcccacgtctcctcccctctcgatgccccctccccacaccagcccacgtcagcgcccactccaaggccggtggccaccgcactagccgccgccgctgcagcttcccctaaccctggcgcgtcatgttccttcccctccttgtcccctcaatccgcgtccctcactgctgggggcgttccaagttcgagtggtgggtggcctcaggcctcagccctactgcctccgttggtgctgcctgcctcccagccttccttcagggatgtggtgtttgcgtcccttgtgccgacgtctgtggagagggcgaagatggttccacggccaacccacccactcgtggaaaaaccctggcgctccatgcagaacgagcctcctactaaaggagttcttgctctgaacacaaacattgttagggtcaaaaggcctttatcgtacaaactagtgtggcaatctggttctccaagaacaaacatttttcatcagaaggacttggaggataagatctctaatattgaccagctctgctctgtttggttacctgtggcacctgcgggttatgttgcaatgggttgtgttgcttcatctggaactgctgaaccacctttgtcttcagctttctgtttaactgcttctttggtttcatcatgtaatctaagggattgcattgcactgagggataacactaacatgatattctggcgagttgataatgcttttggttcctttttacctggagatcctgcaagcatgagtgtggatgggaatgcttatgatcttcgacatatgctgttcgacagtgcagactcatcttccaagactgtctctagaaggcaagatagtagaaatgatttctctcaactagagagatcagaattgacctcaggtcggctatttgatgctgtggcaagctttaaactaatttggtcaaatagtgggacctcttcaccaaaaaagctctcaatatggcgtccaatgttgtctgaaggaatgttttactttggtgacatagctgttaacgggtatgaaccaccaaattcaactgttgttcttcgtgatactggtgaagacacttttctcagagctcctgaaggttttgaccttgttggtcgaattaagaagcaccggggcactgagggtgtatcattttggtttcctaaagctccttcaggttttgtggcattaggatgtgttgcatctaaaagttctccaaccaaagaggacttcagtttgttaagatgtattagaaatgacatggtggctggaggtcaattttctgaggaaagtttatgggattcatctaatgctagaacatctgaaccttttagcttatggactgttgataatgatgctggtacgtttcttgtgagaagtggatatagaaaacctccaaagaggcttgcactgaagcttgcaggtccacctacatcaagcagttcagatagcatcattgttgatgccaaaattaaaacattttctgctgtttcctttgatgattatggcggaatgatggtgccattatttggggtgtcctttgacagtgttggactaagttatcatggaggtcctcatcatcttaatgcaactgtgagcttgtcttttgtggccagatcctataatgacaagtatagctcgtgggagccctttattgaaccaacagatgcatttcttaggtaccaattcgacatgaatacaccaggttctcctagacaactccgtattacctcaactcaagaccttaatttgaacatatctgtttccaatacaaacatgttatcgcaagcttatgctagctggaataatattagctgtggtgatgaattgtataagaaggaaaccttttcttctactgagcgaccagttcttgatgttcatcaaagaagaagttattatgttgtcccacaaaataaacttggacaagatatttatgtaagaactactgaaaatagaggttcacttgttactctgttgccctctggggatgataggtccataaaagttccggctttaagggatctatcagattctcatttaaatggaagatctgttaaaccatatcggttgatgataactgccattcttgcggatgcagaggtcaaggatgatgaaggattagaaactggtgaatatatgactgctgtgcggctcttttcagaaaaccattccatatctgttcaacaacagagtgcccgtacttgtgctgctattggagaacacttgtcacagaacaccagaaaggtgaactggaacgaaatgttctttttcaaagtcgaacgtgtggacagctatactctagagcttcttgtgcttgatgctggtaaaggtcaaccagttggtatatactctgctccattggagcaagttgtgcaaaagctccctcctacctctaatccggactctgtcaaatttgatttggctttaggagaccttatgtcaactaagacagtggaacaggaaactgttaaacctagtggaaaaataagatttgcggtacttgtttctggtagagctagtgtacaacaagggaacagagccagtcctgaaagcaagactggatatattcagattagcccttcaaaagaagggccatggacaagcatgaagttgaactatgctgtacctgcagcatgttggaggtttggtaattgtgtgattgctagtgaagcaacagtcaaggaaggcaacagatacgttagcatacgttcccttgtgtcagttactaatacaaccaatttcattgttgatttacgtctaaaaggaagaatttctcaaagtgcacgggcagatgaacagggagacagttttggtaaagaggatcaaatcctgattggaacgctggagcccaattctactattccagtcccactatcaggcctctcacatcctcttatgccctatatgttgcagttaaggccggcaaaacatcatgatcatgaaaattactcctggagtgatgtccaggagaggcgcagtcaaaccgagtttagaaaggaggagatcctagatttatgtatatcagatctgtatgaatcggaaaacttgctattctgctcacaggtagatggcacctcgaattcttgtcatggactgtggttttgcttgagcatagaaggcaaggaaataggcaaagatgtacagatggaaccaatatatgattggtgcatcattattaagtccccgttgtgtttgacatactatcttcccattgctgcacattatactgtcagttctagccacctcgataatgaagattcaagttgctcccttggcaccttaagtccgggtgaggctgtaaaggttcacaatgttgatccaagaaaccctttgtacttatccctggttccacatggaggatgggaactgatgcatgagcctgttgttatatcacatccaacccaagcaccttccaaatttatcaatctaagaagctctttatcaggaagggttgtacagattctgcttgaacaaagcagtgatagtgactatttgatggcaaggcttatcagaatatatgttccctattggatatctttttctagattgcctacacttactctgcgtctcattgatatttctggaaggaaagagaagaggcgccttctttcacgttcacatctggaaaggggtgagaagcaactctatgatataaaacacgatgaattggttgagggatacactatagcgtctggattaaattttaagggattaggacttctatcatctgttggacatggtggacggtttggatctgtgaaagaattgtcgcctcttggcgatatggatggagcagttgatctttctgcctatgatgatgatggaaaatgcatgcatattcttctttgttcaaagccatcctcgtatcaagctgttccaacaaaggttatccatgtacgcccgtatataacattcacaaacagggccggacaagatttgtacttaaaacttagtattgaggatgagccaaaggtcttacatgcatatgactggagggtttcctttatgtactccaaggggactactgacaaactgcaggtccgactagtggatacagaatggtgccaacctctggagatagtaaaagaagacactattgttatagcaatgagaaagcagggtggtactcagaaatttgtaaaagctgagatacgtggttatgaggaaggttcaagattcttgattgtattccgtctgggcccagcatatggaccaatcaggattgagaaccggacgagtcataccacaatcagtacttgccagtctggtttaggggaggagagttggatccaagtgaagccacatgcaaccagaaaatattcttgggatgacccatatggacagaaagttattgatgttagcattgataaaggcgatgatacttgtgtcctatgtgttgacctggaaaatcctattggaagttccaccagttttagggaacatggcctcatgtttactgttgataccagtgacattaagatattgaagtttgctgattacataaggaaagaggaagtatatggattgcctggatctgaactgactgatcaccaaggatcgtcattgaaggaaaatgagacagagccaggtgctggacccttggagctcattgttgaacttggagttgttggaatatctttgattgatcataagccaagagagcttttatacttgcatctgcagaaggttttcgtttcatacttgactggttatgattttgggaccactagcaggtttaaattaatccttggcgagttgcaactagataatcagttgccactgtctacaatgcctgttgttttgtctaccgagagcaggcctgattcaaatcgttctgttttcaaagcaaacgttgctgttagcaatgtaacttctaatggcattcaagtttacccacatgtctatatccgggtaactgatcaaacatggagactaaacattcatgaacctattatttgggcactgtttgacttctacagcaatcttcgttttgtcaccaccatcaacagcacaactgtcacggaagtggatcctgagatacgaatagagctcattgatatttcagagataaggctaaaaatatctctggaaactgcgcctagtcaaagacctcgtggtgtcctaggcatatggagccccatcctatctgctgtgggtaatgcactcaagattcaggtgcatctgaggaaggtcatgcacagaagccggtttatgcggaagagctccatcatccctgctatcacgaaccgaatcaagagagatctgattcacaatccgctacatctaatcttttctgtggattttcttggagtaacaaaatcaactttatcatcacttagtaaaggatttgcagagctctctactgatgggcaatttcttcagctgagatcaaagcaggtttggtcaaggagaatcactggtgttggtgatgggctagttcaagggactgaagcatttgctcagggtttggctttcggggtttctggtgttttaagaaagccagttgagagtgccagacagtatggtgttataggtattgcacctggcattggccgtgcttttgtgggtttcattgtccaacctttaagtggggctctggattttttttcactgacggttgatggaatcagtgctagttttatgagatgtgttaacattttaagtaacaaatctgttccgcagaggataagagatcctcgtgctatacatcgtgatggtatagtaagagactatgacaaatttgaagctgctggccagatggccctttatctggcagaagctagcagatattttgcatgcacggatttatttcgagaaccttctaagtacgcatggtctgattactatgaagaccattttattttaccaagccagaggattgctttagtaactaataagcgggtgatgctgcttcagtgcttggatctagataaaatggacaagaaaccttctaaaatactttgggatgttccttgggaagaagtactttcattggagctagcaaaagctgggtatcagaggccttcacatgtaatcatacatctgaagaattttaggaggtcagagaactttgtaaggcttattaagtgcaacattgacaacgaacgggaacctcaggctctttcactttgctgttcaattcggaaaatgtggagatctcaccaagcagcaatgaaagttataccattgaaggttccatcaggccagcgtcatgtgtattttgtgtcagatgatgataaaaaggaatcccacagtttatctaggcctttgctaagctcgggaggaacctctactgatgttgagcaacagttcataaacaatacagttcactttcagaaaatgtggagcagtgaaccagaaattcagagccgatgcaaactagttgccaagcagattgcggatgacggaagggtgttcagcatatggaggcctctctgccctaatgggtatgtctcaattggtgatattgcgcatgttggcatccatccaccgcattttgctgctgtatacaagaatatcaatgggaactttgcactgcctcttggctatgacctggtttggagaaattgtgctgaggattacaagagccctgtatcaatatggcttccaaggccaccggggggatacgtagctcttgggtgtgttgctgtcccttcattcaaggagcccactcttgactgtgctttctgtgtggatgagagactcgcggaggatgccgcgtatgaggagcaaatcatatgggcctcatcggatgcttacccatggggatgctatatctaccaagttcagagcgcctcaatgcagttcatggcacttcgtgtcccaaaagaacaatctgagctaaggcccaagaagatattggagtcatttctgcagcaagcatcagagactcaaacgtcccgtgcatgaagaagctgcacatgatgcttgtgcgtgcaagagaactcggctgggacaaagggcaagtctcgtgcaagaaagctcgaagaatgccacttctttcggatcactccatttctccgttgtcaaagcatacacagaggacagagccttgcatgccaacactcgggttgacggaagtgttgtatactagaatagtaggttaaaggttgtaaatgtaaagttttgtaacgtttgatatagtttttgtccagctacatttgttaaggcccatgtggacgtgggccatattagttgtggctacatattctactaagaagttctcaggactaatcatactttctctaatttaaggttgttaaggcccatgtggacgtgggccatactagttgtggctatatattctactaagggcccgtttggtaaaacttcagctcctgcttctttagcttcagattctgatcctcgtgaggagctgatcctcctgattttcctagaaaatcagaatcatttttaaaaccgtttggcaagtaaactgattcttgtcttctgagggttggtggcctatggcgattgtctg

SEQ ID NO: 80663 - DNA, 10987 bp, Zea Mays
atggatattgctgctccaaaaattaccgttcctaccaagttccgaccagatgatgtacatgagactaagcttttgcttgaccttggaaatttagttcttcggacagaggaaatatgggatgcctatacttcagaagagcaggatatatatctaaactttaatttggtgcttagtgatgtctctgcatttctggtggatggtgattaccattggaatgaaacatctgatgaaaagaacttgttgccagtaattgacaaatgtgggattgctttgaaacttcagcagggtgttggaaaccgggaagctgtttggcaacacagatatttgcgtctagtgggtccatttctctatgtatttgaaaatttaatgtctacaacgtacaagcaatggttcagtttacgcgggaaacaagttcaccagattctggaagacactggtgctttaattttgttgtttgataatgatgagggacgaaagatatggcagaaccgtttacagggtgctatataccgtgcatcgggttctgcaatttctagctttcctggagttgctctcccatcagaggcccactcattcaaaggcaactttcttgatgttgctgacacagagaaattatttgttgcgggcattcttgatgaattaaagatatgtttttcatgtggctatgagagtaaccacaaactaaaaaaaattctactagctaaggagagcagcctgtttgaatttcgggcagttggtggccaggttgaactctcaatgaaaggtggcaatttactgataggaactattttggggtcactagaaattgaagaccagtattactatccagggagtcctgtgccaaggttcttggcaaggtcttttattaatagcatgcaaactcaagaactcccgtctcttagccgaaagaacagtgcaggacctagaaacaccccattgatgaaaaatgacagtgaggaaaactttttcgaagcatcagatgattttgatgaatttgaaacacctatgcatcaaaagaggactatatcagactattttagcacccagaaatttttgcctactagcgttccttccctacagccgccaacatttaagcgcattcctgatttgataccagatactgaacttcaaactggcaaattcacattggaaggtagtggcactttcaatagttttgtgaaagctcagatagtgatttatgatcaacattctccccagtacaacagcttggataacagggtagttgtaactgttgccactttatccttcttttgccatcggccaactgttattgcaatcatggaatttatgaatgccatcaaccttgcaaacgggtctgatactgataaagataaaagcacttatcctgctactgtagaagatagtgcaattgaggaatctaagtctgatctggaatcagagccatcaataaaacccttactggctaaaggtaaaagcagaatagtttttcatcttacatccagcatggcagaggcacagatattactgatgaatgaaaatggtgaccggcttgctactttatcacaaaataatctctcgactgatataaaggtgttcacatcatcattcagcataaaggctgcactcggaaaccttaaaataagtgatgatagccttcttagcagccacccttacttttgggtttgtgatatgcgaaatcctggaggtcgttcatttgtggagatcgactttagttcatacaatgttggtgatgaagactattgtggttatgactatagccttgtagggcagctttcagaagttagaattgtttacctcaaccgttttgttcaagagattatcagttattttatgggacttgtgccaaaaagttctgatgccgttgtaaagctgaaagacaataagactaactcagagaagtgggttagcaaaaccgatatggaaggatcacctgctctcaaattggatgtttcattcagcaggcctataattgttatgccccgtgaaactaatagtaatgactttttggagcttgatgttctatacataacagtccaaaatgaattccaatggataggtggtgataagaatgagatgagcactgttcacttagacattttaacagttacagtacgggacataaatttagttattggtatgaatatggtgcgtggtgaaaccataattcaagatgtagaaggtctctcctttgaacttcgtagatcattgcgtgatttgagacatcagttgccagtggtggaggcagcaattaaggtggatgttttgaaagcaacactatccaatcgagaatatgaaattatttctgaatgtgcattgtctaacttctctgagacaccacatcctgtgcctactctggatgatcctcgatatggcacttccactactccatcccatgtatcagcttcttcttcagaaagtattcatgtcttgtccgaaggtgcagaaacatggatagctaataaattttctgtctcaataaatctggttgagctttctctgcattcaggatcgacaagagattctcctctggcgagcgttcaggcgagtggagcatggcttttctataaatcaaacacacggggagaaaattttatgtatgctactctcaaaggattttctgtttttgatgatcgtgaaggaaccaaagatgagttaaggcttgccattgggaaatcagcatctgttcgggacacatcatctgttgatggctatgataatcctaatgaacttgattcaggtgaacgaagaatacaaaaggatctaggccttgagccaatcccctcgatgcttattcttgatgccatcttccgaaaatcttcgtcatccgtctctgtctgtgttcagcggcccaagtttcttgtggcacttgacttcttactagcagtaatcgaattctttgtgccatctgctcagagtcttctatccaatgatgaagacaaggaccttttacatatgatcactccagtagtattgaatgatcaaatttatttccaggagcattcaacatttagtctttcacctcagaagcccttgattgttgataatgaaagatttgatcacttcgtatatgatgggaagggtggaaagttatatttgctggatagtgaggggaaaattctctcaagcccttgtactgagagtttcattcatgtgcttgggtgtaagagattgcaatttcggaatgtcactatagtgaatggtgaatatttggattcctgtatctctctcggtgatgatagctgttattcagcatcaaggaatgaccatgtctacttagtaagagaagatgatgggtccttgtcaacccccagcaaggaaattagaggagacagtgttaaaaatgggagtgctgatatatcaaccgaatttattatggaactacaggctattggaccagagcttactttctatagtacatcaaggaatgctggtgaaaacttagcactgtcaacaaaggttattcatgcccacacagatgcattttgcaggcttataatgaaaggcgacagtatggagatgaatggaaacatacttggtttaaagatggagagtaatggcatcagagttatagaaccatttgacatggtcgtgaaatattccaatgcgtctggaaagacaaatttgcatctactagtttctgaaatatatatgaatttttccttcagtattctcagactgtttttagcagttgaggaagaaatttcagcatttcttaggatgtcgtcaaagaaaatttcactggtgtgttaccagtttgacaaagttgcaactatgcaaggtaatgctaatgatcaagtgttatctttctggcgaccgcgtgctccatctggatatgccatttttggcgattatctcacaccaatgaacgagcctcctactaaaggagttcttgctctgaacacaaacattgttagggtcaaaaggcctttatcgtacaaactagtgtggcaatctggttctccaagaacaaacatttttcatcagaaggacttggaggataagatctctaatattgaccagctctgctctgtttggttacctgtggcacctgcgggttatgttgcaatgggttgtgttgcttcatctggaactgctgaaccacctttgtcttcagctttctgtttaactgcttctttggtttcatcatgtaatctaagggattgcattgcactgagggataacactaacatgatattctggcgagttgataatgcttttggttcctttttacctggagatcctgcaagcatgagtgtggatgggaatgcttatgatcttcgacatatgctgttcgacagtgcagactcatcttccaagactgtctctagaaggcaagatagtagaaatgatttctctcaactagagagatcagaattgacctcaggtcggctatttgatgctgtggcaagctttaaactaatttggtcaaatagtgggacctcttcaccaaaaaagctctcaatatggcgtccaatgttgtctgaaggaatgttttactttggtgacatagctgttaacgggtatgaaccaccaaattcaactgttgttcttcgtgatactggtgaagacacttttctcagagctcctgaaggttttgaccttgttggtcgaattaagaagcaccggggcactgagggtgtatcattttggtttcctaaagctccttcaggttttgtggcattaggatgtgttgcatctaaaagttctccaaccaaagaggacttcagtttgttaagatgtattagaaatgacatggtggctggaggtcaattttctgaggaaagtttatgggattcatctaatgctagaacatctgaaccttttagcttatggactgttgataatgatgctggtacgtttcttgtgagaagtggatatagaaaacctccaaagaggcttgcactgaagcttgcaggtccacctacatcaagcagttcagatagcatcattgttgatgccaaaattaaaacattttctgctgtttcctttgatgattatggcggaatgtattctatgcagatggtgccattatttggggtgtcctttgacagtgttggactaagttatcatggaggtcctcatcatcttaatgcaactgtgagcttgtcttttgtggccagatcctataatgacaagtatagctcgtgggagccctttattgaaccaacagatgcatttcttaggtaccaattcgacatgaatacaccaggttctcctagacaactccgtattacctcaactcaagaccttaatttgaacatatctgtttccaatacaaacatgttatcgcaagcttatgctagctggaataatattagctgtggtgatgaattgtataagaaggaaaccttttcttctactgagcgaccagttcttgatgttcatcaaagaagaagttattatgttgtcccacaaaataaacttggacaagatatttatgtaagaactactgaaaatagaggttcacttgttactctgttgccctctggggatgataggtccataaaagttccggctttaagggatctatcagattctcatttaaatggaagatctgttaaaccatatcggttgatgataactgccattcttgcggatgcagaggtcaaggatgatgaaggattagaaactggtgaatatatgactgctgtgcggctcttttcagaaaaccattccatatctgttcaacaacagagtgcccgtacttgtgctgctattggagaacacttgtcacagaacaccagaaaggtgaactggaacgaaatgttctttttcaaagtcgaacgtgtggacagctatactctagagcttcttgtgcttgatgctggtaaaggtcaaccagttggtatatactctgctccattggagcaagttgtgcaaaagctccctcctacctctaatccggactctgtcaaatttgatttggctttaggagaccttatgtcaactaagacagtggaacaggaaactgttaaacctagtggaaaaataagatttgcggtacttgtttctggtagagctagtgtacaacaagggaacagagccagtcctgaaagcaagactggatatattcagattagcccttcaaaagaagggccatggacaagcatgaagttgaactatgctgtacctgcagcatgttggaggtttggtaattgtgtgattgctagtgaagcaacagtcaaggaaggcaacagatacgttagcatacgttcccttgtgtcagttactaatacaaccaatttcattgttgatttacgtctaaaaggaagaatttctcaaagtgcacgggcagatgaacagggagacagttttggtaaagaggatcaaatcctgattggaacgctggagcccaattctactattccagtcccactatcaggcctctcacatcctcttatgccctatatgttgcagttaaggccggcaaaacatcatgatcatgaaaattactcctggagtgatgtccaggagaggcgcagtcaaaccgagtttagaaaggaggagatcctagatttatgtatatcagatctgtatgaatcggaaaacttgctattctgctcacaggtagatggcacctcgaattcttgtcatggactgtggttttgcttgagcatagaaggcaaggaaataggcaaagatgtacagatggaaccaatatatgattggtgcatcattattaagtccccgttgtgtttgacatactatcttcccattgctgcacattatactgtcagttctagccacctcgataatgaagattcaagttgctcccttggcaccttaagtccgggtgaggctgtaaaggttcacaatgttgatccaagaaaccctttgtacttatccctggttccacatggaggatgggaactgatgcatgagcctgttgttatatcacatccaacccaagcaccttccaaatttatcaatctaagaagctctttatcaggaagggttgtacagattctgcttgaacaaagcagtgatagtgactatttgatggcaaggcttatcagaatatatgttccctattggatatctttttctagattgcctacacttactctgcgtctcattgatatttctggaaggaaagagaagaggcgccttctttcacgttcacatctggaaaggggtgagaagcaactctatgatataaaacacgatgaattggttgagggatacactatagcgtctggattaaattttaagggattaggacttctatcatctgttggacatggtggacggtttggatctgtgaaagaattgtcgcctcttggcgatatggatggagcagttgatctttctgcctatgatgatgatggaaaatgcatgcatattcttctttgttcaaagccatcctcgtatcaagctgttccaacaaaggttatccatgtacgcccgtatataacattcacaaacagggccggacaagatttgtacttaaaacttagtattgaggatgagccaaaggtcttacatgcatatgactggagggtttcctttatgtactccaaggggactactgacaaactgcaggtccgactagtggatacagaatggtgccaacctctggagatagtaaaagaagacactattgttatagcaatgagaaagcagggtggtactcagaaatttgtaaaagctgagatacgtggttatgaggaaggttcaagattcttgattgtattccgtctgggcccagcatatggaccaatcaggattgagaaccggacgagtcataccacaatcagtacttgccagtctggtttaggggaggagagttggatccaagtgaagccacatgcaaccagaaaatattcttgggatgacccatatggacagaaagttattgatgttagcattgataaaggcgatgatacttgtgtcctatgtgttgacctggaaaatcctattggaagttccaccagttttagggaacatggcctcatgtttactgttgataccagtgacattaagatattgaagtttgctgattacataaggaaagaggaagtatatggattgcctggatctgaactgactgatcaccaaggatcgtcattgaaggaaaatgagacagagccaggtgctggacccttggagctcattgttgaacttggagttgttggaatatctttgattgatcataagccaagagagcttttatacttgcatctgcagaaggttttcgtttcatacttgactggttatgattttgggaccactagcaggtttaaattaatccttggcgagttgcaactagataatcagttgccactgtctacaatgcctgttgttttgtctaccgagagcaggcctgattcaaatcgttctgttttcaaagcaaacgttgctgttagcaatgtaacttctaatggcattcaagtttacccacatgtctatatccgggtaactgatcaaacatggagactaaacattcatgaacctattatttgggcactgtttgacttctacagcaatcttcgttttgtcaccaccatcaacagcacaactgtcacggaagtggatcctgagatacgaatagagctcattgatatttcagagataaggctaaaaatatctctggaaactgcgcctagtcaaagacctcgtggtgtcctaggcatatggagccccatcctatctgctgtgggtaatgcactcaagattcaggtgcatctgaggaaggtcatgcacagaagccggtttatgcggaagagctccatcatccctgctatcacgaaccgaatcaagagagatctgattcacaatccgctacatctaatcttttctgtggattttcttggagtaacaaaatcaactttatcatcacttagtaaaggatttgcagagctctctactgatgggcaatttcttcagctgagatcaaagcaggtttggtcaaggagaatcactggtgttggtgatgggctagttcaagggactgaagcatttgctcagggtttggctttcggggtttctggtgttttaagaaagccagttgagagtgccagacagtatggtgttataggtattgcacctggcattggccgtgcttttgtgggtttcattgtccaacctttaagtggggctctggattttttttcactgacggttgatggaatcagtgctagttttatgagatgtgttaacattttaagtaacaaatctgttccgcagaggataagagatcctcgtgctatacatcgtgatggtatagtaagagactatgacaaatttgaagctgctggccagatggccctttatctggcagaagctagcagatattttgcatgcacggatttatttcgagaaccttctaagtacgcatggtctgattactatgaagaccattttattttaccaagccagaggattgctttagtaactaataagcgggtgatgctgcttcagtgcttggatctagataaaatggacaagaaaccttctaaaatactttgggatgttccttgggaagaagtactttcattggagctagcaaaagctgggtatcagaggccttcacatgtaatcatacatctgaagaattttaggaggtcagagaactttgtaaggcttattaagtgcaacattgacaacgaacgggaacctcaggctctttcactttgctgttcaattcggaaaatgtggagatctcaccaagcagcaatgaaagttataccattgaaggttccatcaggccagcgtcatgtgtattttgtgtcagatgatgataaaaaggaatcccacagtttatctaggcctttgctaagctcgggaggaacctctactgatgttgagcaacagttcataaacaatacagttcactttcagaaaatgtggagcagtgaaccagaaattcagagccgatgcaaactagttgccaagcagattgcggatgacggaagggtgttcagcatatggaggcctctctgccctaatgggtatgtctcaattggtgatattgcgcatgttggcatccatccaccgcattttgctgctgtatacaagaatatcaatgggaactttgcactgcctcttggctatgacctggtttggagaaattgtgctgaggattacaagagccctgtatcaatatggcttccaaggccaccggggggatacgtagctcttgggtgtgttgctgtcccttcattcaaggagcccactcttgactgtgctttctgtgtggatgagagactcgcggaggatgccgcgtatgaggagcaaatcatatgggcctcatcggatgcttacccatggggatgctatatctaccaagttcagagcgcctcaatgcagttcatggcacttcgtgtcccaaaagaacaatctgagctaaggcccaagaagatattggagtcatttctgcagcaagcatcagagactcaaacgtcccgtgcatgaagaagctgcacatgatgcttgtgcgtgcaagagaactcggctgggacaaagggcaagtctcgtgcaagaaagctcgaagaatgccacttctttcggatcactccatttctccgttgtcaaagcatacacagaggacagagccttgcatgccaacactcgggttgacggaagtgttgtatactagaatagtaggttaaaggttgtaaatgtaaagttttgtaacgtttgatatagtttttgtccagctacatttgttaaggcccatgtggacgtgggccatattagttgtggctacatattctactaagaagttctcaggactaatcatactttctctaatttaaggttgttaaggcccatgtggacgtgggccatactagttgtggctatatattctactaagggcccgtttggtaaaacttcagctcctgcttctttagcttcagattctgatcctcgtgaggagctgatcctcctgattttcctagaaaatcagaatcatttttaaaaccgtttggcaagtaaactgattcttgtcttctgagggttggtggcctatggcgattgtctg

SEQ ID NO: 80664 - DNA, 2484 bp, Zea Mays
ctcggtttattcctttcccagatcctacatgagtgggagcctccggcactaggctcattgatatttcagagataaggctaaaaatatctctggaaactgcgcctagtcaaagacctcgtggtgtcctaggcatatggagccccatcctatctgctgtgggtaatgcactcaagattcaggtgcatctgaggaaggtcatgcacagaagccggtttatgcggaagagctccatcatccctgctatcacgaaccgaatcaagagagatctgattcacaatccgctacatctaatcttttctgtggattttcttggagtaacaaaatcaactttatcatcacttagtaaaggatttgcagagctctctactgatgggcaatttcttcagctgagatcaaagcaggtttggtcaaggagaatcactggtgttggtgatgggctagttcaagggactgaagcatttgctcagggtttggctttcggggtttctggtgttttaagaaagccagttgagagtgccagacagtatggtgttataggtattgcacctggcattggccgtgcttttgtgggtttcattgtccaacctttaagtggggctctggattttttttcactgacggttgatggaatcagtgctagttttatgagatgtgttaacattttaagtaacaaatctgttccgcagaggataagagatcctcgtgctatacatcgtgatggtatagtaagagactatgacaaatttgaagctgctggccagatggccctttatctggcagaagctagcagatattttgcatgcacggatttatttcgagaaccttctaagtacgcatggtctgattactatgaagaccattttattttaccaagccagaggattgctttagtaactaataagcgggtgatgctgcttcagtgcttggatctagataaaatggacaagaaaccttctaaaatactttgggatgttccttgggaagaagtactttcattggagctagcaaaagctgggtatcagaggccttcacatgtaatcatacatctgaagaattttaggaggtcagagaactttgtaaggcttattaagtgcaacattgacaacgaacgggaacctcaggctctttcactttgctgttcaattcggaaaatgtggagatctcaccaagcagcaatgaaagttataccattgaaggttccatcaggccagcgtcatgtgtattttgtgtcagatgatgataaaaaggaatcccacagtttatctaggcctttgctaagctcgggaggaacctctactgatgttgagcaacagttcataaacaatacagttcactttcagaaaatgtggagcagtgaaccagaaattcagagccgatgcaaactagttgccaagcagattgcggatgacggaagggtgttcagcatatggaggcctctctgccctaatgggtatgtctcaattggtgatattgcgcatgttggcatccatccaccgcattttgctgctgtatacaagaatatcaatgggaactttgcactgcctcttggctatgacctggtttggagaaattgtgctgaggattacaagagccctgtatcaatatggcttccaaggccaccggggggatacgtagctcttgggtgtgttgctgtcccttcattcaaggagcccactcttgactgtgctttctgtgtggatgagagactcgcggaggatgccgcgtatgaggagcaaatcatatgggcctcatcggatgcttacccatggggatgctatatctaccaagttcagagcgcctcaatgcagttcatggcacttcgtgtcccaaaagaacaatctgagctaaggcccaagaagatattggagtcatttctgcagcaagcatcagagactcaaacgtcccgtgcatgaagaagctgcacatgatgcttgtgcgtgcaagagaactcggctgggacaaagggcaagtctcgtgcaagaaagctcgaagaatgccacttctttcggatcactccatttctccgttgtcaaagcatacacagaggacagagccttgcatgccaacactcgggttgacggaagtgttgtatactagaatagtaggttaaaggttgtaaatgtaaagttttgtaacgtttgatatagtttttgtccagctacatttgttaaggcccatgtggacgtgggccatattagttgtggctacatattctactaagaagttctcaggactaatcatactttctctaatttaaggttgttaaggcccatgtggacgtgggccatactagttgtggctatatattctactaagggcccgtttggtaaaacttcagctcctgcttctttagcttcagattctgatcctcgtgaggagctgatcctcctgattttcctagaaaatcagaatcatttttaaaaccgtttggcaagtaaactgattcttgtcttctgagggttggtggcctatggcgattgtctg

SEQ ID NO: 80665 - DNA, 2202 bp, Zea Mays
atggaggtgcatctgaggaaggtcatgcacagaagccggtttatgcggaagagctccatcatccctgctatcacgaaccgaatcaagagagatctgattcacaatccgctacatctaatcttttctgtggattttcttggagtaacaaaatcaactttatcatcacttagtaaaggatttgcagagctctctactgatgggcaatttcttcagctgagatcaaagcaggtttggtcaaggagaatcactggtgttggtgatgggctagttcaagggactgaagcatttgctcagggtttggctttcggggtttctggtgttttaagaaagccagttgagagtgccagacagtatggtgttataggtattgcacctggcattggccgtgcttttgtgggtttcattgtccaacctttaagtggggctctggattttttttcactgacggttgatggaatcagtgctagttttatgagatgtgttaacattttaagtaacaaatctgttccgcagaggataagagatcctcgtgctatacatcgtgatggtatagtaagagactatgacaaatttgaagctgctggccagatggccctttatctggcagaagctagcagatattttgcatgcacggatttatttcgagaaccttctaagtacgcatggtctgattactatgaagaccattttattttaccaagccagaggattgctttagtaactaataagcgggtgatgctgcttcagtgcttggatctagataaaatggacaagaaaccttctaaaatactttgggatgttccttgggaagaagtactttcattggagctagcaaaagctgggtatcagaggccttcacatgtaatcatacatctgaagaattttaggaggtcagagaactttgtaaggcttattaagtgcaacattgacaacgaacgggaacctcaggctctttcactttgctgttcaattcggaaaatgtggagatctcaccaagcagcaatgaaagttataccattgaaggttccatcaggccagcgtcatgtgtattttgtgtcagatgatgataaaaaggaatcccacagtttatctaggcctttgctaagctcgggaggaacctctactgatgttgagcaacagttcataaacaatacagttcactttcagaaaatgtggagcagtgaaccagaaattcagagccgatgcaaactagttgccaagcagattgcggatgacggaagggtgttcagcatatggaggcctctctgccctaatgggtttggagaaattgtgctgaggattacaagagccctgtatcaatatggcttccaaggccaccggggggatacgtagctcttgggtgtgttgctgtcccttcattcaaggagcccactcttgactgtgctttctgtgtggatgagagactcgcggaggatgccgcgtatgaggagcaaatcatatgggcctcatcggatgcttacccatggggatgctatatctaccaagttcagagcgcctcaatgcagttcatggcacttcgtgtcccaaaagaacaatctgagctaaggcccaagaagatattggagtcatttctgcagcaagcatcagagactcaaacgtcccgtgcatgaagaagctgcacatgatgcttgtgcgtgcaagagaactcggctgggacaaagggcaagtctcgtgcaagaaagctcgaagaatgccacttctttcggatcactccatttctccgttgtcaaagcatacacagaggacagagccttgcatgccaacactcgggttgacggaagtgttgtatactagaatagtaggttaaaggttgtaaatgtaaagttttgtaacgtttgatatagtttttgtccagctacatttgttaaggcccatgtggacgtgggccatattagttgtggctacatattctactaagaagttctcaggactaatcatactttctctaatttaaggttgttaaggcccatgtggacgtgggccatactagttgtggctatatattctactaagggcccgtttggtaaaacttcagctcctgcttctttagcttcagattctgatcctcgtgaggagctgatcctcctgattttcctagaaaatcagaatcatttttaaaaccgtttggcaagtaaactgattcttgtcttctgagggttggtggcctatggcgattgtctg

SEQ ID NO: 80666 - DNA, 2125 bp, Zea Mays
atggccttgctctcgcagccaagtgtaagaaaaactgcggacgtggcgcccttgtccgtccacgcggttgagcgctgtgcgcatctggctgacgacacgacgcgccgtcctgtaactcgtgctacactgaccacactccttaaggcctcgtttggcaactcagattgcattgtaccaaggataagaaaaatggataagcgaactaggaatagaagagaagaggaggacgaggagttaatgctctttcttttccctgctctttatctaattactaatggagggagagagaaaagagcaaggcatgcttctattctacctggcaaggagagacttaaagagattcttgaagggcatgagaagaactgtcttgtcgcattttgtatggagcctcgtatactcaaagatatagcaacatttcttagagaagaacacatcctacgtgacacaaggggtgttaccgtggaagaaaaactaggaatgttccttttcatattgtcccataatgctagttatgaggatttacaacatgaattcaaacatagcgcaagaatgtttggaagaggatctcctaggatgaacttgatccaagctgcaactatgaaaaaaatatcccccagatctactactaacaagcgcaagaagagaacatcaccaaaagagcaaactggaatagtggactagaaaagggtttagttgaaattcttcaagaccacaacaatgactgttataagggccaaaatgggtggtcatcggaagcatggaatagaattgtcaagttattccatgagaaattctcttatgtcacatttacaaaatgccaaatccaagataaagagaaagagttaaagagagactacaaggctcttaaagaggcaagacaacaaagcggggtatcatgggatgagcggttgtgtagaatagaagcagaagaacccatttggaataacctcaccactagtaacgagagacttaagaagtttcggactaaatctttcccactgtttgaggctttaggagagctatatgatggaaatattgctaagggaaccatgaattttacttctattgagccttctcgacctcctgtcacacaaccttgtcaaggtgctgctacacagccttctcaagctgctttcacacttacacaaccttctcaaatcgctttcacacaaccttctctagctgctttcgcacagccttctcgaaccgcttttagacatccttctctagccgctttcccacagccttctcaagccgcttttgcacagccttctcaaaccattttcacacagccttctaaagccgctttcacacacccttctgaagccactttcacacagccttctcaagccgctttcacacaaccttctcaagctaatatctcacaagccatttgtgatgaagatgacgagctcagagtattggatccaccagcccctacatcagtgagcaaaagggcaaaaaatgttggtactggtaattcaagaacaagaattaacaagcgtacacaagataggaatgtggttgagatgatgggaaggtttctagaaatgaaagaaaaacaagctgaggcggatgaaagggccacaactaatgcaaatgaggatgatttccctattcaaacatgcattgctattgtggatggaatggaagagctttctgatgatgagaaggttgatgcttatgatgtgtttaaggatgcccaaaaccgggccattttcatgactgccaaagatgctacgcgcataaaatggttgaggaagaagattgcaagaacatgatatgatatatgaagctaaagtaatgaaggatgattttgtagtatcgtccagcataaggaaagaaagctgcaatttgtgctattgtttgatttaagacaaacagagatggatatttaactttagccatgacactacttgtttgcaacttttaagtaatctgttaaattaaagatgagatcttgcagatttttcttattacctaatggattctcttattagctgattcaaatctaatcatgcatattgtagtaaggactatgtatgttgaatcaatgactctggttcaattttaaatatcacatgtgttttaagtttcttaactttatggcttatcttctaatttt

SEQ ID NO: 80667 - DNA, 1824 bp, Zea Mays
cacatcgtcgccctcctcgcgtgcgagcgccgccaccgcatcttcccatcgaactccgccgaccacccgaggtggaagacacaccgtcgccctccttgcatgcgagcgccgccaccacatcttcccatcgaacttcgccgaccccgcatcttcccatacgagcggtgtttctccaagattcgctgctggccatatcgacatcgacatcgtcatcctcgatccagacgagtcaagaatgtttggaagaggatctcctaggatgaacttgatccaagctgcaactatgaaaaaaatatcccccagatctactactaacaagcgcaagaagagaacatcaccaaaagttggtcgtcttagagcaaactggaatagtggactagaaaagggtttagttgaaattcttcaagaccacaacaatgactgttataagggccaaaatgggtggtcatcggaagcatggaatagaattgtcaagttattccatgagaaattctcttatgtcacatttacaaaatgccaaatccaagataaagagaaagagttaaagagagactacaaggctcttaaagaggcaagacaacaaagcggggtatcatgggatgagcggttgtgtagaatagaagcagaagaacccatttggaataacctcaccactagtaacgagagacttaagaagtttcggactaaatctttcccactgtttgaggctttaggagagctatatgatggaaatattgctaagggaaccatgaattttacttctattgagccttctcgacctcctgtcacacaaccttgtcaaggtgctgctacacagccttctcaagctgctttcacacttacacaaccttctcaaatcgctttcacacaaccttctctagctgctttcgcacagccttctcgaaccgcttttagacatccttctctagccgctttcccacagccttctcaagccgcttttgcacagccttctcaaaccattttcacacagccttctaaagccgctttcacacacccttctgaagccactttcacacagccttctcaagccgctttcacacaaccttctcaagctaatatctcacaagccatttgtgatgaagatgacgagctcagagtattggatccaccagcccctacatcagtgagcaaaagggcaaaaaatgttggtactggtaattcaagaacaagaattaacaagcgtacacaagataggaatgtggttgagatgatgggaaggtttctagaaatgaaagaaaaacaagctgaggcggatgaaagggccacaactaatgcaaatgaggatgatttccctattcaaacatgcattgctattgtggatggaatggaagagctttctgatgatgagaaggttgatgcttatgatgtgtttaaggatgcccaaaaccgggccattttcatgactgccaaagatgctacgcgcataaaatggttgaggaagaagattgcaagaacatgatatgatatatgaagctaaagtaatgaaggatgattttgtagtatcgtccagcataaggaaagaaagctgcaatttgtgctattgtttgatttaagacaaacagagatggatatttaactttagccatgacactacttgtttgcaacttttaagtaatctgttaaattaaagatgagatcttgcagatttttcttattacctaatggattctcttattagctgattcaaatctaatcatgcatattgtagtaaggactatgtatgttgaatcaatgactctggttcaattttaaatatcacatgtgttttaagtttcttaactttatggcttatcttctaatttt

SEQ ID NO: 80668 - DNA, 1855 bp, Zea Mays
cgtcgccctcctcgcgtgcgagcgccgccaccgcatcttcccatcgaactccgccgaccacccgaggtggaagacacaccgtcgccctccttgcatgcgagcgccgccaccacatcttcccatcgaacttcgccgaccccgcatcttcccatacgagcggtgtttctccaagattcgctgctggccatatcgacatcgacatcgtcatcctcgatccagacgagtgtgtgtgccgtctccatgggtcttcgacagatttagcaagaatgtttggaagaggatctcctaggatgaacttgatccaagctgcaactatgaaaaaaatatcccccagatctactactaacaagcgcaagaagagaacatcaccaaaagttggtcgtcttagagcaaactggaatagtggactagaaaagggtttagttgaaattcttcaagaccacaacaatgactgttataagggccaaaatgggtggtcatcggaagcatggaatagaattgtcaagttattccatgagaaattctcttatgtcacatttacaaaatgccaaatccaagataaagagaaagagttaaagagagactacaaggctcttaaagaggcaagacaacaaagcggggtatcatgggatgagcggttgtgtagaatagaagcagaagaacccatttggaataacctcaccactagtaacgagagacttaagaagtttcggactaaatctttcccactgtttgaggctttaggagagctatatgatggaaatattgctaagggaaccatgaattttacttctattgagccttctcgacctcctgtcacacaaccttgtcaaggtgctgctacacagccttctcaagctgctttcacacttacacaaccttctcaaatcgctttcacacaaccttctctagctgctttcgcacagccttctcgaaccgcttttagacatccttctctagccgctttcccacagccttctcaagccgcttttgcacagccttctcaaaccattttcacacagccttctaaagccgctttcacacacccttctgaagccactttcacacagccttctcaagccgctttcacacaaccttctcaagctaatatctcacaagccatttgtgatgaagatgacgagctcagagtattggatccaccagcccctacatcagtgagcaaaagggcaaaaaatgttggtactggtaattcaagaacaagaattaacaagcgtacacaagataggaatgtggttgagatgatgggaaggtttctagaaatgaaagaaaaacaagctgaggcggatgaaagggccacaactaatgcaaatgaggatgatttccctattcaaacatgcattgctattgtggatggaatggaagagctttctgatgatgagaaggttgatgcttatgatgtgtttaaggatgcccaaaaccgggccattttcatgactgccaaagatgctacgcgcataaaatggttgaggaagaagattgcaagaacatgatatgatatatgaagctaaagtaatgaaggatgattttgtagtatcgtccagcataaggaaagaaagctgcaatttgtgctattgtttgatttaagacaaacagagatggatatttaactttagccatgacactacttgtttgcaacttttaagtaatctgttaaattaaagatgagatcttgcagatttttcttattacctaatggattctcttattagctgattcaaatctaatcatgcatattgtagtaaggactatgtatgttgaatcaatgactctggttcaattttaaatatcacatgtgttttaagtttcttaactttatggcttatcttctaatttt

SEQ ID NO: 80669 - DNA, 1842 bp, Zea Mays
cgtcgccctcctcgcgtgcgagcgccgccaccgcatcttcccatcgaactccgccgaccacccgaggtggaagacacaccgtcgccctccttgcatgcgagcgccgccaccacatcttcccatcgaacttcgccgaccccgcatcttcccatacgagcggtgtttctccaagattcgctgctggccatatcgacatcgacatcgtcatcctcgatccagacgagtgtgtgtgccgtctccatgggtcttcgacagatttagcaagaatgtttggaagaggatctcctaggatgaacttgatccaagctgcaactatgaaaaaaatatcccccagatctactactaacaagcgcaagaagagaacatcaccaaaagagcaaactggaatagtggactagaaaagggtttagttgaaattcttcaagaccacaacaatgactgttataagggccaaaatgggtggtcatcggaagcatggaatagaattgtcaagttattccatgagaaattctcttatgtcacatttacaaaatgccaaatccaagataaagagaaagagttaaagagagactacaaggctcttaaagaggcaagacaacaaagcggggtatcatgggatgagcggttgtgtagaatagaagcagaagaacccatttggaataacctcaccactagtaacgagagacttaagaagtttcggactaaatctttcccactgtttgaggctttaggagagctatatgatggaaatattgctaagggaaccatgaattttacttctattgagccttctcgacctcctgtcacacaaccttgtcaaggtgctgctacacagccttctcaagctgctttcacacttacacaaccttctcaaatcgctttcacacaaccttctctagctgctttcgcacagccttctcgaaccgcttttagacatccttctctagccgctttcccacagccttctcaagccgcttttgcacagccttctcaaaccattttcacacagccttctaaagccgctttcacacacccttctgaagccactttcacacagccttctcaagccgctttcacacaaccttctcaagctaatatctcacaagccatttgtgatgaagatgacgagctcagagtattggatccaccagcccctacatcagtgagcaaaagggcaaaaaatgttggtactggtaattcaagaacaagaattaacaagcgtacacaagataggaatgtggttgagatgatgggaaggtttctagaaatgaaagaaaaacaagctgaggcggatgaaagggccacaactaatgcaaatgaggatgatttccctattcaaacatgcattgctattgtggatggaatggaagagctttctgatgatgagaaggttgatgcttatgatgtgtttaaggatgcccaaaaccgggccattttcatgactgccaaagatgctacgcgcataaaatggttgaggaagaagattgcaagaacatgatatgatatatgaagctaaagtaatgaaggatgattttgtagtatcgtccagcataaggaaagaaagctgcaatttgtgctattgtttgatttaagacaaacagagatggatatttaactttagccatgacactacttgtttgcaacttttaagtaatctgttaaattaaagatgagatcttgcagatttttcttattacctaatggattctcttattagctgattcaaatctaatcatgcatattgtagtaaggactatgtatgttgaatcaatgactctggttcaattttaaatatcacatgtgttttaagtttcttaactttatggcttatcttctaatttt

SEQ ID NO: 80670 - DNA, 2129 bp, Zea Mays
gccgtctccatgggtcttcgacagatttaggattccatgttcccgagggaaaatattatcttgtcgatggaggatatgctaacacaccatcattccttgcaccgtatcatggtgttcgatatcacttgaaagaatttggccatggtcaccaacggccaagaaactataaggaattgtttaatcaccgacatgctttattgcggaaccacatagagagagcaataggagttttgaagaagcgttttcccattctaaaagttggaacacaccatccaattaggaaccaagtgaaaataccagctgcggcagtgttgttccataatattatacggatgcacaacggggatgaaggttggttgaatagccaaacaagtaacatatcgccagaaacttttgttgatcttcctggaggagacaattactatagcaatgatgttgtgtcacttaatagccaagtggataatgggaactctgttagagatatgattgcattgaatatgtggaatgattatagtcaacatcgttcatgatatatcaagaatgtttggaagaggatctcctaggatgaacttgatccaagctgcaactatgaaaaaaatatcccccagatctactactaacaagcgcaagaagagaacatcaccaaaagttggtcgtcttagagcaaactggaatagtggactagaaaagggtttagttgaaattcttcaagaccacaacaatgactgttataagggccaaaatgggtggtcatcggaagcatggaatagaattgtcaagttattccatgagaaattctcttatgtcacatttacaaaatgccaaatccaagataaagagaaagagttaaagagagactacaaggctcttaaagaggcaagacaacaaagcggggtatcatgggatgagcggttgtgtagaatagaagcagaagaacccatttggaataacctcaccactagtaacgagagacttaagaagtttcggactaaatctttcccactgtttgaggctttaggagagctatatgatggaaatattgctaagggaaccatgaattttacttctattgagccttctcgacctcctgtcacacaaccttgtcaaggtgctgctacacagccttctcaagctgctttcacacttacacaaccttctcaaatcgctttcacacaaccttctctagctgctttcgcacagccttctcgaaccgcttttagacatccttctctagccgctttcccacagccttctcaagccgcttttgcacagccttctcaaaccattttcacacagccttctaaagccgctttcacacacccttctgaagccactttcacacagccttctcaagccgctttcacacaaccttctcaagctaatatctcacaagccatttgtgatgaagatgacgagctcagagtattggatccaccagcccctacatcagtgagcaaaagggcaaaaaatgttggtactggtaattcaagaacaagaattaacaagcgtacacaagataggaatgtggttgagatgatgggaaggtttctagaaatgaaagaaaaacaagctgaggcggatgaaagggccacaactaatgcaaatgaggatgatttccctattcaaacatgcattgctattgtggatggaatggaagagctttctgatgatgagaaggttgatgcttatgatgtgtttaaggatgcccaaaaccgggccattttcatgactgccaaagatgctacgcgcataaaatggttgaggaagaagattgcaagaacatgatatgatatatgaagctaaagtaatgaaggatgattttgtagtatcgtccagcataaggaaagaaagctgcaatttgtgctattgtttgatttaagacaaacagagatggatatttaactttagccatgacactacttgtttgcaacttttaagtaatctgttaaattaaagatgagatcttgcagatttttcttattacctaatggattctcttattagctgattcaaatctaatcatgcatattgtagtaaggactatgtatgttgaatcaatgactctggttcaattttaaatatcacatgtgttttaagtttcttaactttatggcttatcttctaatttt

SEQ ID NO: 80671 - DNA, 2179 bp, Zea Mays
atggaacacatgttccaattaccatttcggcagaaaagcaagccccctataggaatcgaaaaggcacactaagtcaaaatgattccatgttcccgagggaaaatattatcttgtcgatggaggatatgctaacacaccatcattccttgcaccgtatcatggtgttcgatatcacttgaaagaatttggccatggtcaccaacggccaagaaactataaggaattgtttaatcaccgacatgctttattgcggaaccacatagagagagcaataggagttttgaagaagcgttttcccattctaaaagttggaacacaccatccaattaggaaccaagtgaaaataccagctgcggcagtgttgttccataatattatacggatgcacaacggggatgaaggttggttgaatagccaaacaagtaacatatcgccagaaacttttgttgatcttcctggaggagacaattactatagcaatgatgttgtgtcacttaatagccaagtggataatgggaactctgttagagatatgattgcattgaatatgtggaatgattatagtcaacatcgttcatgatatatcaagaatgtttggaagaggatctcctaggatgaacttgatccaagctgcaactatgaaaaaaatatcccccagatctactactaacaagcgcaagaagagaacatcaccaaaagttggtcgtcttagagcaaactggaatagtggactagaaaagggtttagttgaaattcttcaagaccacaacaatgactgttataagggccaaaatgggtggtcatcggaagcatggaatagaattgtcaagttattccatgagaaattctcttatgtcacatttacaaaatgccaaatccaagataaagagaaagagttaaagagagactacaaggctcttaaagaggcaagacaacaaagcggggtatcatgggatgagcggttgtgtagaatagaagcagaagaacccatttggaataacctcaccactagtaacgagagacttaagaagtttcggactaaatctttcccactgtttgaggctttaggagagctatatgatggaaatattgctaagggaaccatgaattttacttctattgagccttctcgacctcctgtcacacaaccttgtcaaggtgctgctacacagccttctcaagctgctttcacacttacacaaccttctcaaatcgctttcacacaaccttctctagctgctttcgcacagccttctcgaaccgcttttagacatccttctctagccgctttcccacagccttctcaagccgcttttgcacagccttctcaaaccattttcacacagccttctaaagccgctttcacacacccttctgaagccactttcacacagccttctcaagccgctttcacacaaccttctcaagctaatatctcacaagccatttgtgatgaagatgacgagctcagagtattggatccaccagcccctacatcagtgagcaaaagggcaaaaaatgttggtactggtaattcaagaacaagaattaacaagcgtacacaagataggaatgtggttgagatgatgggaaggtttctagaaatgaaagaaaaacaagctgaggcggatgaaagggccacaactaatgcaaatgaggatgatttccctattcaaacatgcattgctattgtggatggaatggaagagctttctgatgatgagaaggttgatgcttatgatgtgtttaaggatgcccaaaaccgggccattttcatgactgccaaagatgctacgcgcataaaatggttgaggaagaagattgcaagaacatgatatgatatatgaagctaaagtaatgaaggatgattttgtagtatcgtccagcataaggaaagaaagctgcaatttgtgctattgtttgatttaagacaaacagagatggatatttaactttagccatgacactacttgtttgcaacttttaagtaatctgttaaattaaagatgagatcttgcagatttttcttattacctaatggattctcttattagctgattcaaatctaatcatgcatattgtagtaaggactatgtatgttgaatcaatgactctggttcaattttaaatatcacatgtgttttaagtttcttaactttatggcttatcttctaatttt

SEQ ID NO: 80672 - DNA, 873 bp, Zea Mays
agagatcctaagctactaactgatcttataaaatatcagtttgtgtacatttgtctcagtgttgctgaattttgcttaatttggcatccagaaactggttcgtcccttcttatattaggccaactattttcaactcaactctgaatgaagcttcagaggcggaacacaagcacaaactactgtccagattgatgaggagccaggttctgatgaagacgacgatcttccaccacttgaagcaaacaccaacaggaatagaccacatgaactaatttctcgacggaataactaattgaatttttttgtccagtgcaagatattagttgtgtaacaaattgttaaattctcacatgtcagatagtggtgcatttcatggcttgatctgtctctttttactctaggccagcggcagacacgtcgcctgcctcccctggcttgctcctggccatctagcgaaggtttagagattgaggctgagtttgggcagacctcatcattgttggtttgtttggtatggagtaagctagcccagggggaaaatagtgaacctggcagatgatggggagtaatgtggcagtgatttctctccctttattatgatgaagttgtggcttgtatcaatgttgtatctgcaatttgaaatatgtatatatgccatgtccgattagcaacacaagacattggaatctccaaatttcacggcattgattcagggtgtacatcatccttatggcttatctggaaatggcttgccatgtttctcaattctctcccagctactacaaccactgcttgtacccttcacgctttcctcaagcacaagaggcaattctagccatcgactcttctcaatgacaagtggcctaaaggctg

SEQ ID NO: 80673 - DNA, 1339 bp, Zea Mays
agagatcctaagctactaactgatcttataaaatatcagtttgtgtacatttgtctcagtgttgctgaattttgcttaatttggcatccagaaactggttcgtcccttcttatattaggccaactattttcaactcaactctgaatgaagcttcagaggcggaacacaagcacaaactactgtccagattgatgaggagccaggttctgatgaagacgacgatcttccaccacttgaagcaaacaccaacaggaatagaccacatgaactaatttctcgacggaataactaattgaatttttttgtccagtgcaagatattagttgtgtaacaaattgttaaattctcacatgtcagatagtggtgcatttcatggcttgatctgtctctttttactctaggccagcggcagacacgtcgcctgcctcccctggcttgctcctggccatctagcgaaggtttagagattgaggctgagtttgggcagacctcatcattgttggtttgtttggtatggagtaagctagcccagggggaaaatagtgaacctggcagatgatggggagtaatgtggcagtgatttctctccctttattatgatgaagttgtggcttgtatcaatgttgtatctgcaatttgaaatatgtatatatgccatgtccgattagcaacacaagacattggaatctccaaatttcacggcattgattcagttctctggccagtagaccggcctactaacttcatttatggacaaaaatcaagggtgtacatcatccttatggcttatctggaaatggcttgccatgtttctcaattctctcccagctactacaaccactgcttgtacccttcacgctttcctcaagccggggtctatgcatgatacaagtgtgttgtataatgcaatgaaggtggacaacaatttcttccagaatcctcccaagaataagttctatgtcgttgatgccggataccccaatagagttgattatctagcatcgtacaaaggcaagaggtatcatttactagaatggcatagaggtatggaacccaaatctctataggagaagtttaatcatattcatgcacgtgcttgaaatattatagaggggcatttggagtatgtaagatgaagtggtaaattctatatataatgtcgttgtatccattgtggaagcaaaaaaatgattggtgtggggactatggtagttcataatttcatttgtgagcatgagagattatgatcctacaataccataatggtacaacaagtattgcatgcactggatggatcaactacattacctaatgcgccaactatggatgttttttgtga

SEQ ID NO: 80674 - DNA, 2349 bp, Zea Mays
aaaaaaatgaagagtctcttggagatgctcttaatccatacgtattattgagatgtattattgagatggattaaagtgtaaattaatttaatttatatttaaatccactcaagattaatcaaacaatttaataagtcgtctggatcagtttatccaaagtttaacaaaaacactgtttttagtgtaaactacacagaaaaactacacagagtgaaatttcggaagcacgcagacccggtcggatccaccggcccgcggaacggatcgaggccaccggcatcctccgcttgcgtcgcattgcggcgccgagctcgaaacccctggatcggttgcagctttcccactgcccccgcccgataacgcggcggtagggtggtggcctgtcgatctcgcggcgggagccggctaactacctgccgttttgtggatttgtgtgcgtgcttgattttggtgcgtgtggtggcgtggagtcgccggcgggggggggggggagctagggttttggtttgggctttcgggatgacgcgccgggtgcggcggcggacgtgcagggaacgggagggtagggtggtgcggggcgcgtggtgtgttgtttcggcgaggccggaaggcgaggacgatgcggcagcggtggaggtggactggagggcgctgccggacgacacggtgctgcagcttttcgcgcggctgaactaccgcgaccgcgccagcatggcctcagcgtgccgggcttggcgagcgctgggctcgtcatcctgcctgtggagcacgctcgacctccgtgcacaccgctacgaccgggaggtggcgtcatcgcttgcctcgcggtgcgggagccttcgtcggttacgcctgcgcggccacgaggcagcagaggccgtcccggccctctgcgcgcatggtctccgcgaggtggtggccgatggctgccgcggcctcacggatgccacgctcgctgtcctcgccgcgcggcatgaggacctccagagcctccagatcgggcccgatcctctcgagcgcatatccagtgacgccctccgccacgtcgctctttgttgctcccaactccgccgcctgcgcctctcgggtctccgtgaagctgacgcggatgccgtcggagcgctcgcccgctgctgccccctcctcgaggacgtggctttcctcgattgcggcaccgtggatgagaccgctcttgctggtatccactctctccgcttcctctctgtagcaggatgccggaacctgaaatgggctactgcatccacctcctggactcagctttcctcccttattgcccttgacgtctcccgcacggatgtttcaccaagtgctgtttcacggctcatttcccatgccaaaaccctcaagcttatatgcacgctgaactgtatttctgttgaggaggaacagcttcataatcctgctgtttttagtaactctaagggcaaggtcgtgctaacgattaacagtgacatctttagatcttttgagaccatgtttccaattgtggatgctaaagagcacggggttttccatcagtgtaactggagtcacaaagacaagatagctggtgatataacaacatggctcgagtggatcctgtcacagtcacttctccgaattgcagagtccaacccacaaggcatggatggtttttggctgcagaagggcaccacactgctgcttagactattgaagagtttgcaggaggatgtgcaggagcgggcagccactgcacttgctacgtttgtagttatggatgacgagactgcaaatgtggatcctgcaaggtcggaggcggtgatgcagaatgggggcatccgaatgttgctggaccttgcaaggtgctcaagggagagcgcacagtctgaagcagcaaaagctattgccaacttgtcagtgaataccaaggttgccaaggcagttgcagatgaaggcggcattacaatactcactgatttagccaagtcgatgaataggcttgttgctgaagaggctgctggtggcctttggaatctctctgtaggcgaggaccacaaggcgtctattgcagtatctggtggtatcaaggccctggtagatctaatatttcgttggcctgctggaaccgatggagttcttgaacgtgctgctggtgcgcttgcaaacctggctgccgacgacaagtgtagcttggaagttgcaaaggctggtggtgtccatgctttggttacacttgctcgatcatgtaaacttgatggcgccctagaacaggctgtgattaaaaagatctcgttcgtcccacgccaaagcgcacttctaaggttccggtcacggtcgcggtcattctcacatgggatacggtgccgc

SEQ ID NO: 80675 - DNA, 3345 bp, Zea Mays
gatcagtttatccaaagtttaacaaaaacactgtttttagtgtaaactacacagaaaaactacacagagtgaaatttcggaagcacgcagacccggtcggatccaccggcccgcggaacggatcgaggccaccggcatcctccgcttgcgtcgcattgcggcgccgagctcgaaacccctggatcggttgcagctttcccactgcccccgcccgataacgcggcggtagggtggtggcctgtcgatctcgcggcgggagccggctaactacctgccgttttgtggatttgtgtgcgtgcttgattttggtgcgtgtggtggcgtggagtcgccggcgggggggggggggagctagggttttggtttgggctttcgggatgacgcgccgggtgcggcggcggacgtgcagggaacgggagggtagggtggtgcggggcgcgtggtgtgttgtttcggcgaggccggaaggcgaggacgatgcggcagcggtggaggtggactggagggcgctgccggacgacacggtgctgcagcttttcgcgcggctgaactaccgcgaccgcgccagcatggcctcagcgtgccgggcttggcgagcgctgggctcgtcatcctgcctgtggagcacgctcgacctccgtgcacaccgctacgaccgggaggtggcgtcatcgcttgcctcgcggtgcgggagccttcgtcggttacgcctgcgcggccacgaggcagcagaggccgtcccggccctctgcgcgcatggtctccgcgaggtggtggccgatggctgccgcggcctcacggatgccacgctcgctgtcctcgccgcgcggcatgaggacctccagagcctccagatcgggcccgatcctctcgagcgcatatccagtgacgccctccgccacgtcgctctttgttgctcccaactccgccgcctgcgcctctcgggtctccgtgaagctgacgcggatgccgtcggagcgctcgcccgctgctgccccctcctcgaggacgtggctttcctcgattgcggcaccgtggatgagaccgctcttgctggtatccactctctccgcttcctctctgtagcaggatgccggaacctgaaatgggctactgcatccacctcctggactcagctttcctcccttattgcccttgacgtctcccgcacggatgtttcaccaagtgctgtttcacggctcatttcccatgccaaaaccctcaagcttatatgcacgctgaactgtatttctgttgaggaggaacagcttcataatcctgctgtttttagtaactctaagggcaaggtcgtgctaacgattaacagtgacatctttagatcttttgagaccatgtttccaattgtggatgctaaagagcacggggttttccatcagtgtaactggagtcacaaagacaagatagctggtgatataacaacatggctcgagtggatcctgtcacagtcacttctccgaattgcagagtccaacccacaaggcatggatggtttttggctgcagaagggcaccacactgctgcttagactattgaagagtttgcaggaggatgtgcaggagcgggcagccactgcacttgctacgtttgtagttatggatgacgagactgcaaatgtggatcctgcaaggtcggaggcggtgatgcagaatgggggcatccgaatgttgctggaccttgcaaggtgctcaagggagagcgcacagtctgaagcagcaaaagctattgccaacttgtcagtgaataccaaggttgccaaggcagttgcagatgaaggcggcattacaatactcactgatttagccaagtcgatgaataggcttgttgctgaagaggctgctggtggcctttggaatctctctgtaggcgaggaccacaaggcgtctattgcagtatctggtggtatcaaggccctggtagatctaatatttcgttggcctgctggaaccgatggagttcttgaacgtgctgctggtgcgcttgcaaacctggctgccgacgacaagtgtagcttggaagttgcaaaggctggtggtgtccatgctttggttacacttgctcgatcatgtaaacttgatggcgccctagaacaggctgcaagaggtctagctaacttagctgcacatggggacaacaatgacaacaatgctgctgtaggtcaggaagctggggctctggaggcactagtgcaactaacaggttctcaaaacgagggtgtaagacaagaagctgctggtgctttgtggaacctgtcatttgatgacagaaaccgtgaagccattgctgcagtgggtggcgttgaagctttggttgccctagtgcaacaatgtttgaatgcttcagaaggccttcaggagagagctgctggtgcattatggggattatctgtttcagaagctaatagcattgcaattgggcagggtggtggggttgcacctttgctcacattggcacgctcagaggttgaagatgttcatgagacagctgcaggggcactatggaatcttgctttttattctggtaatgctctccgcatagtcgaagaaggtggggtgcctgttcttgtaaaaatttgctcatcatcagggtccaagatggcacgcttcatgtctgcactagcactagcatatatgtttgatggaagaatggatgaagttgctttggttggagcatcctcagctagcagttccaagagtgttaatattgaaggagctagaagaatagcatttaagcatatagagacctttgtgctcactttctcagatccacaaatgttctctacggctgctgcctcctcagccccggcagcgctgtctcatgttgctgaagcagtgtttatacaggaagctggacacctgagatgcagtcgctctgagattggtagatttgttgtcatgcttcggaatccttcaccaattcttcgtgcttgtgctgcctttgcccttcttcagttcacaatcccaggaggtcggcatgcggtgcaccacgcaggtctcttgcaggaagcaggagcaggtcgagtgttacgcccagcggcggcagcgacaacagcttctattgaagccaaaatctttgccaggattgtcctcaggaacttggaacaccatcagtcagggacgtcaacatgaacacccagcagaggtgcatcctccaacaaacaaaggcttctgcaacgatgggctgcttggccgatgcagaatggactactttggctttcggagcctttttacatcacaacaacagtttttctgtgcagacagtgactgaagggacttcaccgaagatgtgatctgttcccgagctttgagggattgacgatcaagtttt

SEQ ID NO: 80676 - DNA, 2787 bp, Zea Mays
acagaaaaactacacagagtgaaatttcggaagcacgcagacccggtcggatccaccggcccgcggaacggatcgaggccaccggcatcctccgcttgcgtcgcattgcggcgccgagctcgaaacccctggatcggttgcagctttcccactgcccccgcccgataacgcggcggtagggtggtggcctgtcgatctcgcggcgggagccggctaactacctgccgttttgtggatttgtgtgcgtgcttgattttggtgcgtgtggtggcgtggagtcgccggcgggggggggggggagctagggttttggtttgggctttcgggatgacgcgccgggtgcggcggcggacgtgcagggaacgggagggtagggtggtgcggggcgcgtggtgtgttgtttcggcgaggccggaaggcgaggacgatgcggcagcggtggaggtggactggagggcgctgccggacgacacggtgctgcagcttttcgcgcggctgaactaccgcgaccgcgccagcatggcctcagcgtgccgggcttggcgagcgctgggctcgtcatcctgcctgtggagcacgctcgacctccgtgcacaccgctacgaccgggaggtggcgtcatcgcttgcctcgcggtgcgggagccttcgtcggttacgcctgcgcggccacgaggcagcagaggccgtcccggccctctgcgcgcatggtctccgcgaggtggtggccgatggctgccgcggcctcacggatgccacgctcgctgtcctcgccgcgcggcatgaggacctccagagcctccagatcgggcccgatcctctcgagcgcatatccagtgacgccctccgccacgtcgctctttgttgctcccaactccgccgcctgcgcctctcgggtctccgtgaagctgacgcggatgccgtcggagcgctcgcccgctgctgccccctcctcgaggacgtggctttcctcgattgcggcaccgtggatgagaccgctcttgctggtatccactctctccgcttcctctctgtagcaggatgccggaacctgaaatgggctactgcatccacctcctggactcagctttcctcccttattgcccttgacgtctcccgcacggatgtttcaccaagtgctgtttcacggctcatttcccatgccaaaaccctcaagcttatatgcacgctgaactgtatttctgttgaggaggaacagcttcataatcctgctgtttttagtaactctaagggcaaggtcgtgctaacgattaacagtgacatctttagatcttttgagaccatgtttccaattgtggatgctaaagagcacggggttttccatcagtgtaactggagtcacaaagacaagatagctggtgatataacaacatggctcgagtggatcctgtcacagtcacttctccgaattgcagagtccaacccacaaggcatggatggtttttggctgcagaagggcaccacactgctgcttagactattgaagagtttgcaggaggatgtgcaggagcgggcagccactgcacttgctacgtttgtagttatggatgacgagactgcaaatgtggatcctgcaaggtcggaggcggtgatgcagaatgggggcatccgaatgttgctggaccttgcaaggtgctcaagggagagcgcacagtctgaagcagcaaaagctattgccaacttgtcagtgaataccaaggttgccaaggcagttgcagatgaaggcggcattacaatactcactgatttagccaagtcgatgaataggcttgttgctgaagaggctgctggtggcctttggaatctctctgtaggcgaggaccacaaggcgtctattgcagtatctggtggtatcaaggccctggtagatctaatatttcgttggcctgctggaaccgatggagttcttgaacgtgctgctggtgcgcttgcaaacctggctgccgacgacaagtgtagcttggaagttgcaaaggctggtggtgtccatgctttggttacacttgctcgatcatgtaaacttgatggcgccctagaacaggttgccctagtgcaacaatgtttgaatgcttcagaaggccttcaggagagagctgctggtgcattatggggattatctgtttcagaagctaatagcattgcaattgggcagggtggtggggttgcacctttgctcacattggcacgctcagaggttgaagatgttcatgagacagctgcaggggcactatggaatcttgctttttattctggtaatgctctccgcatagtcgaagaaggtggggtgcctgttcttgtaaaaatttgctcatcatcagggtccaagatggcacgcttcatgtctgcactagcactagcatatatgtttgatggaagaatggatgaagttgctttggttggagcatcctcagctagcagttccaagagtgttaatattgaaggagctagaagaatagcatttaagcatatagagacctttgtgctcactttctcagatccacaaatgttctctacggctgctgcctcctcagccccggcagcgctgtctcatgttgctgaagcagtgtttatacaggaagctggacacctgagatgcagtcgctctgagattggtagatttgttgtcatgcttcggaatccttcaccaattcttcgtgcttgtgctgcctttgcccttcttcaggtttgtttcctttatcccttctcaactgataatgctgtttatcttgtagctctatctagaggcattattgtttgagacatgggc

SEQ ID NO: 80677 - DNA, 2947 bp, Zea Mays
acagaaaaactacacagagtgaaatttcggaagcacgcagacccggtcggatccaccggcccgcggaacggatcgaggccaccggcatcctccgcttgcgtcgcattgcggcgccgagctcgaaacccctggatcggttgcagctttcccactgcccccgcccgataacgcggcggtagggtggtggcctgtcgatctcgcggcgggagccggctaactacctgccgttttgtggatttgtgtgcgtgcttgattttggtgcgtgtggtggcgtggagtcgccggcgggggggggggggagctagggttttggtttgggctttcgggatgacgcgccgggtgcggcggcggacgtgcagggaacgggagggtagggtggtgcggggcgcgtggtgtgttgtttcggcgaggccggaaggcgaggacgatgcggcagcggtggaggtggactggagggcgctgccggacgacacggtgctgcagcttttcgcgcggctgaactaccgcgaccgcgccagcatggcctcagcgtgccgggcttggcgagcgctgggctcgtcatcctgcctgtggagcacgctcgacctccgtgcacaccgctacgaccgggaggtggcgtcatcgcttgcctcgcggtgcgggagccttcgtcggttacgcctgcgcggccacgaggcagcagaggccgtcccggccctctgcgcgcatggtctccgcgaggtggtggccgatggctgccgcggcctcacggatgccacgctcgctgtcctcgccgcgcggcatgaggacctccagagcctccagatcgggcccgatcctctcgagcgcatatccagtgacgccctccgccacgtcgctctttgttgctcccaactccgccgcctgcgcctctcgggtctccgtgaagctgacgcggatgccgtcggagcgctcgcccgctgctgccccctcctcgaggacgtggctttcctcgattgcggcaccgtggatgagaccgctcttgctggtatccactctctccgcttcctctctgtagcaggatgccggaacctgaaatgggctactgcatccacctcctggactcagctttcctcccttattgcccttgacgtctcccgcacggatgtttcaccaagtgctgtttcacggctcatttcccatgccaaaaccctcaagcttatatgcacgctgaactgtatttctgttgaggaggaacagcttcataatcctgctgtttttagtaactctaagggcaaggtcgtgctaacgattaacagtgacatctttagatcttttgagaccatgtttccaattgtggatgctaaagagcacggggttttccatcagtgtaactggagtcacaaagacaagatagctggtgatataacaacatggctcgagtggatcctgtcacagtcacttctccgaattgcagagtccaacccacaaggcatggatggtttttggctgcagaagggcaccacactgctgcttagactattgaagagtttgcaggaggatgtgcaggagcgggcagccactgcacttgctacgtttgtagttatggatgacgagactgcaaatgtggatcctgcaaggtcggaggcggtgatgcagaatgggggcatccgaatgttgctggaccttgcaaggtgctcaagggagagcgcacagtctgaagcagcaaaagctattgccaacttgtcagtgaataccaaggttgccaaggcagttgcagatgaaggcggcattacaatactcactgatttagccaagtcgatgaataggcttgttgctgaagaggctgctggtggcctttggaatctctctgtaggcgaggaccacaaggcgtctattgcagtatctggtggtatcaaggccctggtagatctaatatttcgttggcctgctggaaccgatggagttcttgaacgtgctgctggtgcgcttgcaaacctggctgccgacgacaagtgtagcttggaagttgcaaaggctggtggtgtccatgctttggttacacttgctcgatcatgtaaacttgatggcgccctagaacaggctgcaagaggtctagctaacttagctgcacatggggacaacaatgacaacaatgctgctgtaggtcaggaagctggggctctggaggcactagtgcaactaacaggttctcaaaacgagggtgtaagacaagaagctgctggtgctttgtggaacctgtcatttgatgacagaaaccgtgaagccattgctgcagtgggtggcgttgaagctttggttgccctagtgcaacaatgtttgaatgcttcagaaggccttcaggagagagctgctggtgcattatggggattatctgtttcagaagctaatagcattgcaattgggcagggtggtggggttgcacctttgctcacattggcacgctcagaggttgaagatgttcatgagacagctgcaggggcactatggaatcttgctttttattctggtaatgctctccgcatagtcgaagaaggtggggtgcctgttcttgtaaaaatttgctcatcatcagggtccaagatggcacgcttcatgtctgcactagcactagcatatatgtttgatggaagaatggatgaagttgctttggttggagcatcctcagctagcagttccaagagtgttaatattgaaggagctagaagaatagcatttaagcatatagagacctttgtgctcactttctcagatccacaaatgttctctacggctgctgcctcctcagccccggcagcgctgtctcatgttgctgaagcagtgtttatacaggaagctggacacctgagatgcagtcgctctgagattggtagatttgttgtcatgcttcggaatccttcaccaattcttcgtgcttgtgctgcctttgcccttcttcaggctatggggctgacaagaaggaaatccc

SEQ ID NO: 80678 - DNA, 2938 bp, Zea Mays
acagaaaaactacacagagtgaaatttcggaagcacgcagacccggtcggatccaccggcccgcggaacggatcgaggccaccggcatcctccgcttgcgtcgcattgcggcgccgagctcgaaacccctggatcggttgcagctttcccactgcccccgcccgataacgcggcggtagggtggtggcctgtcgatctcgcggcgggagccggctaactacctgccgttttgtggatttgtgtgcgtgcttgattttggtgcgtgtggtggcgtggagtcgccggcgggggggggggggagctagggttttggtttgggctttcgggatgacgcgccgggtgcggcggcggacgtgcagggaacgggagggtagggtggtgcggggcgcgtggtgtgttgtttcggcgaggccggaaggcgaggacgatgcggcagcggtggaggtggactggagggcgctgccggacgacacggtgctgcagcttttcgcgcggctgaactaccgcgaccgcgccagcatggcctcagcgtgccgggcttggcgagcgctgggctcgtcatcctgcctgtggagcacgctcgacctccgtgcacaccgctacgaccgggaggtggcgtcatcgcttgcctcgcggtgcgggagccttcgtcggttacgcctgcgcggccacgaggcagcagaggccgtcccggccctctgcgcgcatggtctccgcgaggtggtggccgatggctgccgcggcctcacggatgccacgctcgctgtcctcgccgcgcggcatgaggacctccagagcctccagatcgggcccgatcctctcgagcgcatatccagtgacgccctccgccacgtcgctctttgttgctcccaactccgccgcctgcgcctctcgggtctccgtgaagctgacgcggatgccgtcggagcgctcgcccgctgctgccccctcctcgaggacgtggctttcctcgattgcggcaccgtggatgagaccgctcttgctggtatccactctctccgcttcctctctgtagcaggatgccggaacctgaaatgggctactgcatccacctcctggactcagctttcctcccttattgcccttgacgtctcccgcacggatgtttcaccaagtgctgtttcacggctcatttcccatgccaaaaccctcaagcttatatgcacgctgaactgtatttctgttgaggaggaacagcttcataatcctgctgtttttagtaactctaagggcaaggtcgtgctaacgattaacagtgacatctttagatcttttgagaccatgtttccaattgtggatgctaaagagcacggggttttccatcagtgtaactggagtcacaaagacaagatagctggtgatataacaacatggctcgagtggatcctgtcacagtcacttctccgaattgcagagtccaacccacaaggcatggatggtttttggctgcagaagggcaccacactgctgcttagactattgaagagtttgcaggaggatgtgcaggagcgggcagccactgcacttgctacgtttgtagttatggatgacgagactgcaaatgtggatcctgcaaggtcggaggcggtgatgcagaatgggggcatccgaatgttgctggaccttgcaaggtgctcaagggagagcgcacagtctgaagcagcaaaagctattgccaacttgtcagtgaataccaaggttgccaaggcagttgcagatgaaggcggcattacaatactcactgatttagccaagtcgatgaataggcttgttgctgaagaggctgctggtggcctttggaatctctctgtaggcgaggaccacaaggcgtctattgcagtatctggtggtatcaaggccctggtagatctaatatttcgttggcctgctggaaccgatggagttcttgaacgtgctgctggtgcgcttgcaaacctggctgccgacgacaagtgtagcttggaagttgcaaaggctggtggtgtccatgctttggttacacttgctcgatcatgtaaacttgatggcgccctagaacaggctgcaagaggtctagctaacttagctgcacatggggacaacaatgacaacaatgctgctgtaggtcaggaagctggggctctggaggcactagtgcaactaacaggttctcaaaacgagggtgtaagacaagaagctgctggtgctttgtggaacctgtcatttgatgacagaaaccgtgaagccattgctgcagtgggtggcgttgaagctttgtgcaacaatgtttgaatgcttcagaaggccttcaggagagagctgctggtgcattatggggattatctgtttcagaagctaatagcattgcaattgggcagggtggtggggttgcacctttgctcacattggcacgctcagaggttgaagatgttcatgagacagctgcaggggcactatggaatcttgctttttattctggtaatgctctccgcatagtcgaagaaggtggggtgcctgttcttgtaaaaatttgctcatcatcagggtccaagatggcacgcttcatgtctgcactagcactagcatatatgtttgatggaagaatggatgaagttgctttggttggagcatcctcagctagcagttccaagagtgttaatattgaaggagctagaagaatagcatttaagcatatagagacctttgtgctcactttctcagatccacaaatgttctctacggctgctgcctcctcagccccggcagcgctgtctcatgttgctgaagcagtgtttatacaggaagctggacacctgagatgcagtcgctctgagattggtagatttgttgtcatgcttcggaatccttcaccaattcttcgtgcttgtgctgcctttgcccttcttcagggtgctgcaaattcctccgagcaagccga

SEQ ID NO: 80679 - DNA, 2948 bp, Zea Mays
acagaaaaactacacagagtgaaatttcggaagcacgcagacccggtcggatccaccggcccgcggaacggatcgaggccaccggcatcctccgcttgcgtcgcattgcggcgccgagctcgaaacccctggatcggttgcagctttcccactgcccccgcccgataacgcggcggtagggtggtggcctgtcgatctcgcggcgggagccggctaactacctgccgttttgtggatttgtgtgcgtgcttgattttggtgcgtgtggtggcgtggagtcgccggcgggggggggggggagctagggttttggtttgggctttcgggatgacgcgccgggtgcggcggcggacgtgcagggaacgggagggtagggtggtgcggggcgcgtggtgtgttgtttcggcgaggccggaaggcgaggacgatgcggcagcggtggaggtggactggagggcgctgccggacgacacggtgctgcagcttttcgcgcggctgaactaccgcgaccgcgccagcatggcctcagcgtgccgggcttggcgagcgctgggctcgtcatcctgcctgtggagcacgctcgacctccgtgcacaccgctacgaccgggaggtggcgtcatcgcttgcctcgcggtgcgggagccttcgtcggttacgcctgcgcggccacgaggcagcagaggccgtcccggccctctgcgcgcatggtctccgcgaggtggtggccgatggctgccgcggcctcacggatgccacgctcgctgtcctcgccgcgcggcatgaggacctccagagcctccagatcgggcccgatcctctcgagcgcatatccagtgacgccctccgccacgtcgctctttgttgctcccaactccgccgcctgcgcctctcgggtctccgtgaagctgacgcggatgccgtcggagcgctcgcccgctgctgccccctcctcgaggacgtggctttcctcgattgcggcaccgtggatgagaccgctcttgctggtatccactctctccgcttcctctctgtagcaggatgccggaacctgaaatgggctactgcatccacctcctggactcagctttcctcccttattgcccttgacgtctcccgcacggatgtttcaccaagtgctgtttcacggctcatttcccatgccaaaaccctcaagcttatatgcacgctgaactgtatttctgttgaggaggaacagcttcataatcctgctgtttttagtaactctaagggcaaggtcgtgctaacgattaacagtgacatctttagatcttttgagaccatgtttccaattgtggatgctaaagagcacggggttttccatcagtgtaactggagtcacaaagacaagatagctggtgatataacaacatggctcgagtggatcctgtcacagtcacttctccgaattgcagagtccaacccacaaggcatggatggtttttggctgcagaagggcaccacactgctgcttagactattgaagagtttgcaggaggatgtgcaggagcgggcagccactgcacttgctacgtttgtagttatggatgacgagactgcaaatgtggatcctgcaaggtcggaggcggtgatgcagaatgggggcatccgaatgttgctggaccttgcaaggtgctcaagggagagcgcacagtctgaagcagcaaaagctattgccaacttgtcagtgaataccaaggttgccaaggcagttgcagatgaaggcggcattacaatactcactgatttagccaagtcgatgaataggcttgttgctgaagaggctgctggtggcctttggaatctctctgtaggcgaggaccacaaggcgtctattgcagtatctggtggtatcaaggccctggtagatctaatatttcgttggcctgctggaaccgatggagttcttgaacgtgctgctggtgcgcttgcaaacctggctgccgacgacaagtgtagcttggaagttgcaaaggctggtggtgtccatgctttggttacacttgctcgatcatgtaaacttgatggcgccctagaacaggctgcaagaggtctagctaacttagctgcacatggggacaacaatgacaacaatgctgctgtaggtcaggaagctggggctctggaggcactagtgcaactaacaggttctcaaaacgagggtgtaagacaagaagctgctggtgctttgtggaacctgtcatttgatgacagaaaccgtgaagccattgctgcagtgggtggcgttgaagctttggttgccctagtgcaacaatgtttgaatgcttcagaaggccttcaggagagagctgctggtgcattatggggattatctgtttcagaagctaatagcattgcaattgggcagggtggtggggttgcacctttgctcacattggcacgctcagaggttgaagatgttcatgagacagctgcaggggcactatggaatcttgctttttattctggtaatgctctccgcatagtcgaagaaggtggggtgcctgttcttgtaaaaatttgctcatcatcagggtccaagatggcacgcttcatgtctgcactagcactagcatatatgtttgatggaagaatggatgaagttgctttggttggagcatcctcagctagcagttccaagagtgttaatattgaaggagctagaagaatagcatttaagcatatagagacctttgtgctcactttctcagatccacaaatgttctctacggctgctgcctcctcagccccggcagcgctgtctcatgttgctgaagcagtgtttatacaggaagctggacacctgagatgcagtcgctctgagattggtagatttgttgtcatgcttcggaatccttcaccaattcttcgtgcttgtgctgcctttgcccttcttcagggtgctgcaaattcctccgagcaagccga

SEQ ID NO: 80680 - DNA, 3507 bp, Zea Mays
acagaaaaactacacagagtgaaatttcggaagcacgcagacccggtcggatccaccggcccgcggaacggatcgaggccaccggcatcctccgcttgcgtcgcattgcggcgccgagctcgaaacccctggatcggttgcagctttcccactgcccccgcccgataacgcggcggtagggtggtggcctgtcgatctcgcggcgggagccggctaactacctgccgttttgtggatttgtgtgcgtgcttgattttggtgcgtgtggtggcgtggagtcgccggcgggggggggggggagctagggttttggtttgggctttcgggatgacgcgccgggtgcggcggcggacgtgcagggaacgggagggtagggtggtgcggggcgcgtggtgtgttgtttcggcgaggccggaaggcgaggacgatgcggcagcggtggaggtggactggagggcgctgccggacgacacggtgctgcagcttttcgcgcggctgaactaccgcgaccgcgccagcatggcctcagcgtgccgggcttggcgagcgctgggctcgtcatcctgcctgtggagcacgctcgacctccgtgcacaccgctacgaccgggaggtggcgtcatcgcttgcctcgcggtgcgggagccttcgtcggttacgcctgcgcggccacgaggcagcagaggccgtcccggccctctgcgcgcatggtctccgcgaggtggtggccgatggctgccgcggcctcacggatgccacgctcgctgtcctcgccgcgcggcatgaggacctccagagcctccagatcgggcccgatcctctcgagcgcatatccagtgacgccctccgccacgtcgctctttgttgctcccaactccgccgcctgcgcctctcgggtctccgtgaagctgacgcggatgccgtcggagcgctcgcccgctgctgccccctcctcgaggacgtggctttcctcgattgcggcaccgtggatgagaccgctcttgctggtatccactctctccgcttcctctctgtagcaggatgccggaacctgaaatgggctactgcatccacctcctggactcagctttcctcccttattgcccttgacgtctcccgcacggatgtttcaccaagtgctgtttcacggctcatttcccatgccaaaaccctcaagcttatatgcacgctgaactgtatttctgttgaggaggaacagcttcataatcctgctgtttttagtaactctaagggcaaggtcgtgctaacgattaacagtgacatctttagatcttttgagaccatgtttccaattgtggatgctaaagagcacggggttttccatcagtgtaactggagtcacaaagacaagatagctggtgatataacaacatggctcgagtggatcctgtcacagtcacttctccgaattgcagagtccaacccacaaggcatggatggtttttggctgcagaagggcaccacactgctgcttagactattgaagagtttgcaggaggatgtgcaggagcgggcagccactgcacttgctacgtttgtagttatggatgacgagactgcaaatgtggatcctgcaaggtcggaggcggtgatgcagaatgggggcatccgaatgttgctggaccttgcaaggtgctcaagggagagcgcacagtctgaagcagcaaaagctattgccaacttgtcagtgaataccaaggttgccaaggcagttgcagatgaaggcggcattacaatactcactgatttagccaagtcgatgaataggcttgttgctgaagaggctgctggtggcctttggaatctctctgtaggcgaggaccacaaggcgtctattgcagtatctggtggtatcaaggccctggtagatctaatatttcgttggcctgctggaaccgatggagttcttgaacgtgctgctggtgcgcttgcaaacctggctgccgacgacaagtgtagcttggaagttgcaaaggctggtggtgtccatgctttggttacacttgctcgatcatgtaaacttgatggcgccctagaacaggctgcaagaggtctagctaacttagctgcacatggggacaacaatgacaacaatgctgctgtaggtcaggaagctggggctctggaggcactagtgcaactaacaggttctcaaaacgagggtgtaagacaagaagctgctggtgctttgtggaacctgtcatttgatgacagaaaccgtgaagccattgctgcagtgggtggcgttgaagctttggttgccctagtgcaacaatgtttgaatgcttcagaaggccttcaggagagagctgctggtgcattatggggattatctgtttcagaagctaatagcattgcaattgggcagggtggtggggttgcacctttgctcacattggcacgctcagaggttgaagatgttcatgagacagctgcaggggcactatggaatcttgctttttattctgggtccaagatggcacgcttcatgtctgcactagcactagcatatatgtttgatggaagaatggatgaagttgctttggttggagcatcctcagctagcagttccaagagtgttaatattgaaggagctagaagaatagcatttaagcatatagagacctttgtgctcactttctcagatccacaaatgttctctacggctgctgcctcctcagccccggcagcgctgtctcatgttgctgaagcagtgtttatacaggaagctggacacctgagatgcagtcgctctgagattggtagatttgttgtcatgcttcggaatccttcaccaattcttcgtgcttgtgctgcctttgcccttcttcagttcacaatcccaggaggtcggcatgcggtgcaccacgcaggtctcttgcaggaagcaggagcaggtcgagtgttacgcccagcggcggcagcgacaacagcttctattgaagccaaaatctttgccaggattgtcctcaggaacttggaacaccatcagtcagggacgtcaacatgaacacccagcagaggtgcatcctccaacaaacaaaggcttctgcaacgatgggctgcttggccgatgcagaatggactactttggctttcggagcctttttacatcacaacaacagtttttctgtgcagacagtgactgaagggacttcaccgaaggtataacccacaactctgaagtgactgaatgaaacataagtgacggcccttcccgtatcgggcgtttaaggtgaacctgcagttttctagagattattttgtgtataagtaaaaaacttttagcgtcgatgagaattataaactggcatagctaaacttatggatatttattccttgttcgttattgttgaggtgtgtagcggcgtcatgtagaaattgggctattcctcctagtatacatgtaactttataaatgtactgttatgtattttcccccatgattgattctgtgcatttatagatcgaggtgttgttaagcact

SEQ ID NO: 80681 - DNA, 3360 bp, Zea Mays
acagaaaaactacacagagtgaaatttcggaagcacgcagacccggtcggatccaccggcccgcggaacggatcgaggccaccggcatcctccgcttgcgtcgcattgcggcgccgagctcgaaacccctggatcggttgcagctttcccactgcccccgcccgataacgcggcggtagggtggtggcctgtcgatctcgcggcgggagccggctaactacctgccgttttgtggatttgtgtgcgtgcttgattttggtgcgtgtggtggcgtggagtcgccggcgggggggggggggagctagggttttggtttgggctttcgggatgacgcgccgggtgcggcggcggacgtgcagggaacgggagggtagggtggtgcggggcgcgtggtgtgttgtttcggcgaggccggaaggcgaggacgatgcggcagcggtggaggtggactggagggcgctgccggacgacacggtgctgcagcttttcgcgcggctgaactaccgcgaccgcgccagcatggcctcagcgtgccgggcttggcgagcgctgggctcgtcatcctgcctgtggagcacgctcgacctccgtgcacaccgctacgaccgggaggtggcgtcatcgcttgcctcgcggtgcgggagccttcgtcggttacgcctgcgcggccacgaggcagcagaggccgtcccggccctctgcgcgcatggtctccgcgaggtggtggccgatggctgccgcggcctcacggatgccacgctcgctgtcctcgccgcgcggcatgaggacctccagagcctccagatcgggcccgatcctctcgagcgcatatccagtgacgccctccgccacgtcgctctttgttgctcccaactccgccgcctgcgcctctcgggtctccgtgaagctgacgcggatgccgtcggagcgctcgcccgctgctgccccctcctcgaggacgtggctttcctcgattgcggcaccgtggatgagaccgctcttgctggtatccactctctccgcttcctctctgtagcaggatgccggaacctgaaatgggctactgcatccacctcctggactcagctttcctcccttattgcccttgacgtctcccgcacggatgtttcaccaagtgctgtttcacggctcatttcccatgccaaaaccctcaagcttatatgcacgctgaactgtatttctgttgaggaggaacagcttcataatcctgctgtttttagtaactctaagggcaaggtcgtgctaacgattaacagtgacatctttagatcttttgagaccatgtttccaattgtggatgctaaagagcacggggttttccatcagtgtaactggagtcacaaagacaagatagctggtgatataacaacatggctcgagtggatcctgtcacagtcacttctccgaattgcagagtccaacccacaaggcatggatggtttttggctgcagaagggcaccacactgctgcttagactattgaagagtttgcaggaggatgtgcaggagcgggcagccactgcacttgctacgtttgtagttatggatgacgagactgcaaatgtggatcctgcaaggtcggaggcggtgatgcagaatgggggcatccgaatgttgctggaccttgcaaggtgctcaagggagagcgcacagtctgaagcagcaaaagctattgccaacttgtcagtgaataccaaggttgccaaggcagttgcagatgaaggcggcattacaatactcactgatttagccaagtcgatgaataggcttgttgctgaagaggctgctggtggcctttggaatctctctgtaggcgaggaccacaaggctgcaagaggtctagctaacttagctgcacatggggacaacaatgacaacaatgctgctgtaggtcaggaagctggggctctggaggcactagtgcaactaacaggttctcaaaacgagggtgtaagacaagaagctgctggtgctttgtggaacctgtcatttgatgacagaaaccgtgaagccattgctgcagtgggtggcgttgaagctttggttgccctagtgcaacaatgtttgaatgcttcagaaggccttcaggagagagctgctggtgcattatggggattatctgtttcagaagctaatagcattgcaattgggcagggtggtggggttgcacctttgctcacattggcacgctcagaggttgaagatgttcatgagacagctgcaggggcactatggaatcttgctttttattctggtaatgctctccgcatagtcgaagaaggtggggtgcctgttcttgtaaaaatttgctcatcatcagggtccaagatggcacgcttcatgtctgcactagcactagcatatatgtttgatggaagaatggatgaagttgctttggttggagcatcctcagctagcagttccaagagtgttaatattgaaggagctagaagaatagcatttaagcatatagagacctttgtgctcactttctcagatccacaaatgttctctacggctgctgcctcctcagccccggcagcgctgtctcatgttgctgaagcagtgtttatacaggaagctggacacctgagatgcagtcgctctgagattggtagatttgttgtcatgcttcggaatccttcaccaattcttcgtgcttgtgctgcctttgcccttcttcagttcacaatcccaggaggtcggcatgcggtgcaccacgcaggtctcttgcaggaagcaggagcaggtcgagtgttacgcccagcggcggcagcgacaacagcttctattgaagccaaaatctttgccaggattgtcctcaggaacttggaacaccatcagtcagggacgtcaacatgaacacccagcagaggtgcatcctccaacaaacaaaggcttctgcaacgatgggctgcttggccgatgcagaatggactactttggctttcggagcctttttacatcacaacaacagtttttctgtgcagacagtgactgaagggacttcaccgaaggtataacccacaactctgaagtgactgaatgaaacataagtgacggcccttcccgtatcgggcgtttaaggtgaacctgcagttttctagagattattttgtgtataagtaaaaaacttttagcgtcgatgagaattataaactggcatagctaaacttatggatatttattccttgttcgttattgttgaggtgtgtagcggcgtcatgtagaaattgggctattcctcctagtatacatgtaactttataaatgtactgttatgtattttcccccatgattgattctgtgcatttatagatcgaggtgttgttaagcact

SEQ ID NO: 80682 - DNA, 3441 bp, Zea Mays
acagaaaaactacacagagtgaaatttcggaagcacgcagacccggtcggatccaccggcccgcggaacggatcgaggccaccggcatcctccgcttgcgtcgcattgcggcgccgagctcgaaacccctggatcggttgcagctttcccactgcccccgcccgataacgcggcggtagggtggtggcctgtcgatctcgcggcgggagccggctaactacctgccgttttgtggatttgtgtgcgtgcttgattttggtgcgtgtggtggcgtggagtcgccggcgggggggggggggagctagggttttggtttgggctttcgggatgacgcgccgggtgcggcggcggacgtgcagggaacgggagggtagggtggtgcggggcgcgtggtgtgttgtttcggcgaggccggaaggcgaggacgatgcggcagcggtggaggtggactggagggcgctgccggacgacacggtgctgcagcttttcgcgcggctgaactaccgcgaccgcgccagcatggcctcagcgtgccgggcttggcgagcgctgggctcgtcatcctgcctgtggagcacgctcgacctccgtgcacaccgctacgaccgggaggtggcgtcatcgcttgcctcgcggtgcgggagccttcgtcggttacgcctgcgcggccacgaggcagcagaggccgtcccggccctctgcgcgcatggtctccgcgaggtggtggccgatggctgccgcggcctcacggatgccacgctcgctgtcctcgccgcgcggcatgaggacctccagagcctccagatcgggcccgatcctctcgagcgcatatccagtgacgccctccgccacgtcgctctttgttgctcccaactccgccgcctgcgcctctcgggtctccgtgaagctgacgcggatgccgtcggagcgctcgcccgctgctgccccctcctcgaggacgtggctttcctcgattgcggcaccgtggatgagaccgctcttgctggtatccactctctccgcttcctctctgtagcaggatgccggaacctgaaatgggctactgcatccacctcctggactcagctttcctcccttattgcccttgacgtctcccgcacggatgtttcaccaagtgctgtttcacggctcatttcccatgccaaaaccctcaagcttatatgcacgctgaactgtatttctgttgaggaggaacagcttcataatcctgctgtttttagtaactctaagggcaaggtcgtgctaacgattaacagtgacatctttagatcttttgagaccatgtttccaattgtggatgctaaagagcacggggttttccatcagtgtaactggagtcacaaagacaagatagctggtgatataacaacatggctcgagtggatcctgtcacagtcacttctccgaattgcagagtccaacccacaaggcatggatggtttttggctgcagaagggcaccacactgctgcttagactattgaagagtttgcaggaggatgtgcaggagcgggcagccactgcacttgctacgtttgtagttatggatgacgagactgcaaatgtggatcctgcaaggtcggaggcggtgatgcagaatgggggcatccgaatgttgctggaccttgcaaggtgctcaagggagagcgcacagtctgaagcagcaaaagctattgccaacttgtcagtgaataccaaggttgccaaggcagttgcagatgaaggcggcattacaatactcactgatttagccaagtcgatgaataggcttgttgctgaagaggctgctggtggcctttggaatctctctgtaggcgaggaccacaaggcgtctattgcagtatctggtggtatcaaggccctggtagatctaatatttcgttggcctgctggaaccgatggagttcttgctgcaagaggtctagctaacttagctgcacatggggacaacaatgacaacaatgctgctgtaggtcaggaagctggggctctggaggcactagtgcaactaacaggttctcaaaacgagggtgtaagacaagaagctgctggtgctttgtggaacctgtcatttgatgacagaaaccgtgaagccattgctgcagtgggtggcgttgaagctttggttgccctagtgcaacaatgtttgaatgcttcagaaggccttcaggagagagctgctggtgcattatggggattatctgtttcagaagctaatagcattgcaattgggcagggtggtggggttgcacctttgctcacattggcacgctcagaggttgaagatgttcatgagacagctgcaggggcactatggaatcttgctttttattctggtaatgctctccgcatagtcgaagaaggtggggtgcctgttcttgtaaaaatttgctcatcatcagggtccaagatggcacgcttcatgtctgcactagcactagcatatatgtttgatggaagaatggatgaagttgctttggttggagcatcctcagctagcagttccaagagtgttaatattgaaggagctagaagaatagcatttaagcatatagagacctttgtgctcactttctcagatccacaaatgttctctacggctgctgcctcctcagccccggcagcgctgtctcatgttgctgaagcagtgtttatacaggaagctggacacctgagatgcagtcgctctgagattggtagatttgttgtcatgcttcggaatccttcaccaattcttcgtgcttgtgctgcctttgcccttcttcagttcacaatcccaggaggtcggcatgcggtgcaccacgcaggtctcttgcaggaagcaggagcaggtcgagtgttacgcccagcggcggcagcgacaacagcttctattgaagccaaaatctttgccaggattgtcctcaggaacttggaacaccatcagtcagggacgtcaacatgaacacccagcagaggtgcatcctccaacaaacaaaggcttctgcaacgatgggctgcttggccgatgcagaatggactactttggctttcggagcctttttacatcacaacaacagtttttctgtgcagacagtgactgaagggacttcaccgaaggtataacccacaactctgaagtgactgaatgaaacataagtgacggcccttcccgtatcgggcgtttaaggtgaacctgcagttttctagagattattttgtgtataagtaaaaaacttttagcgtcgatgagaattataaactggcatagctaaacttatggatatttattccttgttcgttattgttgaggtgtgtagcggcgtcatgtagaaattgggctattcctcctagtatacatgtaactttataaatgtactgttatgtattttcccccatgattgattctgtgcatttatagatcgaggtgttgttaagcact

SEQ ID NO: 80683 - DNA, 3347 bp, Zea Mays
acagaaaaactacacagagtgaaatttcggaagcacgcagacccggtcggatccaccggcccgcggaacggatcgaggccaccggcatcctccgcttgcgtcgcattgcggcgccgagctcgaaacccctggatcggttgcagctttcccactgcccccgcccgataacgcggcggtagggtggtggcctgtcgatctcgcggcgggagccggctaactacctgccgttttgtggatttgtgtgcgtgcttgattttggtgcgtgtggtggcgtggagtcgccggcgggggggggggggagctagggttttggtttgggctttcgggatgacgcgccgggtgcggcggcggacgtgcagggaacgggagggtagggtggtgcggggcgcgtggtgtgttgtttcggcgaggccggaaggcgaggacgatgcggcagcggtggaggtggactggagggcgctgccggacgacacggtgctgcagcttttcgcgcggctgaactaccgcgaccgcgccagcatggcctcagcgtgccgggcttggcgagcgctgggctcgtcatcctgcctgtggagcacgctcgacctccgtgcacaccgctacgaccgggaggtggcgtcatcgcttgcctcgcggtgcgggagccttcgtcggttacgcctgcgcggccacgaggcagcagaggccgtcccggccctctgcgcgcatggtctccgcgaggtggtggccgatggctgccgcggcctcacggatgccacgctcgctgtcctcgccgcgcggcatgaggacctccagagcctccagatcgggcccgatcctctcgagcgcatatccagtgacgccctccgccacgtcgctctttgttgctcccaactccgccgcctgcgcctctcgggtctccgtgaagctgacgcggatgccgtcggagcgctcgcccgctgctgccccctcctcgaggacgtggctttcctcgattgcggcaccgtggatgagaccgctcttgctggtatccactctctccgcttcctctctgtagcaggatgccggaacctgaaatgggctactgcatccacctcctggactcagctttcctcccttattgcccttgacgtctcccgcacggatgtttcaccaagtgctgtttcacggctcatttcccatgccaaaaccctcaagcttatatgcacgctgaactgtatttctgttgaggaggaacagcttcataatcctgctgtttttagtaactctaagggcaaggtcgtgctaacgattaacagtgacatctttagatcttttgagaccatgtttccaattgtggatgctaaagagcacggggttttccatcagtgtaactggagtcacaaagacaagatagctggtgatataacaacatggctcgagtggatcctgtcacagtcacttctccgaattgcagagtccaacccacaaggcatggatggtttttggctgcagaagggcaccacactgctgcttagactattgaagagtttgcaggaggatgtgcaggagcgggcagccactgcacttgctacgtttgtagttatggatgacgagactgcaaatgtggatcctgcaaggtcggaggcggtgatgcagaatgggggcatccgaatgttgctggaccttgcaaggtgctcaagggagagcgcacagtctgaagcagcaaaagctattgccaacttgtcagtgaataccaaggttgccaaggcagttgcagatgaaggcggcattacaatactcactgatttagccaagtcgatgaataggcttgttgctgaagaggctgctggtggcctttggaatctctctgtaggcgaggaccacaaggctgcaagaggtctagctaacttagctgcacatggggacaacaatgacaacaatgctgctgtaggtcaggaagctggggctctggaggcactagtgcaactaacaggttctcaaaacgagggtgtaagacaagaagctgctggtgctttgtggaacctgtcatttgatgacagaaaccgtgaagccattgctgcagtgggtggcgttgaagctttggttgccctagtgcaacaatgtttgaatgcttcagaaggccttcaggagagagctgctggtgcattatggggattatctgtttcagaagctaatagcattgcaattgggcagggtggtggggttgcacctttgctcacattggcacgctcagaggttgaagatgttcatgagacagctgcaggggcactatggaatcttgctttttattctggtaatgctctccgcatagtcgaagaaggtggggtgcctgttcttgtaaaaatttgctcatcatcagggtccaagatggcacgcttcatgtctgcactagcactagcatatatgtttgatggaagaatggatgaagttgctttggttggagcatcctcagctagcagttccaagagtgttaatattgaaggagctagaagaatagcatttaagcatatagagacctttgtgctcactttctcagatccacaaatgttctctacggctgctgcctcctcagccccggcagcgctgtctcatgttgctgaagcagtgtttatacaggaagctggacacctgagatgcagtcgctctgagattggtagatttgttgtcatgcttcggaatccttcaccaattcttcgtgcttgtgctgcctttgcccttcttcaggaggtcggcatgcggtgcaccacgcaggtctcttgcaggaagcaggagcaggtcgagtgttacgcccagcggcggcagcgacaacagcttctattgaagccaaaatctttgccaggattgtcctcaggaacttggaacaccatcagtcagggacgtcaacatgaacacccagcagaggtgcatcctccaacaaacaaaggcttctgcaacgatgggctgcttggccgatgcagaatggactactttggctttcggagcctttttacatcacaacaacagtttttctgtgcagacagtgactgaagggacttcaccgaaggtataacccacaactctgaagtgactgaatgaaacataagtgacggcccttcccgtatcgggcgtttaaggtgaacctgcagttttctagagattattttgtgtataagtaaaaaacttttagcgtcgatgagaattataaactggcatagctaaacttatggatatttattccttgttcgttattgttgaggtgtgtagcggcgtcatgtagaaattgggctattcctcctagtatacatgtaactttataaatgtactgttatgtattttcccccatgattgattctgtgcatttatagatcgaggtgttgttaagcact

SEQ ID NO: 80684 - DNA, 329 bp, Zea Mays
catttcctcctccgctagatgcgtccatggcttcgatgtgatctgttcccgagcttcgagggattgacgatcaagttttggcggccaagtgatcaagcttttcaagatctacaaggttgaagaccctgagcactcgtttggtgaaggcaagtgtcctctgacctattatgtcccatttactttataattcatcaaccgcataccatgatcaacttaaggattgactagctttgtatttacctcacccttgattaccttttgggctactatggttagcttcatgctattgctttactctaatcaatgaacatgatgagatacaatgatga

SEQ ID NO: 80685 - DNA, 344 bp, Zea Mays
cacgcgctggagcgggcttcgccatctctcccaccgtgctacgtcgcaagatgtgatctgttcccgagcttcgagggattgacgatcaagttttggcggccaagtgatcaagcttttcaagatctacaaggttgaagaccctgagcactcgtttggtgaaggcaagtgtcctctgacctattatgtcccatttactttataattcatcaaccgcataccatgatcaacttaaggattgactagctttgtatttacctcacccttgattaccttttgggctactatggttagcttcatgctattgctttactctaatcaatgaacatgatgagatacaatgatga

SEQ ID NO: 80686 - DNA, 2521 bp, Zea Mays
acaaaatgtgcgtaaataagagcaagagcagctcactcacacagtcacactcacactcctcgctctctcactggagtggggaacaactgaggccagcggaaaccagagaggggagggagatcatagcagtggggcagtttgagagctcgccgatctgctgcggggatggggtgcacggcgtccaaggtggagcaggaggacacggtccggcgctgcaaggagcgccgccgccacatgaaggacgcggtggcggcgcgccaactgctagcctccgcgcacgccgactaccttcgctccctccgcgtcaccgccgccgcgctctcgcgcttcgcgcagggccacccctcgctcgccgtttcgcaccacactgcccccgtcctcctctccgccgccgcgccgccgcccgcccccatcgccgtccatgcgttccccacaccggcgccctccaccgctgcgtcgtcatcgctcccgcctccgacgccgctcgtccagcgcccacacccgccgccccagccgcccacggcggcggcgatggcggcgccgcagccggcgctggcgagggcaccacgcccacggcggctcagggtgccccacatcctgtcggactccagcgtgaccagccccgcgcagccgtcattccgcaagcagccgccagtgggaacaccatcctcctcgtccgcatgggactgggagaacttctacccgccgtcgccgccagactccgagttcttcgaccgccggaaggccgaggtcgagcaggccagccgcctccgggagctcgaggaggaggagaaggcccgagcctacctccaccatcacacccactacaacctcaaggaagaagacgaggccgctgaagacgacgacggtgaggtggaccatgaaccagatgggatgcattccggcggatgggaggacgacgagcactacgcgtccacgaccacgtcggagaccagatcggacgaggagggcgagatgggggacagatcggaatgcgggttcgcggccagatcagagtgcgggttcgtggccagatcggagtacggcgggacggcaccgtcagagtacgccgccgtaccattgcccctgaggagggatgaaaggtcggaggctggcgacttctccactgtcatggcggcgacagagatgcggatggtggtgcgtcatcgcaccctcgcggaaatcgtggcggccattgaggagtactttgtcaaggcagccgactccggcaacgatgtgtccgagcttctggaggccagccgcgcacaactcgaccgcaacttccggcagcttaaaaagacgggttaccattccaacagcgtgctatcagcattctcatcgacgtggacgtcaaaaccgccattggctgtacgatacaagttggacactaatgcactggagatggagtcaacggaagggaagagtcatggatccactctagagcggcttttggcttgggagaagaagctctacgaggaggtcaaggcaagggagagtgtgaagattgagcatgagaaaaagctttctactctgcagagcctggaatacaaagggagggatagtgcaaagctggataagaccaaggcctccataaacaagctgcaatcactgattgttgttacctctcaggctgccacaactacatcatcagccatcgttagagtccgtgacaatgagcttgcaccacagcttgttcagctctgttttgcgctattgggcatgtggaggtcaatgaaccatttccatgagatacagaatgagattgttcagcaagtccgtggtctggtggacagctccatggctgagtcaacatctgacctccacaggcttgcaactcgtgaccttgaggctgctgttgcggcgtggcactccaacttcgaccgcctcatcaagtatcagcgcgactacatccgctctctgtatggctggctgaagctcacactctgccaggtggatagctgtgtgccacagggagcccatgcctcgatgatctcgcgcgaactcaccagcttctgtgacgagtggaagcaagcactagaccgtcttccagacgctgttgcttcggaggcgatcaagagctttgtgaacgttgtccatgtcatctacgccaagcaggcagaggagatgaaggtgaagaagcgggcagaggcatactcgaaggagctagaaaagaaaaccaactcgctcaggtccgtcgagaagaagtactaccagtcctactcgatggtcggccttggccttcctggcagcggcgggcacggtggcattgacagccacgcgtacgacgcccgtgatcctcttgcggagaagaaaaccgagatcgcccagtgccgtcggaaggtggaggacgagatggcgaggcacgctaaggccatcgaggtcacgcggtcaatgacgctgaacaacatccagacaggcctgccgggtatattccaagccatagctggtttctcagggacagtggttgaagctcttgacgtggtgtgccgccgagctgggtcagtgcgaagtccgggttgtg

SEQ ID NO: 80687 - DNA, 605 bp, Zea Mays
ctcacgaggacgttctccggcttcaggtctctgtagaccaccccaagcatgtgcaggtactccagcgcaaggagcacttctgcggcgtaaaacctggcaaaaacagaaagaatcacacacatcgaaactgtgtgacactacatatttcgcgcgaccaaaatctaactgacagaacattaggtgaactgaatctgcatgactgtactgtatttgtaatctttagattaggaaaaacacgcatggctattgacgaccatctcgtttattcaaagctccacattctggcacacaatggtctgaaatttgcatgttgttgaatacattcacgaatagttcaagaagcaattgatgaatatgtgcaaatgaggcattagaagttatgtctatccaaatcgaggaatcaagctttaacccaactgttcaaattactgcaactctaattcatagagacaaagcactataaaagcagtagaagtcggtatggattaaagtcaaacaaatagtcacaacatgagacatgcattaaatattgtgtctatgttaatttaggcatcaatttcttaagcaagacagaaacaacgaggaaaacatagcactctttttat

SEQ ID NO: 80688 - DNA, 1767 bp, Zea Mays
aacacctcaaagtatataataccacagtattactcaatactatagtattgctttaatactgcagaaaaactttgttccaaacacccccttaacctctaaacttatagccttttttaacttagcctagagaaaccaaacagaccgttagtgttctatgtagtcatgttagagtatgtgggtacgggattgggagcgatgttaaaaaataggaaagaccattttttatagtaacaaaattgtttcaaaattcatataactgtattcagcaaaaaaaaataacccacagccgcaagcctgcaactgcaactgaaaagcaaagattacaccagaatagtgcagcaatggatacatgtttctctgtatgacgattgacccacgtcatatacaccacaaacaactgtttgcgattccaaaacaacatcaccggtctgaagcgaagaatgaaacaggacgggatgagtaccttgccgcgtgctctgggaagtgcttgccgggctgtcgctgccggagcacgtggaggtcgccgccggggcagaactccatgacaaggcaggcgaaccggtcggtctcaaagtgcgcgtacagagtgggcaagaacgggtggtccagcagctggaggatctcccgctccgtctgcgcgcgactcagcttccgccggctctccagcgacgccttgtccatcaccttcatcgcgaaccagcagggccttgccacgtcgccatttccggggcctcccccgctgagctccgacaggtacaccgtcccgatgtcgccgcacccgagcctccgcagcagccggaagctgcccatcgcgaggggtccctcgcgcgcgcgcgccgcgaggatggccttccacctggggtcgccgcccttgtgcggcttccccgcgctgccgccgcagccgctgctggtgccgttgctccagccgctgccgtcgctggccgcgctgctgctgacgctggtcttggcgctgcggctggtgacggtgcagctcggcgcgatgctggtgaccgtggccgtggcgccggagctgtcgatgctgctgtctgggctcgccgcgccgctcggcggcctggacgcgtcccacgagatgactggcttcgggaccggcttctcccggccgtcgacagcgacaaagacggtgtccgtctcgtccactggctccggcgggtggctcgccccggagaaggagctcctcggcggcgcgtatccgtccgcctcgtcgtccctggacgcaatgctaatcctgaccttgtcgaactcgaactcaagaaccttctccgtcaccttaccgtctccgttccttgccccgccgccgccgacgggaacgccgcccatctggagctcgaacgcctccgggatgaaccgaaactggaagtcctggtactcagtatcggatcccggatccaggggcgcctccagcacctgggtgcggaagtgcgtgtgcgttctcgtttgatgtttggcgtgctgtgagcgcgacggctgcattgagagtgtgtggatgtaaccgacaaaagaggttggggaagtgacaggaggtgcagtggtggagagggaaaggacaggacaggacagctcgtagcagaggagagaaagaacgcgtgttctccgggctggtggccgtctgggtccgggccgaggaggaagacacagcggcagcagaggcagccgggcagaggcgcagaggagagcaatagagcagtactgtactagcgttgtcttttgctttgctaggcgtattcgctgctaagattaacgttattt

SEQ ID NO: 80689 - DNA, 1166 bp, Zea Mays
ggatcaagctgtccagcccggattaaacaagtagtgatccgtgacctcccctcctccggcctcctgtcgccggcgtccgtcgctcgttgtcgagcccccgggagcaaaggcttccgccgcctgcgttccggatggagaatcccttcagcgtgaaggtgctgcaggtattcacaggtttcggcgtaggatgcggcgtcggcatcggcgtcggacgacccatctacctaggtatgatacctgggcttcagcaagttatgagtgctacaaggggagcaacagatgctttttctggtgtcacaaggcatgtcaattccgcgctaaggacggctggattaaagaacatcgaagcagggattggctgtggagttggtataggccatggttttggaataggaattgcattaaagccacgggtgcttcatggaattcagtcatctgttggggatccactgttccagaatgatacaaaggtggacttcagagatgccgtacgcacgaaaacattcttaaatcctggaaatttgcatggaatggatagtgtacttcagttggtactgaagcaccaaaaggttattgaggaactgcaggaggaaaacgaaaatctgcgtcagattctgatagaggaacttaagatttcaccaaccaaattacaaataggtcataaaaatggagtgaaggcctactatccatgctcggactgctttgaatgtcgccgcagaagtcggagaacaaccagatagcagtgggcattgccgttctttggttgagcaaaattttggtcgtttgttcagtagcttacagctgttgattttattagaacgatatcctctttgagaacctgcagatgagctctgattgttcagtacaactgtcattactggttttcattagctgtgtggaggcaggggagcactggctggagcgtttgcacccccccccccccccccccccccaaaaaaaaaaatgcataactcattgttcttaagtctgaatctacgaaggacacggtgctcttgtcgcccttcgatccagatctacttatgcacgattgtactaatcttgtaactggagtcatgtgttacgcagtgctgtaccgtatggtgtatgtatgctactctgtgcaataccgacgcacagatttgaaatagcaaggtagccattcagag

SEQ ID NO: 80690 - DNA, 1414 bp, Zea Mays
ggatcaagctgtccagcccggattaaacaagtagtgatccgtgacctcccctcctccggcctcctgtcgccggcgtccgtcgctcgttgtcgagcccccgggagcaaaggcttccgccgcctgcgttccggatggagaatcccttcagcgtgaaggtgctgcaggtatgatacctgggcttcagcaagttatgagtgctacaaggggagcaacagatgctttttctggtgtcacaaggcatgtcaattccgcgctaaggacggctggattaaagaacatcgaagcagggattggctgtggagttggtataggccatggttttggaataggaattgcattaaagccacgggtgcttcatggaattcagtcatctgttggggtacaaatatgaactgtagtttgccccaaattttctctctttcatttttcagtgcattaacattgatagtattagtttcccccctaggaaattatgtctaaatggacatcaaagctaaaagatacccctgagacgccgtcttcgtcaaatcctatggttcattctttgtctagcaatgaacaaactcacaacagcatgtcgatggatctagaggctaaggatgcagaaagtaatttgaaccaaacttcaagttatgaaatgtcaaaagtgcaatctactcagccggaagcattgactgtaagtcgaaccaaaaaggtcattgccaattttctacaggatccactgttccagaatgatacaaaggtggacttcagagatgcccctggaaatttgcatggaatggatagtgtacttcagttggtactgaagcaccaaaaggttattgaggaactgcaggaggaaaacgaaaatctgcgtcagattctgatagaggaacttaagatttcaccaaccaaattacaaataggtcataaaaatggagtgaaggcctactatccatgctcggactgctttgaatgtcgccgcagaagtcggagaacaaccagatagcagtgggcattgccgttctttggttgagcaaaattttggtcgtttgttcagtagcttacagctgttgattttattagaacgatatcctctttgagaacctgcagatgagctctgattgttcagtacaactgtcattactggttttcattagctgtgtggaggcaggggagcactggctggagcgtttgcacccccccccccccccccccccccaaaaaaaaaaatgcataactcattgttcttaagtctgaatctacgaaggacacggtgctcttgtcgcccttcgatccagatctacttatgcacgattgtactaatcttgtaactggagtcatgtgttacgcagtgctgtaccgtatggtgtatgtatgctactctgtgcaataccgacgcacagatttgaaatagcaaggtagccattcagag

SEQ ID NO: 80691 - DNA, 1415 bp, Zea Mays
ggatcaagctgtccagcccggattaaacaagtagtgatccgtgacctcccctcctccggcctcctgtcgccggcgtccgtcgctcgttgtcgagcccccgggagcaaaggcttccgccgcctgcgttccggatggagaatcccttcagcgtgaaggtgctgcaggtattcacaggtttcggcgtaggatgcggcgtcggcatcggcgtcggacgacccatctacctaggtatgatacctgggcttcagcaagttatgagtgctacaaggggagcaacagatgctttttctggtgtcacaaggcatgtcaattccgcgctaaggacggctggattaaagaacatcgaagcagggattggctgtggagttggtataggccatggttttggaataggaattgcattaaagccacgggtgcttcatggaattcagtcatctgttggggaaattatgtctaaatggacatcaaagctaaaagatacccctgagacgccgtcttcgtcaaatcctatggttcattctttgtctagcaatgaacaaactcacaacagcatgtcgatggatctagaggctaaggatgcagaaagtaatttgaaccaaacttcaagttatgaaatgtcaaaagtgcaatctactcagccggaagcattgactgtaagtcgaaccaaaaaggtcattgccaattttctacaggatccactgttccagaatgatacaaaggtggacttcagagatgccgtacgcacgaaaacattcttaaatcctggaaatttgcatggaatggatagtgtacttcagttggtactgaagcaccaaaaggttattgaggaactgcaggaggaaaacgaaaatctgcgtcagattctgatagaggaacttaagatttcaccaaccaaattacaaataggtcataaaaatggagtgaaggcctactatccatgctcggactgctttgaatgtcgccgcagaagtcggagaacaaccagatagcagtgggcattgccgttctttggttgagcaaaattttggtcgtttgttcagtagcttacagctgttgattttattagaacgatatcctctttgagaacctgcagatgagctctgattgttcagtacaactgtcattactggttttcattagctgtgtggaggcaggggagcactggctggagcgtttgcacccccccccccccccccccccccaaaaaaaaaaatgcataactcattgttcttaagtctgaatctacgaaggacacggtgctcttgtcgcccttcgatccagatctacttatgcacgattgtactaatcttgtaactggagtcatgtgttacgcagtgctgtaccgtatggtgtatgtatgctactctgtgcaataccgacgcacagatttgaaatagcaaggtagccattcagag

SEQ ID NO: 80692 - DNA, 1794 bp, Zea Mays
ggatcaagctgtccagcccggattaaacaagtagtgatccgtgacctcccctcctccggcctcctgtcgccggcgtccgtcgctcgttgtcgagcccccgggagcaaaggcttccgccgcctgcgttccggatggagaatcccttcagcgtgaaggtgctgcaggtattcacaggtttcggcgtaggatgcggcgtcggcatcggcgtcggacgacccatctacctaggtaacgggttctggagtaccttattctcgtttaggtgactgagatgggttcagagaagtcgaatcagtttatcagtcataggtaggtggcgtgttctttgggtttggatttcgtggaacagttgactgtcgaagtgggggctgtctcctcactgactgtggtattccgtcgaacagttcgtgctgtgtgtaaattaatcgagcaaagctatatattttgagatggagattactgcgtttggaaatatataaccatgtgtatgattcgtgcttgtaactttggtacctgcatgtcaaatgcagtcgtgagcttgctaaattgtcttagggcaatgaattagtttcatgatcaacttcttgtctaagaggttagcttctgtactgatggccaggtatgatacctgggcttcagcaagttatgagtgctacaaggggagcaacagatgctttttctggtgtcacaaggcatgtcaattccgcgctaaggacggctggattaaagaacatcgaagcagggattggctgtggagttggtataggccatggttttggaataggaattgcattaaagccacgggtgcttcatggaattcagtcatctgttgggtttcccccctaggaaattatgtctaaatggacatcaaagctaaaagatacccctgagacgccgtcttcgtcaaatcctatggttcattctttgtctagcaatgaacaaactcacaacagcatgtcgatggatctagaggctaaggatgcagaaagtaatttgaaccaaacttcaagttatgaaatgtcaaaagtgcaatctactcagccggaagcattgactgtaagtcgaaccaaaaaggtcattgccaattttctacaggatccactgttccagaatgatacaaaggtggacttcagagatgcccctggaaatttgcatggaatggatagtgtacttcagttggtactgaagcaccaaaaggttattgaggaactgcaggaggaaaacgaaaatctgcgtcagattctgatagaggaacttaagatttcaccaaccaaattacaaataggtcataaaaatggagtgaaggcctactatccatgctcggactgctttgaatgtcgccgcagaagtcggagaacaaccagatagcagtgggcattgccgttctttggttgagcaaaattttggtcgtttgttcagtagcttacagctgttgattttattagaacgatatcctctttgagaacctgcagatgagctctgattgttcagtacaactgtcattactggttttcattagctgtgtggaggcaggggagcactggctggagcgtttgcacccccccccccccccccccccccaaaaaaaaaaatgcataactcattgttcttaagtctgaatctacgaaggacacggtgctcttgtcgcccttcgatccagatctacttatgcacgattgtactaatcttgtaactggagtcatgtgttacgcagtgctgtaccgtatggtgtatgtatgctactctgtgcaataccgacgcacagatttgaaatagcaaggtagccattcagag

SEQ ID NO: 80693 - DNA, 1818 bp, Zea Mays
ggatcaagctgtccagcccggattaaacaagtagtgatccgtgacctcccctcctccggcctcctgtcgccggcgtccgtcgctcgttgtcgagcccccgggagcaaaggcttccgccgcctgcgttccggatggagaatcccttcagcgtgaaggtgctgcaggtattcacaggtttcggcgtaggatgcggcgtcggcatcggcgtcggacgacccatctacctaggtaacgggttctggagtaccttattctcgtttaggtgactgagatgggttcagagaagtcgaatcagtttatcagtcataggtaggtggcgtgttctttgggtttggatttcgtggaacagttgactgtcgaagtgggggctgtctcctcactgactgtggtattccgtcgaacagttcgtgctgtgtgtaaattaatcgagcaaagctatatattttgagatggagattactgcgtttggaaatatataaccatgtgtatgattcgtgcttgtaactttggtacctgcatgtcaaatgcagtcgtgagcttgctaaattgtcttagggcaatgaattagtttcatgatcaacttcttgtctaagaggttagcttctgtactgatggccaggtatgatacctgggcttcagcaagttatgagtgctacaaggggagcaacagatgctttttctggtgtcacaaggcatgtcaattccgcgctaaggacggctggattaaagaacatcgaagcagggattggctgtggagttggtataggccatggttttggaataggaattgcattaaagccacgggtgcttcatggaattcagtcatctgttgggtttcccccctaggaaattatgtctaaatggacatcaaagctaaaagatacccctgagacgccgtcttcgtcaaatcctatggttcattctttgtctagcaatgaacaaactcacaacagcatgtcgatggatctagaggctaaggatgcagaaagtaatttgaaccaaacttcaagttatgaaatgtcaaaagtgcaatctactcagccggaagcattgactgtaagtcgaaccaaaaaggtcattgccaattttctacaggatccactgttccagaatgatacaaaggtggacttcagagatgccgtacgcacgaaaacattcttaaatcctggaaatttgcatggaatggatagtgtacttcagttggtactgaagcaccaaaaggttattgaggaactgcaggaggaaaacgaaaatctgcgtcagattctgatagaggaacttaagatttcaccaaccaaattacaaataggtcataaaaatggagtgaaggcctactatccatgctcggactgctttgaatgtcgccgcagaagtcggagaacaaccagatagcagtgggcattgccgttctttggttgagcaaaattttggtcgtttgttcagtagcttacagctgttgattttattagaacgatatcctctttgagaacctgcagatgagctctgattgttcagtacaactgtcattactggttttcattagctgtgtggaggcaggggagcactggctggagcgtttgcacccccccccccccccccccccccaaaaaaaaaaatgcataactcattgttcttaagtctgaatctacgaaggacacggtgctcttgtcgcccttcgatccagatctacttatgcacgattgtactaatcttgtaactggagtcatgtgttacgcagtgctgtaccgtatggtgtatgtatgctactctgtgcaataccgacgcacagatttgaaatagcaaggtagccattcagag

SEQ ID NO: 80694 - DNA, 1782 bp, Zea Mays
ggatcaagctgtccagcccggattaaacaagtagtgatccgtgacctcccctcctccggcctcctgtcgccggcgtccgtcgctcgttgtcgagcccccgggagcaaaggcttccgccgcctgcgttccggatggagaatcccttcagcgtgaaggtgctgcaggtattcacaggtttcggcgtaggatgcggcgtcggcatcggcgtcggacgacccatctacctaggtaacgggttctggagtaccttattctcgtttaggtgactgagatgggttcagagaagtcgaatcagtttatcagtcataggtaggtggcgtgttctttgggtttggatttcgtggaacagttgactgtcgaagtgggggctgtctcctcactgactgtggtattccgtcgaacagttcgtgctgtgtgtaaattaatcgagcaaagctatatattttgagatggagattactgcgtttggaaatatataaccatgtgtatgattcgtgcttgtaactttggtacctgcatgtcaaatgcagtcgtgagcttgctaaattgtcttagggcaatgaattagtttcatgatcaacttcttgtctaagaggttagcttctgtactgatggccaggtatgatacctgggcttcagcaagttatgagtgctacaaggggagcaacagatgctttttctggtgtcacaaggcatgtcaattccgcgctaaggacggctggattaaagaacatcgaagcagggattggctgtggagttggtataggccatggttttggaataggaattgcattaaagccacgggtgcttcatggaattcagtcatctgttggggaaattatgtctaaatggacatcaaagctaaaagatacccctgagacgccgtcttcgtcaaatcctatggttcattctttgtctagcaatgaacaaactcacaacagcatgtcgatggatctagaggctaaggatgcagaaagtaatttgaaccaaacttcaagttatgaaatgtcaaaagtgcaatctactcagccggaagcattgactgtaagtcgaaccaaaaaggtcattgccaattttctacaggatccactgttccagaatgatacaaaggtggacttcagagatgcccctggaaatttgcatggaatggatagtgtacttcagttggtactgaagcaccaaaaggttattgaggaactgcaggaggaaaacgaaaatctgcgtcagattctgatagaggaacttaagatttcaccaaccaaattacaaataggtcataaaaatggagtgaaggcctactatccatgctcggactgctttgaatgtcgccgcagaagtcggagaacaaccagatagcagtgggcattgccgttctttggttgagcaaaattttggtcgtttgttcagtagcttacagctgttgattttattagaacgatatcctctttgagaacctgcagatgagctctgattgttcagtacaactgtcattactggttttcattagctgtgtggaggcaggggagcactggctggagcgtttgcacccccccccccccccccccccccaaaaaaaaaaatgcataactcattgttcttaagtctgaatctacgaaggacacggtgctcttgtcgcccttcgatccagatctacttatgcacgattgtactaatcttgtaactggagtcatgtgttacgcagtgctgtaccgtatggtgtatgtatgctactctgtgcaataccgacgcacagatttgaaatagcaaggtagccattcagag

SEQ ID NO: 80695 - DNA, 1427 bp, Zea Mays
ggatcaagctgtccagcccggattaaacaagtagtgatccgtgacctcccctcctccggcctcctgtcgccggcgtccgtcgctcgttgtcgagcccccgggagcaaaggcttccgccgcctgcgttccggatggagaatcccttcagcgtgaaggtgctgcaggtattcacaggtttcggcgtaggatgcggcgtcggcatcggcgtcggacgacccatctacctaggtatgatacctgggcttcagcaagttatgagtgctacaaggggagcaacagatgctttttctggtgtcacaaggcatgtcaattccgcgctaaggacggctggattaaagaacatcgaagcagggattggctgtggagttggtataggccatggttttggaataggaattgcattaaagccacgggtgcttcatggaattcagtcatctgttgggtttcccccctaggaaattatgtctaaatggacatcaaagctaaaagatacccctgagacgccgtcttcgtcaaatcctatggttcattctttgtctagcaatgaacaaactcacaacagcatgtcgatggatctagaggctaaggatgcagaaagtaatttgaaccaaacttcaagttatgaaatgtcaaaagtgcaatctactcagccggaagcattgactgtaagtcgaaccaaaaaggtcattgccaattttctacaggatccactgttccagaatgatacaaaggtggacttcagagatgccgtacgcacgaaaacattcttaaatcctggaaatttgcatggaatggatagtgtacttcagttggtactgaagcaccaaaaggttattgaggaactgcaggaggaaaacgaaaatctgcgtcagattctgatagaggaacttaagatttcaccaaccaaattacaaataggtcataaaaatggagtgaaggcctactatccatgctcggactgctttgaatgtcgccgcagaagtcggagaacaaccagatagcagtgggcattgccgttctttggttgagcaaaattttggtcgtttgttcagtagcttacagctgttgattttattagaacgatatcctctttgagaacctgcagatgagctctgattgttcagtacaactgtcattactggttttcattagctgtgtggaggcaggggagcactggctggagcgtttgcacccccccccccccccccccccccaaaaaaaaaaatgcataactcattgttcttaagtctgaatctacgaaggacacggtgctcttgtcgcccttcgatccagatctacttatgcacgattgtactaatcttgtaactggagtcatgtgttacgcagtgctgtaccgtatggtgtatgtatgctactctgtgcaataccgacgcacagatttgaaatagcaaggtagccattcagag

SEQ ID NO: 80696 - DNA, 3310 bp, Zea Mays
cttgtggaacagaagaagcaagcgagagaagaacacagctccaggccaaaacctcgccgcctcgccggcctccgcctcaattccatgcctcgccaatcagatccacgctcctcgccctctactatggactccggcggggggtcctcagcggacatggagctggcctggcaccttctcaccgtgctcatccgcctcggccgtcccgccgccgcctcggaactcaccgccgccgctaccgtcgcagcgccctccatctcgacgcgcgtcgtcaagcagatgtgttgcttacctaggtcaccactatggatctctgacgacggcgtcgtgacgccctccgagacggctatcctggcgtttctgaggttcatggggtgggatatcccggggcctaaggtgagcctgtggccttcggaggtgaggcggtggtcgggaaaggtgtccattaggtatgagcgtaagcggcaagggtcggatgcaaggtgcttcagcgcgaagaggcgccgactactggcatcggccgcagatttggtggaacaaacggagcaccagtcgtggcagctggttgcgcagacctgtactacggctgctactggagaggtacatttggaggttatgcaaaagttgcaggataggcttcccagtctcggcacatttctcggtgatcttcagcacaaacttgaccagcctcttagaggtgacgatgacttggctattgggaacatgtctttagcactggtgccaacaggtttttcagattgcccttgttctgtcaatcttcctccactggatgctgagaaattgagaaacatcaatatggaagttgatggtagaagcaacaagattagtgaatctgaaacagtttccttacttaacaatagagtagaggatagtgatgatctacaaaaagagtgtgcccttcccatggccagtcatgatgttttagttggagaatgcaaaaatggggctgatgaatatctaaatcctgtttgcaaaagtcctggcagtccgatagatcataatatgaaaacggctactagtattgaagcatttgatatgattctcaaccaagcagatgctctacaatacaattgcctaaatgatgggcatcatcagaatgccccaagttgtgttcagaaaaaaaatccacttcgtgctagtgcatatgcagaagtttgcactgataagacagcacaaattttgttccagccttctgtggttaacaaagttggatctatagcacctcaaatgatgataaatgttcaatctgaaacattaccacaagaaactacaaggcaagatggcatgaacatgaagcacctgaatattgttcctgaaaatagagatatcagatatctaaatcatggagagcagtccttgaacaaggcggaggtcaatgtatctaagaatgggcgggataagttgactgtgaagcagaaagagaagtgcaagaaaaatgaacagccaaaagaagataaggacaacacagcaaagactcaaaagggtcatgtagcaccaaaaccacttcctgctttcaagggttttgtcatagaagaggaggaagggtctggaggttatgggactgtttatagggctcagaggacaaaagatggaaaaacattcgctataaaatgtcctcacccaaatgctcattcacatcatgttaataatgaactaaagatactggagcgttttggaggcaaaaattgtgtgattaaatatgaatgctctttgaaaagtggtgatctagactgttttgttctagaacatgttgagcatgacagaccagagattttgaaaaaagacataaccttgcttgagctgcagtggtatggacactgtcttttcagagctcttgcaagcttacataaacagggggtagtgcatagagatgtcaaacctggaaacttccttttctgtcgcaaactgaagaaggggtatcttattgactttaacctggcaaatgatcttcaccaaaaattcttgaaaaactgtaaatctgatgcaacttcaagtgggaaggataccacatctcaatccctatcaactatttccccagtagttcatgtcaaagaaccagttgctgactcaaagcagcctcttcctttgaagaggaaaagatctagtagaagcccagtggatagtgcacgtgcacctatggtcgacagtaaaagtaggcatggtaaccaaactgcagatgtatctggtataacatctgccaaggatcctacgagcactaaaacatcattagataggttaaagcagccaatgccttacaaagggcgaaaagaactaatgaacttcttacatgagaccatgcaaagtccaaacaaaagtactatgcctactcctgtttcccaaaggaagagggtcgctgctccttttggtagtgtggatcgaaagctctttatactgacgccaatgcccctgcgttctggtggcagtgctgttgctggtgctggcatgttcaacaacaaaggacatggaaaacatcgaagagaaggtccatgtgttggaactaaaggttctccttaggtccttccaccagggctgtaaagttgatgtctggtcggctggggtgacgctcttgtacttgataattggcagaacaccttttggtggagatcctgaacagaacatcaaggaaatagcgaagctgaaaggaagtgaagaactatgggaagtagcgaagttgcacaactgcgaatcttcgtacccatcagatctctttgacgtcaaatttcctttgtgctcggtggatctaagggaatggtgtgcagccaacacacgcaggccagatttactcgagatgatacctgactcctttttcaatcttgtggagaagtgtttggccgtcaaccccaggtgcaggctctcatcagaggacgcgctcatgcacgagttctttgctccatgccgcgataacttcaggaagctcaggatgctgaggaggtcagctggttctgatgcagcatgttcatcgtctcaccaggacacaacacttggagcaagacagtcataggtcgttccaccgtacatacttattgacaccagaaagctgattgtgatcatctagtttattacagacatgacaatagccaaatcgtgttcccgtcttgatgtaagtaaacacttgtactaaatacgtactaaaccgttggtcggaaccaagatatattatttttgtcatgcaacgggagggacgaagagtccccacctgatatattacgtaggacagtgtcaaagaggtacaaataaggcatgtgtagagtacaaagtttgccaggaaggccctaaacttggaacattagag

SEQ ID NO: 80697 - DNA, 3072 bp, Zea Mays
gcaagcgagagaagaacacagctccaggccaaaacctcgccgcctcgccggcctccgcctcaattccatgcctcgccaatcagatccacgctcctcgccctctactatggactccggcggggggtcctcagcggacatggagctggcctggcaccttctcaccgtgctcatccgcctcggccgtcccgccgccgcctcggaactcaccgccgccgctaccgtcgcagcgccctccatctcgacgcgcgtcgtcaagcagatgtgttgcttacctaggtcaccactatggatctctgacgacggcgtcgtgacgccctccgagacggctatcctggcgtttctgaggttcatggggtgggatatcccggggcctaaggtgagcctgtggccttcggaggtgaggcggtggtcgggaaaggtgtccattaggtatgagcgtaagcggcaagggtcggatgcaaggtgcttcagcgcgaagaggcgccgactactggcatcggccgcagatttggtggaacaaacggagcaccagtcgtggcagctggttgcgcagacctgtactacggctgctactggagaggtacatttggaggttatgcaaaagttgcaggataggcttcccagtctcggcacatttctcggtgatcttcagcacaaacttgaccagcctcttagaggtgacgatgacttggctattgggaacatgtctttagcactggtgccaacaggtttttcagattgcccttgttctgtcaatcttcctccactggatgctgagaaattgagaaacatcaatatggaagttgatggtagaagcaacaagattagtgaatctgaaacagtttccttacttaacaatagagtagaggatagtgatgatctacaaaaagagtgtgcccttcccatggccagtcatgatgttttagttggagaatgcaaaaatggggctgatgaatatctaaatcctgtttgcaaaagtcctggcagtccgatagatcataatatgaaaacggctactagtattgaagcatttgatatgattctcaaccaagcagatgctctacaatacaattgcctaaatgatgggcatcatcagaatgccccaagttgtgttcagaaaaaaaatccacttcgtgctagtgcatatgcagaagtttgcactgataagacagcacaaattttgttccagccttctgtggttaacaaagttggatctatagcacctcaaatgatgataaatgttcaatctgaaacattaccacaagaaactacaaggcaagatggcatgaacatgaagcacctgaatattgttcctgaaaatagagatatcagatatctaaatcatggagagcagtccttgaacaaggcggaggtcaatgtatctaagaatgggcgggataagttgactgtgaagcagaaagagaagtgcaagaaaaatgaacagccaaaagaagataaggacaacacagcaaagactcaaaagggtcatgtagcaccaaaaccacttcctgctttcaagggttttgtcatagaagaggaggaagggtctggaggttatgggactgtttatagggctcagaggacaaaagatggaaaaacattcgctataaaatgtcctcacccaaatgctcattcacatcatgttaataatgaactaaagatactggagcgttttggaggcaaaaattgtgtgattaaatatgaatgctctttgaaaagtggtgatctagactgttttgttctagaacatgttgagcatgacagaccagagattttgaaaaaagacataaccttgcttgagctgcagtggtatggacactgtcttttcagagctcttgcaagcttacataaacagggggtagtgcatagagatgtcaaacctggaaacttccttttctgtcgcaaactgaagaaggggtatcttattgactttaacctggcaaatgatcttcaccaaaaattcttgaaaaactgtaaatctgatgcaacttcaagtgggaaggataccacatctcaatccctatcaactatttccccagtagttcatgtcaaagaaccagttgctgactcaaagcagcctcttcctttgaagaggaaaagatctagtagaagcccagtggatagtgcacgtgcacctatggtcgacagtaaaagtaggcatggtaaccaaactgcagatgtatctgtgctgttgctggtgctggcatgttcaacaacaaaggacatggaaaacatcgaagagaaggtccatgtgttggaactaaaggtttccgagctccagaggttctccttaggtccttccaccagggctgtaaagttgatgtctggtcggctggggtgacgctcttgtacttgataattggcagaacaccttttggtggagatcctgaacagaacatcaaggaaatagcgaagctgaaaggaagtgaagaactatgggaagtagcgaagttgcacaactgcgaatcttcgtacccatcagatctctttgacgtcaaatttcctttgtgctcggtggatctaagggaatggtgtgcagccaacacacgcaggccagatttactcgagatgatacctgactcctttttcaatcttgtggagaagtgtttggccgtcaaccccaggtgcaggctctcatcagaggacgcgctcatgcacgagttctttgctccatgccgcgataacttcaggaagctcaggatgctgaggaggtcagctggttctgatgcagcatgttcatcgtctcaccaggacacaacacttggagcaagacagtcataggtcgttccaccgtacatacttattgacaccagaaagctgattgtgatcatctagtttattacagacatgacaatagccaaatcgtgttcccgtcttgatgtaagtaaacacttgtactaaatacgtactaaaccgttggtcggaaccaagatatattatttttgtcatgcaacgggagggacgaagagtccccacctgatatattacgtaggacagtgtcaaagaggtacaaataaggcatgtgtagagtacaaagtttgccaggaaggccctaaacttggaacattagag

SEQ ID NO: 80698 - DNA, 1094 bp, Zea Mays
aaataattgacttaacaaactccatatagtatttatttatgactgcagggcatgtcctgctcggtgctgttccattccctagcgacgttctccggctaaagacgcttggagtttgtggtgtggtgacacttaatgaatcatacgagaggcttgttcccacatccctgtacgaggctcatggaattgaaaatctggtgctaccaacaagggattacctttatgcgccttcatttgttaacctttgtgaagctgctgactttatccacagaaacgcttcatgtgggaaattgacgtatgtgcactgcaaagctggacgagggcgtagcactacagttgtcatttgctatttggtgcaatataaaaatatgactcctgctgaagcttatgaacatgtccgcttgcgtcggcctagggtattactagcttctgcacagtggcaagctgtgcaagagttctaccaactaacagtgaagaaaacggggaggtctacttggctggacaatcctttaatcaaaccacctttgttccttgccactcgcaaacttgttgcctttgatgatagcgcatttgtgatggtctcagaatcagacctcgaagggtataatgcagatgcactggcacttaatatgggcagtagattgtgggagataagcttgatataccgtgtccagtttgcgagcaagacagcatttgctgggttttcgtatctgtggcttcgatgtcgtgcctgcaaggaggctctacctgagaatctggggagagatagctgttctcttgaggttgaccagctaacaactggtcatccatgtctactgcaaggtgtcgtggttaatccatgactgctgagtctgtgtttttgccttgcgcttgtacatattaaagagcctcaatgtgaatctgtaacgtgggtctgcagcaaccaaagagtgaagttgctcgggtttgtatatatgacatgtaataagttgactgctacgtgtacgatgttcaatgttaaaacacaactctttctgatcaaatgtcagctccagcactcttgtcttgggggtagtgattatctttttcctcttttgctccctagacatttgttgcca

SEQ ID NO: 80699 - DNA, 2196 bp, Zea Mays
cttccccaccccgcgtgagccgccgcctccccgcctcccccttcagtccgccgctctcccgcggatcgttcaccttcactccattctgaggatctcatcagcacgctctccggcgcggcggcggcccttccttcgagactaggagctcgccgtcggagtcatccccttccccaatccctgcgacgcgttcggccggtccgtgcgggaggaggacgacgatgaggcgctgcgctgggcggccatcgagcagctgcccatctacgaccgcatgcgcaagggcatcctcacgggggccgcggccggcgtcgaggaggtggacatccaggggctcggcatgcaggagcgcaagaacctcatcgagcgcctcgtgcgcaccgccgaggaggacaacgagcgcttcctgctcaagctccgcgaccgcatggagcgggttgggatcgataatccgacgatagaggtgcgttttgagaacctgaacatcgacgccgaggcctacgtcggcaaccgaggtgtccccacgatgaccaacttcttctccaacaaagtcatggatgtactaagtgctatgcacatcgtctctagcgggaagaggcctgtctccatcgttcacgatatcagtggggtcataagacccggcagcttctcacctgtagcggcgccgcagcaactcgcattcttcagcggcgtagcgatggagagggtttcatcagctccagaaatggatgaggctgcctcaactgatcaatcaagcagattaacaaaaagaagggctaaagtttgggattacgttgatacagaggtagtagatgggaaagagaaggcagtctgcaaatattgtaaggtccacttatcttctgctgcgggtaaagtgtaaacaatagagcaatgaaagatatgcgagatgctttgggcagccagatgtttttcagtggtgaacacctccatgtgaggtgttcttctcatgtgctcaacatcatggttcaagctggactaaaggtcattccaaatgcagtcgggaaggtgagggacattatcaaggtcgtgatatctacaccatctcgtttacagatcttcaattctattgttcaaatattgggtcttaaaagtaaatcggggctgattcttgatgttccacatcgttggaatgcaacctatgatatgctaaatgaagccctaaaatataaggctgctctgaacagatatgcagtagagcaacaccatgaatgtcccactgaagaagattggtcgaaggcagaagctcttcatggttttctacaagagttcagtgatgcaaccaaagcattctcagcggataggcatcccatagctcatctttttctcaagatgttgctcgttatccgaggtgtgctgcttgatgagaattataactcaaatgaactccttaatgagatggcaaatgttatgtataccaagttccaaaaatattggataaatcctaatattgtgttgctcatagctcctgttctagatccatcaatgaaaactgaatttgtcaagttctatttctacacagttggtgacaatgttgatatgaagatgagggagctcaaaaggtacttgaagaaatattacctagagtacgagaaaatcatgaggagtcatagtttgcatgtctttattactcccgatgatcagatgagaagtgatccttctacctcttcacctctttgtggtaaaagaagggtggaacatgcatttgctcaatttgcatctcaaaatgcgaatgcccgtccagagcgaacagaaatggatacatacttggaggaccctaggatccttatcaagccagatgaatgcttcaatgttttaggatggtggaagaaaaattcagatgcttatccaatattgtctttaatggctagggatttcttggctattcctgtgagtacggtgtcctcagaatctgcctttagtgcagctggtagagtccttggaaaaaataggacatcactatctcctgaaacacttgaagctttagtctgtgctaaagactggttgattggattcaatgacgaaaaagaaggtaaattatcatataaaagtagactattatatgataatgagttaaattgtctacgtcatttcactaggtgaaccaatgactggaaagcgaatgtttgattcagatgatgaggaatatgattgggaaatttgaagcaggtaaaacaaaaaaaa

SEQ ID NO: 80700 - DNA, 3461 bp, Zea Mays
cttccccaccccgcgtgagccgccgcctccccgcctcccccttcagtccgccgctctcccgcggatcgttcaccttcactccattctgaggatctcatcagcacgctctccggcgcggcggcggcccttccttcgagactaggagctcgccgtcggagtcatccccttccccaatccctgcgacgcgttcggccggtccgtgcgggaggaggacgacgatgaggcgctgcgctgggcggccatcgagcagctgcccatctacgaccgcatgcgcaagggcatcctcacgggggccgcggccggcgtcgaggaggtggacatccaggggctcggcatgcaggagcgcaagaacctcatcgagcgcctcgtgcgcaccgccgaggaggacaacgagcgcttcctgctcaagctccgcgaccgcatggagcgggttgggatcgataatccgacgatagaggtgcgttttgagaacctgaacatcgacgccgaggcctacgtcggcaaccgaggtgtccccacgatgaccaacttcttctccaacaaagtcatggatgtactaagtgctatgcacatcgtctctagcgggaagaggcctgtctccatcgttcacgatatcagtggggtcataagacccggcagcttctcacctgtagcggcgccgcagcaactcgcattcttcagcggcgtagtaagcagacggcgacccagatctaccacggaggagctcgacggcgatggagagggtttcatcagctccagaaatggatgaggctgcctcaactgatcaatcaagcagattaacaaaaagaagggctaaagtttgggattacgttgatacagaggtagtagatgggaaagagaaggcagtctgcaaatattgtaaggtccacttatcttctgctgcgggtaaaggtacaactcatctgaataggcatatttctgtgtattgccatgcaattccacaagaagagagacaaaggtttttagcgacccaaaaaacaaagcctggcgatgatcatgtttttgaccagtagtctttcgtagtataatagccaagtacttccttagcgcagagatttcatttcaaaagtgtgaagatccatcctggaaagaaatgataaattactgtcaaccatcttttcgattagtcggtcgacagactgtccgttcagattgtatgttgttgtatgaagaggagaagttgcagttaattgagcagtttacaaagttgaaatctcatgttagtttgactgctgatctttggtcctctaaccaaaatcttggatatcttggtgtaacagcacatttcattagtgaagattttgagttgcataaaaagattattgcattcaagaagatttccttcccacatacatcttatgctgtgcaagatggtattacctcttgtttgctagagtggggattggttggtgatttgtttacccttactttggataatgctagtgtaaacaatagagcaatgaaagatatgcgagatgctttgggcagccagatgtttttcagtggtgaacacctccatgtgaggtgttcttctcatgtgctcaacatcatggttcaagctggactaaaggtcattccaaatgcagtcgggaaggtgagggacattatcaaggtcgtgatatctacaccatctcgtttacagatcttcaattctattgttcaaatattgggtcttaaaagtaaatcggggctgattcttgatgttccacatcgttggaatgcaacctatgatatgctaaatgaagccctaaaatataaggctgctctgaacagatatgcagtagagcaacaccatgaatgtcccactgaagaagattggtcgaaggcagaagctcttcatggttttctacaagagttcagtgatgcaaccaaagcattctcagcggataggcatcccatagctcatctttttctcaagatgttgctcgttatccgaggtgtgctgcttgatgagaattataactcaaatgaactccttaatgagatggcaaatgttatgtataccaagttccaaaaatattggataaatcctaatattgtgttgctcatagctcctgttctagatccatcaatgaaaactgaatttgtcaagttctatttctacacagttggtgacaatgttgatatgaagatgagggagctcaaaaggtacttgaagaaatattacctagagtacgagaaaatcatgaggagtcatagtttgcatgtctttattactcccgatgatcagatgagaagtgatccttctacctcttcacctctttgtggtaaaagaagggtggaacatgcatttgctcaatttgcatctcaaaatgcgaatgcccgtccagagcgaacagaaatggatacatacttggaggaccctaggatccttatcaagccagatgaatgcttcaatgttttaggatggtggaagaaaaattcagatgcttatccaatattgtctttaatggctagggatttcttggctattcctgtgagtacggtgtcctcagaatctgcctttagtgcagctggtagagtccttggaaaaaataggacatcactatctcctgaaacacttgaagctttagtctgtgctaaagactggttgattggattcaatgacgaaaaagaaggtgaaccaatgactggaaagcgaatgtttgattcagatgatgaggaatatgattgggaaatttgaagcaggctaaggagttccttggtgcttccggtgacaagcgaaaggaagtcaattaactctgaatcagtggttacacacaacagtttattgaatagaaagaggacactcgatgaccacaagatcatcagatgatcatttgttgagctctggaactgaatcctctccgcatgtggtaactaggcgggttcccatccgagttccgaggtcactgcaatgctaaattgtcaagttcagttatctgaattcagtttgagttataattctcatcaagcatcaatgtcaccaactgtgtagaaatactgaattttagcatggagcgtctttgtaaacattttagcatggagcagtttctcatcgatcatggctgtcaagttctatttctctacacagttacaagttgttttctatcatttgtttgtgagcccatggattataataatttattaacttgtggtggtgcttgcttgtatatgaaggcccttggattggcccgtggatttttaaaaggatcgagacggattaggatgtcggggtattgaaaaacggattgaattgagttgtatcaaatcaatttggatttaagtagggctgggttcacttttaaaacttataggattggagtggggttgaggccggattgtgacccattaccaggcttaggtgaacctgatggtgttttcaaattacgcagacatgcttactgagctttcaagaagggagaaagaagccaacattaaaaccagatcctgatgtcgat

SEQ ID NO: 80701 - DNA, 3072 bp, Zea Mays
cttccccaccccgcgtgagccgccgcctccccgcctcccccttcagtccgccgctctcccgcggatcgttcaccttcactccattctgaggatctcatcagcacgctctccggcgcggcggcggcccttccttcgagactaggagctcgccgtcggagtcatccccttccccaatccctgcgacgcgttcggccggtccgtgcgggaggaggacgacgatgaggcgctgcgctgggcggccatcgagcagctgcccatctacgaccgcatgcgcaagggcatcctcacgggggccgcggccggcgtcgaggaggtggacatccaggggctcggcatgcaggagcgcaagaacctcatcgagcgcctcgtgcgcaccgccgaggaggacaacgagcgcttcctgctcaagctccgcgaccgcatggagcgggttgggatcgataatccgacgatagaggtgcgttttgagaacctgaacatcgacgccgaggcctacgtcggcaaccgaggtgtccccacgatgaccaacttcttctccaacaaagtcatggatgtactaagtgctatgcacatcgtctctagcgggaagaggcctgtctccatcgttcacgatatcagtggggtcataagacccggcagcttctcacctgtagcggcgccgcagcaactcgcattcttcagcggcgtagtaagcagacggcgacccagatctaccacggaggagctcgacggcgatggagagggtttcatcagctccagaaatggatgaggctgcctcaactgatcaatcaagcagattaacaaaaagaagggctaaagtttgggattacgttgatacagaggtagtagatgggaaagagaaggcagtctgcaaatattgtaaggtccacttatcttctgctgcgggtaaagcacatttcattagtgaagattttgagttgcataaaaagattattgcattcaagaagatttccttcccacatacatcttatgctgtgcaagatggtattacctcttgtttgctagagtggggattggttggtgatttgtttacccttactttggataatgctagtgtaaacaatagagcaatgaaagatatgcgagatgctttgggcagccagatgtttttcagtggtgaacacctccatgtgaggtgttcttctcatgtgctcaacatcatggttcaagctggactaaaggtcattccaaatgcagtcgggaaggtgagggacattatcaaggtcgtgatatctacaccatctcgtttacagatcttcaattctattgttcaaatattgggtcttaaaagtaaatcggggctgattcttgatgttccacatcgttggaatgcaacctatgatatgctaaatgaagccctaaaatataaggctgctctgaacagatatgcagtagagcaacaccatgaatgtcccactgaagaagattggtcgaaggcagaagctcttcatggttttctacaagagttcagtgatgcaaccaaagcattctcagcggataggcatcccatagctcatctttttctcaagatgttgctcgttatccgaggtgtgctgcttgatgagaattataactcaaatgaactccttaatgagatggcaaatgttatgtataccaagttccaaaaatattggataaatcctaatattgtgttgctcatagctcctgttctagatccatcaatgaaaactgaatttgtcaagttctatttctacacagttggtgacaatgttgatatgaagatgagggagctcaaaaggtacttgaagaaatattacctagagtacgagaaaatcatgaggagtcatagtttgcatgtctttattactcccgatgatcagatgagaagtgatccttctacctcttcacctctttgtggtaaaagaagggtggaacatgcatttgctcaatttgcatctcaaaatgcgaatgcccgtccagagcgaacagaaatggatacatacttggaggaccctaggatccttatcaagccagatgaatgcttcaatgttttaggatggtggaagaaaaattcagatgcttatccaatattgtctttaatggctagggatttcttggctattcctgtgagtacggtgtcctcagaatctgcctttagtgcagctggtagagtccttggaaaaaataggacatcactatctcctgaaacacttgaagctttagtctgtgctaaagactggttgattggattcaatgacgaaaaagaaggtgaaccaatgactggaaagcgaatgtttgattcagatgatgaggaatatgattgggaaatttgaagcaggctaaggagttccttggtgcttccggtgacaagcgaaaggaagtcaattaactctgaatcagtggttacacacaacagtttattgaatagaaagaggacactcgatgaccacaagatcatcagatgatcatttgttgagctctggaactgaatcctctccgcatgtggtaactaggcgggttcccatccgagttccgaggtcactgcaatgctaaattgtcaagttcagttatctgaattcagtttgagttataattctcatcaagcatcaatgtcaccaactgtgtagaaatactgaattttagcatggagcgtctttgtaaacattttagcatggagcagtttctcatcgatcatggctgtcaagttctatttctctacacagttacaagttgttttctatcatttgtttgtgagcccatggattataataatttattaacttgtggtggtgcttgcttgtatatgaaggcccttggattggcccgtggatttttaaaaggatcgagacggattaggatgtcggggtattgaaaaacggattgaattgagttgtatcaaatcaatttggatttaagtagggctgggttcacttttaaaacttataggattggagtggggttgaggccggattgtgacccattaccaggcttaggtgaacctgatggtgttttcaaattacgcagacatgcttactgagctttcaagaagggagaaagaagccaacattaaaaccagatcctgatgtcgat

SEQ ID NO: 80702 - DNA, 3274 bp, Zea Mays
cttccccaccccgcgtgagccgccgcctccccgcctcccccttcagtccgccgctctcccgcggatcgttcaccttcactccattctgaggatctcatcagcacgctctccggcgcggcggcggcccttccttcgagactaggagctcgccgtcggagtcatccccttccccaatccctgcgacgcgttcggccggtccgtgcgggaggaggacgacgatgaggcgctgcgctgggcggccatcgagcagctgcccatctacgaccgcatgcgcaagggcatcctcacgggggccgcggccggcgtcgaggaggtggacatccaggggctcggcatgcaggagcgcaagaacctcatcgagcgcctcgtgcgcaccgccgaggaggacaacgagcgcttcctgctcaagctccgcgaccgcatggagcgggttgggatcgataatccgacgatagaggtgcgttttgagaacctgaacatcgacgccgaggcctacgtcggcaaccgaggtgtccccacgatgaccaacttcttctccaacaaagtcatggatgtactaagtgctatgcacatcgtctctagcgggaagaggcctgtctccatcgttcacgatatcagtggggtcataagacccggcagcttctcacctgtagcggcgccgcagcaactcgcattcttcagcggcgtagtaagcagacggcgacccagatctaccacggaggagctcgacggcgatggagagggtttcatcagctccagaaatggatgaggctgcctcaactgatcaatcaagcagattaacaaaaagaagggctaaagtttgggattacgttgatacagaggtagtagatgggaaagagaaggcagtctgcaaatattgtaaggtccacttatcttctgctgcgggtaaaggtacaactcatctgaataggcatatttctgtgtattgccatgcaattccacaagaagagagacaaaggtttttagcgacccaaaaaacaaagcctggcgatgatcatgtttttgaccagtagtctttcgtagtataatagccaagtacttccttagcgcagagatttcatttcaaaagtgtgaagatccatcctggaaagaaatgataaattactgtcaaccatcttttcgattagtcggtcgacagactgtccgttcagattgtatgttgttgtatgaagaggagaagttgcagttaattgagcagtttacaaagttgaaatctcatgttagtttgactgctgatctttggtcctctaaccaaaatcttggatatcttggtgtaacagcacatttcattagtgaagattttgagttgcataaaaagattattgcattcaagaagatttccttcccacatacatcttatgctgtgcaagatggtattacctcttgtttgctagagtggggattggttggtgatttgtttacccttactttggataatgctagtgtaaacaatagagcaatgaaagatatgcgagatgctttgggcagccagatgtttttcagtggtgaacacctccatgtgaggtgttcttctcatgtgctcaacatcatggttcaagctggactaaaggtcattccaaatgcagtcgggaaggtgagggacattatcaaggtcgtgatatctacaccatctcgtttacagatcttcaattctattgttcaaatattgggtcttaaaagtaaatcggggctgattcttgatgttccacatcgttggaatgcaacctatgatatgctaaatgaagccctaaaatataaggctgctctgaacagatatgcagtagagcaacaccatgaatgtcccactgaagaagattggtcgaaggcagaagctcttcatggttttctacaagagttcagtgatgcaaccaaagcattctcagcggataggcatcccatagctcatctttttctcaagatgttgctcgttatccgagttggtgacaatgttgatatgaagatgagggagctcaaaaggtacttgaagaaatattacctagagtacgagaaaatcatgaggagtcatagtttgcatgtctttattactcccgatgatcagatgagaagtgatccttctacctcttcacctctttgtggtaaaagaagggtggaacatgcatttgctcaatttgcatctcaaaatgcgaatgcccgtccagagcgaacagaaatggatacatacttggaggaccctaggatccttatcaagccagatgaatgcttcaatgttttaggatggtggaagaaaaattcagatgcttatccaatattgtctttaatggctagggatttcttggctattcctgtgagtacggtgtcctcagaatctgcctttagtgcagctggtagagtccttggaaaaaataggacatcactatctcctgaaacacttgaagctttagtctgtgctaaagactggttgattggattcaatgacgaaaaagaaggtgaaccaatgactggaaagcgaatgtttgattcagatgatgaggaatatgattgggaaatttgaagcaggctaaggagttccttggtgcttccggtgacaagcgaaaggaagtcaattaactctgaatcagtgtttgcatgcaggttacacacaacagtttattgaatagaaagaggacactcgatgaccacaagatcatcagatgatcatttgttgagctctggaactgaatcctctccgcatgtggtaactaggcgggttcccatccgagttccgaggtcactgcaatgctaaattgtcaagttcagttatctgaattcagtttgagttataattctcatcaagcatcaatgtcaccaactgtgtagaaatactgaattttagcatggagcagtttctcatcgatcatggctgtcaagttctatttctctacacagttacaagttgttttctatcatttgtttgtgagcccatggattataataatttattaacttgtggtggtgcttgcttgtatatgaaggcccttggattggcccgtggatttttaaaaggatcgagacggattaggatgtcggggtattgaaaaacggattgaattgagttgtatcaaatcaatttggatttaagtagggctgggttcacttttaaaacttataggattggagtggggttgaggccggattgtgacccattaccaggcttaggtgaacctgatggtgttttcaaattacgcagacatgcttactgagctttcaagaagggagaaagaagccaacattaaaaccagatcctgatgtcgat

SEQ ID NO: 80703 - DNA, 6378 bp, Zea Mays
cttccccaccccgcgtgagccgccgcctccccgcctcccccttcagtccgccgctctcccgcggatcgttcaccttcactccattctgaggatctcatcagcacgctctccggcgcggcggcggcccttccttcgagactaggagctcgccgtcggagtcatccccttccccaatccctgcgacgcgttcggccggtccgtgcgggaggaggacgacgatgaggcgctgcgctgggcggccatcgagcagctgcccatctacgaccgcatgcgcaagggcatcctcacgggggccgcggccggcgtcgaggaggtggacatccaggggctcggcatgcaggagcgcaagaacctcatcgagcgcctcgtgcgcaccgccgaggaggacaacgagcgcttcctgctcaagctccgcgaccgcatggagcgggttgggatcgataatccgacgatagaggtgcgttttgagaacctgaacatcgacgccgaggcctacgtcggcaaccgaggtgtccccacgatgaccaacttcttctccaacaaagtcatggatgtactaagtgctatgcacatcgtctctagcgggaagaggcctgtctccatcgttcacgatatcagtggggtcataagacccggcagcttctcacctgtagcggcgccgcagcaactcgcattcttcagcggcgtagtaagcagacggcgacccagatctaccacggaggagctcgacggcgatggagagggtttcatcagctccagaaatggatgaggctgcctcaactgatcaatcaagcagattaacaaaaagaagggctaaagtttgggattacgttgatacagaggtagtagatgggaaagagaaggcagtctgcaaatattgtaaggtccacttatcttctgctgcgggtaaaggtacaactcatctgaataggcatatttctgtgtattgccatgcaattccacaagaagagagacaaaggtttttagcgacccaaaaaacaaagcctggcgatgatcatgtttttgaccagtagtctttcgtagtataatagccaagtacttccttagcgcagagatttcatttcaaaagtgtgaagatccatcctggaaagaaatgataaattactgtcaaccatcttttcgattagtcggtcgacagactgtccgttcagattgtatgttgttgtatgaagaggagaagttgcagttaattgagcagtttacaaagttgaaatctcatgttagtttgactgctgatctttggtcctctaaccaaaatcttggatatcttggtgtaacagcacatttcattagtgaagattttgagttgcataaaaagattattgcattcaagaagatttccttcccacatacatcttatgctgtgcaagatggtattacctcttgtttgctagagtggggattggttggtgatttgtttacccttactttggataatgctagtgtaaacaatagagcaatgaaagatatgcgagatgctttgggcagccagatgtttttcagtggtgaacacctccatgtgaggtgttcttctcatgtgctcaacatcatggttcaagctggactaaaggtcattccaaatgcagtcgggaaggtgagggacattatcaaggtcgtgatatctacaccatctcgtttacagatcttcaattctattgttcaaatattgggtcttaaaagtaaatcggggctgattcttgatgttccacatcgttggaatgcaacctatgatatgctaaatgaagccctaaaatataaggctgctctgaacagatatgcagtagagcaacaccatgaatgtcccactgaagaagattggtcgaaggcagaagctcttcatggttttctacaagagttcagtgatgcaaccaaagcattctcagcggataggcatcccatagctcatctttttctcaagatgttgctcgttatccgaggtgtgctgcttgatgagaattataactcaaatgaactccttaatgagatggcaaatgttatgtataccaagttccaaaaatattggataaatcctaatattgtgttgctcatagctcctgttctagatccatcaatgaaaactgaatttgtcaagttctatttctacacagttggtgacaatgttgatatgaagatgagggagctcaaaaggtacttgaagaaatattacctagagtacgagaaaatcatgaggagtcatagtttgcatgtctttattactcccgatgatcagatgagaagtgatccttctacctcttcacctctttgtggtaaaagaagggtggaacatgcatttgctcaatttgcatctcaaaatgcgaatgcccgtccagagcgaacagaaatggatacatacttggaggaccctaggatccttatcaagccagatgaatgcttcaatgttttaggatggtggaagaaaaattcagatgcttatccaatattgtctttaatggctagggatttcttggctattcctgtgagtacggtgtcctcagaatctgcctttagtgcagctggtagagtccttggaaaaaataggacatcactatctcctgaaacacttgaagctttagtctgtgctaaagactggttgattggattcaatgacgaaaaagaaggtgaaccaatgactggaaagcgaatgtttgattcagatgatgaggaatatgattgggaaatttgaagcaggctaaggagttccttggtgcttccggtgacaagcgaaaggaagtcaattaactctgaatcagtgtttgcatgcaggttacacacaacagtttattgaatagaaagaggacactcgatgaccacaagatcatcagatgatcatttgttgagctctggaactgaatcctctccgcatgtggtaactaggcgggttcccatccgagttccgagacatgcttactgagctttcaagaagggagaaagaagccaacattaaaaccagatcctgatgtcgatgtttacatgaaggctatctccgtggaaggtcaggagagcgtggttacagattacaatctcaagattgcagattctgggtctggagatctgtgcggatacaatggttggagactctatgatcagaggtatctcaggaggacaaaagaagcgtgtcacaaccgaacgatggcacagcaacagcttctttcttgctaaccattgctagacataacttgacgaaaagaatagagcacatagaaaacgttctcaatgatttgaagaaatcacatctgttgaaccagcaaagcagcagcagcagcagtaagaaagaaaggagtagcaggcatgaggatattgagtacctgtacagaagcattgagcggaaggtaattggtcgagataaggagcgtgagaagcttatcagtatgcttcgtaggggacctggtccggagacaccaagctccagtagcagtaaacattattctgtgattggtatatatggcattgcagggtctgggaagagtaccctggcacaatatgtctgtgattatgagaaggccgaaggccaacattttgaccctgtcatgttcattcatgtgtctcagacatttagggtggataagatatttcgtgacatgctgagggagatcaggaaggacaggcaatctgacagcaacagtgttaaatgcctacacgatgagctgaaggaaaatgcttcttgttggtactggatgatctctgggtcactcgtgagaatcaggaggagcgcgctattctacttaatgtgctcgatgctgggcagagtggaagtcgggttctggtgacagctcagaagaaagatgtagctgcagcgataggcgctgaggagcagatcccgattccggatatggaagagaagcagtacttttcgatgttcatgcactacgccctagaaggcaagcgtgttggtgacggaaggtttatagcaatagggagaaaaatcgcgaaaaagctcggcagatcacccattgcagcagtcacagtggcagcacggcttcggagcaacagcagcatcgatttctgggagacaacagcgaaccttgacatgttggacgaaacaatgggagctctgtggtggagctatcagcagataggtgtagacgtccggcgatgctttgcatactgcagcacttttcccagaggatacagatagaaagaacagtttttggcactgaaacggaggcgttcacgattcatgacctgctacacgagttggcagagagggtcagcggaagcgaatgcttcagagttgtttcaaatagctcaccaaaacatattccgcaggaggttcgccatctctttgttggcactgggactgacagtagagcagctatcgcaaagaaaattctaggtctggtaaatctacgcactctcatcatcgtcgaagagtacagcgaaaacaagaggaaaacatttgcagctgaagatgatgaggaacggtcaggccgcaccttagttaacgaggaagtcttgggcagaatgttcaggagcctgaggaaactgcgggcgctggtcgttacaacgaaacagtaccatgaaccagcgttgttagtcccagcatctatcgattagatgaagcatctgcgttatctaagctttaatctggactgttctcatcgcagtgtggagcttattttcccaagcacatttagcaaactttaccatatgcagagcatatatagtgagaaaatttcctgcgccaaagacgtgacacaaaatctcacttccttgcggcacagctcttcgtcgtggatgggatttgcaaacgttggcaggctgacgtcgctccaatcgctacggtacttccaagtgaagagagaacaggggcacgaactgaagcagctgaagcacctgaacaaccttcgaggcactctggcgattgacggtctgggggtcgtcagaagcaaagaggaagctcttgaagcacacctagccagcaaggaacaactaaggaaactggagctgacattctctgtccgttaggcgggggatccgaacgccgtggcagagatacttaaccgccttttaccgccggaggatccaaccaaccataggtaccatggctggatgatgggaggccaggctccagacgttgctgcagaggtccttgagggcctttgccccccgaaggatcttgcaacactcacaatcaaccgctacaagggttcgaggtaccctagctggatgctgagtagccagagtccaggagcgctgaagtacctgcaagagcttgagctccataactgcaaccgattggcatcttttcctgaagaagagaccgagctgttcagttgtctgcgtgagctactgagcttcgagttagcttgtgcgactgggacagcatgccagaaaatatggagccccttgtttcgctccagagtgtattgattatgaggtgcgataggatggagcgccttccaaccctgccccggtcgcttgcgaaggttgaaatccatgggtgccgcgtcctcagtagaacctgccaatcagagggacacgagaactggcagaagatcctgcacattccagagaaaaatatatccccaagaaggagcatggcgcagtgagggagggaggacgatgagaccactgtttccatgtttaccagcgacaactgacctgggattgtaatatgcatccattaactgaggattgttcttatacgtttgtgatgaatccacctgacaatctttttttttttgaaaataggtacactagctattattatcagtattattggaagtgtacttaatggatgatcagatcttttttattctctctatttggggaactttcttgtaagactttttcgtctctctaaatatataaagatgtgcagctttcctgctcgttcgatatcttttgttacgaaaagggatggatgaccaaatttgttctaaggacggtatcagtcattgtccagaaagcatgctagacttcttgcaaacacttggagaaataattttaaatatctttcaataattgctcttgaaagactcactttgcaacatctttagcacatatgaatttccaaatataattttgatatctttagaatggtctttttaatatgactttgatcaatgtttttcccaacttggtgactacttgtcaaacttgttgctctttgatccaattgatagtatggttttccataatagatctctaaattgaaacgacttgtttttaacttttttggtttatgctatggcaaaatgagccttgtccttctcaatatccttgagtgtctttaatgtcttttctactatcttatcaatattgtccatcattatatcatgatacataagaacagattactctcgttgcttagcaactctatatgcattcaaatttacctcaagtcctcaacgtgtg

SEQ ID NO: 80704 - DNA, 1280 bp, Zea Mays
acgggtttgcgacgctgaatagctgtggaggactggaggtatagagagatgcgtagtcagaggtatagggctgcgttatcaggaaggatctgccgagcaattgaaactgctgcgctaactgctgacgcgtagtcttatgtatgccatacatgcgccaatggccaaggtgttccttggactgaagaagaacaccggaggtttttgctgggattacaaaagctcgggaaaggggattggcgaggaatttctcgtaattttgtggtctcaagaacacctactcaagtagcaagtcatgctcaaaagtattttatacgccaatcaaatatgagcagaaggaagagaaggtctagccttttcgacatggttcctgatgagtccatggaccttccgccccttcctggaagtcaagaaccagagacctcaatgttaaatcaaccgccactgcctcctgctgtggaggaggaggtggaatcgatggagtcagatacttctgctgtcgcagagagttctggagcttctgctctcatgcccgagagtttacagcctacctatccgatgattgttccagcttatttctcgccgttcttgcaattctcagttcctttctggccaaatcaggaagatggaggcgatcttccccaagaaacacacgagattgtcaagcctgttgcagttcattcccagaatccaattaatgttgatgaactcgtgggcatgtcaaagctaagcatatgggagcatggtcaggagacagtgtctacttctctgtcgctaaatctgctagggggtcaaaataggcagtcggctttccatgcaaaccctcaaacaagagctcaagcctgatcatcccctaccagcacagaaactgcattttagatggaatcctgggcaaaataagctttgctcttttttcttcttctaaatttaagatcactgagtcataaggtcactggttcgaagtagcttctccgtatttgcggggaaagcctgccctggtttctctccttcatcagaccccactcatatgggagccttcaatattgtcttttttatatatttaagattgaccgtgctcggtagcttgtatcatgtgctgtaagttatgctatgtatgaatgtacctgtagtttgtatggcacgcatggtatgccactcttatgttagcaaagtcattaatgttagtgctgatctttatggttgtaattttataaacttctaaaaaaaagtataagccagttcttttcaactgcactcagttctctacctgatgtttcattgct

SEQ ID NO: 80705 - DNA, 846 bp, Zea Mays
atggctcaagagctccacgaaacgtcctcttgctctgccaccaccacctcgtcgtgcaccacatcctgctgctcgtccactgtcacagactcgtcctcttcgcccccgtcaccggcggcggccaatgccgcgcccgcgacacggaagcggcaggcgttggaggccgaggccgaggccgaggcgggcggtgaggaggaggaggaggaggaggaaggctgtgctggtaataaggcggcgccggccaagaagcgaccgcggggcagcgaggggaagcacccgacgttccgcggcgtgcggatgcgggcgtggggcaagtgggtgtcggagatccgcgagccgcgcaagaagtcgcgcatatggctcggcacgttccccaccgccgagatggccgcgcgcgcccacgacgtcgcggcgctcgccatcaagggccgcgccgcgcacctcaacttcccggacctcgccggcgcgctcccgcgcgccgcgtccgcggcgcccaaggacgtccaggcagccgccgcattggccgctgcgttcacgtcgccgtcatcggagcccggcgccggcgcgcacgaggagcccgctgccaaggacggcgccgcgcccgaggaggcagccgccgacgcacaggcaccagtaccagtagcactaccaccgccggcggcctctcggccagggacgccgtcgagcggcgtggaggacgagcggcagctgttcgacctgccggacctgctcctcgacatccgggacgggttcgggcgcttcccgccgatgtgggccccgctcactgacgtggaggaggtggtcaatgcggagctgcgcctcgaggagccgctgctttgggagtag

SEQ ID NO: 80706 - DNA, 628 bp, Zea Mays
aaaaagggcaggaagcaaacgaatgtaacgggaacacaagcagcatctaatctctattactgctgacaacgaaacctcacggtcacacagaagagaagcatagcagttgtctattacagctgcagtgataaaaatcagaggtggctagtccaggtccctacgtaccccaattttttttactaccgtcaagtgtagttaacctattgttcagcttcagcagcaacgctggactggtggcgtctgattggcgtgtcccgccttgttctgccccaccatgatgatcaagtggtgacaaaagtgttgcaatcctcatgtggttagctgcagagcatctcgcgttccatctacagttctctgcagctttggaaggctccttttgcttccccggagatgctgatgcggcgatgcccacgcccaatgctacaggtacagggagcgagcgcggcttgtattttagtcgcggacaccatttgcagcgcggaaagctgatggtcgcccttaccgcatccgcaaccatggctgcctgcctgcctgaaggcttctcttctgtcttctgctctgcccttccgtgggaacagggcgccgctgcccctcccggtcccgggcacccggcaaggcaaagcgccgg

SEQ ID NO: 80707 - DNA, 1220 bp, Zea Mays
cgagactcgggaagaatccattgcgtgttccaaatccgctggcgtagcgtagaacacagcatctccggtagcgtcaccgtaggcctcgcaagtaaactgacctgccttctccgctttcccctccgtctccgtcgggagtcgagacaaagggagccagagttagtcccggcgccgtgtcgcgagcggaaggagaaggactgaaggaggcgacgatgcaggtgaagcagaaggtctacgagttctacaaaggcacggtggagcgggtcacggccccgcgcaccgtctccgcgttcctcgagaagggcgtcctctccgtccccgagttcattctcgccggcgacaacctcgtcgccaagtgccccacctggtcctgggaagcgggcgatccaagcaagaggaagccgtatctccccgccaataagcagttcctcgtcacccgtaatgtgccctgtttaagacgtgccatctcggttgaggaagagtatgatgcagcaggagcagaggtggttctcgatgaggatggcgaaggctggcttgcaacacatggagtgcaagcatcaaagacagaagaggaggaagacattccctctatggacaccttggacatagggagatctgatggaataaagtctatcccctcttactttagcggtggcaaggatgaagaggaggaagatatacctgacatggatacttatgaagacacaggggataatttggctgctgctgaaccatcatactttatcgcagaagaaccagaagatgacaacattcttcataccagaacatatgatgttagcataacgtatgacaagtactaccaaactccacgtgtctggctaactggatatgacgagtcaagaatgccattaatgcctgaacttgtgtttgaagacatcagccaagaccacgcacgaaaaacggtgactattgaggaccatcctcacttattggctgggaagcatgcatcagtgcacccatgcaaacatgcagctgtgatgaaaaagatcatcgacgttccaatgtcggggggagtggaaccagaagttgacaagtaccttttcatatttttgaaattcatagcgacagtcataccgactattgagtacgattatacaatggacgtcgaccttggcagtacaagctgattattggttggcttgaaggctggcttaccttcttgacacttcagtacttcactttgccaaaacgttcacggc

SEQ ID NO: 80708 - DNA, 1334 bp, Zea Mays
cgagactcgggaagaatccattgcgtgttccaaatccgctggcgtagcgtagaacacagcatctccggtagcgtcaccgtaggcctcgcaagtaaactgacctgccttctccgctttcccctccgtctccgtcgggagtcgagacaaagggagccagagttagtcccggcgccgtgtcgcgagcggaaggagaaggactgaaggaggcgacgatgcaggtgaagcagaaggtctacgagttctacaaaggcacggtggagcgggtcacggccccgcgcaccgtctccgcgttcctcgagaagggcgtcctctccgtccccgagttcattctcgccggcgacaacctcgtcgccaagtgccccacctggtcctgggaagcgggcgatccaagcaagaggaagccgtatctccccgccaataagcagttcctcgtcacccgtaatgtgccctgtttaagacgtgccatctcggttgaggaagagtatgatgcagcaggagcagaggtggttctcgatgaggatggcgaaggctggcttgcaacacatggagtgcaagcatcaaagacagaagaggaggaagacattccctctatggacaccttggacatagggagatctgatggaataaagtctatcccctcttactttagcggtggcaaggatgaagaggaggaagatatacctgacatggatacttatgaagacacaggggataatttggctgctgctgaaccatcatactttatcgcagaagaaccagaagatgacaacattcttcataccagaacatatgatgttagcataacgtatgacaagtactaccaaactccacgtgtctggctaactggatatgacgagtcaagaatgccattaatgcctgaacttgtgtttgaagacatcagccaagaccacgcacgaaaaacgctgtgatgaaaaagatcatcgacgttccaatgtcggggggagtggaaccagaagttgacaagtaccttttcatatttttgaaattcatagcgacagtcataccgactattgagtacgattatacaatggacgtcgaccttggcagtacaagctgattattggttggcttgaagcttgtcacttgtctcgggaaaaggaagcaccctaccagaaggcgcaggaagaaggctgaattgcgtgtttgtggttgaacatttgtgcatatgtgcttgttccttggatcggtttgcatttgtgaacaaactctgaaaagctcaaaggcaagacccatcttgtacattctgtgacgctgtcagcttgtgaatccattcgttaatataaatctcaacaacccgttcggcgtgcgtggga

SEQ ID NO: 80709 - DNA, 1392 bp, Zea Mays
cgagactcgggaagaatccattgcgtgttccaaatccgctggcgtagcgtagaacacagcatctccggtagcgtcaccgtaggcctcgcaagtaaactgacctgccttctccgctttcccctccgtctccgtcgggagtcgagacaaagggagccagagttagtcccggcgccgtgtcgcgagcggaaggagaaggactgaaggaggcgacgatgcaggtgaagcagaaggtctacgagttctacaaaggcacggtggagcgggtcacggccccgcgcaccgtctccgcgttcctcgagaagggcgtcctctccgtccccgagttcattctcgccggcgacaacctcgtcgccaagtgccccacctggtcctgggaagcgggcgatccaagcaagaggaagccgtatctccccgccaataagcagttcctcgtcacccgtaatgtgccctgtttaagacgtgccatctcggttgaggaagagtatgatgcagcaggagcagaggtggttctcgatgaggatggcgaaggctggcttgcaacacatggagtgcaagaagaggaggaagacattccctctatggacaccttggacatagggagatctgatggaataaagtctatcccctcttactttagcggtggcaaggatgaagaggaggaagatatacctgacatggatacttatgaagacacaggggataatttggctgctgctgaaccatcatactttatcgcagaagaaccagaagatgacaacattcttcataccagaacatatgatgttagcataacgtatgacaagtactaccaaactccacgtgtctggctaactggatatgacgagtcaagaatgccattaatgcctgaacttgtgtttgaagacatcagccaagaccacgcacgaaaaacggtgactattgaggaccatcctcacttattggctgggaagcatgcatcagtgcacccatgcaaacatgcagctgtgatgaaaaagatcatcgacgttccaatgtcggggggagtggaaccagaagttgacaagtaccttttcatatttttgaaattcatagcgacagtcataccgactattgagtacgattatacaatggacgtcgaccttggcagtacaagctgattattggttggcttgaagcttgtcacttgtctcgggaaaaggaagcaccctaccagaaggcgcaggaagaaggctgaattgcgtgtttgtggttgaacatttgtgcatatgtgcttgttccttggatcggtttgcatttgtgaacaaactctgaaaagctcaaaggcaagacccatcttgtacattctgtgacgctgtcagcttgtgaatccattcgttaatataaatctcaacaacccgttcggcgtgcgtggga

SEQ ID NO: 80710 - DNA, 679 bp, Zea Mays
ctacgaaccaggccggctcgacctcggatggttccgttcatagcaaacacctatgtcggtcacatcattagcggactccaacggaaccccggccccctcccctgccgggcatggagtgccccggcggctttccctcgcctccatcggcgcccacacggtggccccctcgtggggtgagacaaccaaatactcccgtagagggactctaatctctctctccactaattaattgtatttagtgtaaaattaactttttagtataattagcagataacaatgtgtattattacggtactataaatatgatagtattttttaaaacttcaaaaactaatatatatataagtcaaataactcatttaaagagtaaaggtgagggaatggttggagagaagaaaaaataggaagaagaatgattgagagggaagtatttaaatacgaatagggggatttaagagggggaatagttggagatagccttagagcatgtccaatagttatgtaaacaacttcctaaatatgaatttaagaagttttcggggaaaactcttctccaacatatatgtaaagcaggtcatttaatttacaaactccctacaaaacacaatttcagtcctacatttacgaacctcgttgggactccctacatcaatgttggttctagatccatcacgaaaac

SEQ ID NO: 80711 - DNA, 2597 bp, Zea Mays
caccagtccaccgcaaggcacactcctgtctccaccctgctccgctctttgctcccgctcccgctcccgctcgcctacgctacttgccgttcatcgccggccacagcctctgcccccgccgcttagagttcgcctccgtcgctgctgcaggagctagggtttccggcgccgggcgccggggtatgagcatccgccgccgccgccctgcaggatctaaggtttcgacgactccgctcactgatggagggtggtagaagggcgagcgagtccctctcggcatacacccatggaccatgacgatactgattttcagagccaaaattttcaactagctggtgtaggaagtagcaaattcccatcaggtttgcgaccatttgcactgccaaaacttgatatcgaggaccaactacaaggccatcttcgatttgataatttgatagattcagaagcatttttcagcgtacaagggcacgagaatagctggattgaggttctgtccactggaagcagtgttgttgattttagctctagcgcagctgaatcttgctcgatatctaaaactaataatgtctggtcagaggcaacgtccacagaatctgtcgaaatgctattgaaatcagtgggaggaaatgagacaactggtaacatggacagtaatgctcaccttcagttaattggtatggacagtcaaactgatcaatcgagtgttcatcctaaatctagtacctccccgacagatagtactgtagtgccaactgagaaagatcagtcttggagcactcattctagaatgactgctgacctttcaaacactgagtctcagcttgaacattttgtgcctttcttactggacaagaaagctgcgcaggcagcagattctgttgctgagaagtgccttacaggtgagaagttgtcctcttcaaacaacacaccaggaagctgcccaactgttggcaactattttggggcaggccatgatgataattctttggacaaatttaatgtaccctcagctgaagtagattcaaagaaattgaataatgaatctttcccagagttggctcccctgcagaacatatatactgattcatatcacttcaagaaagatattaaagaatctgaggctgttgttactcctcaagattcgaagttttgccatatcaatgaaaataaagttgaaggtggactacaagaactgcaaaatttgtcatgtgctggtcagtccttgggcgctgtaaacttgtccagtccaccaagcaatgaaactctattgtcaaaaagttctgatggattactagaagccatcacaaatccagttaagatgctgcacaggagcgatgatacttgccataaagtgaacatcactcttcaaccatcttttttagcagtgcaacatggaactgaaggcctgaaaagttcagttcacaggagcaatgagcttgttgttaaggagtttagtattggttcaaattctcttatctctcaccaatctgaggcagacccaagaaattctaatccacatcctgtcagttctgtgtctcccaaaagtaaaattaccgatgccacttgtgttcctgaagaaacaaacaacactgaaacgaatagtacaaacacctgctatacatatgatgaatcaaaacatgtagtgctggagtacaatcaaggttctgttgacaagctaaaaagtggtgacatgggagaaaaggcaactggggaggaaataccagcagtttcagggagcattgagcaaatgatagaaaattatcatgaagaaaatgctactggtacatccaacaataaggttggcctttccgacagtattgcacctgaaaactgtgcagctgacactttgaatgcttcagaggaaccaaacagtccttcgttaaatcatgagaggtcatttgaggaacacgaattgcctgctttaggagaggagcctaaaagcacaaatttactcctttctacttctgggtttcaagagaaaatttcagcatcagtgatcagttctagcagtggtgtcatgcctaccattgttactgacaacgttgctacttctgaggataataatggttgttcaataggtgtttcttctgttgattcttctgttttactagacgaaaaggatttgagaacgtccacagtgaataatgaggagccattcaaggaaggcactaaatctgctttaggagatcaagaaaacgatggtatttctcctggctctgaacaaggaggggaaatgccagctgtgcccatggattcaaacattgccgtttatagtgatactgtttctgctacagaaaaggagaaatacaaggaccatcctaattctttgggtagtttgaccacaggaggaacccaggataaatcaggtaaccatccagatgctctttcactgaaatgccagactggtagatcttcaatacatacagatcttatagatccaaccacggcacctatgttaggtatcccaactggaaaggtggctgaaaagatagtaaaaactccactgaatgcaagtgatgatttgaatgcacatatgcaagcaacaaacggggtgcttcacatacgctatttttcaataacctcgtgaagttaag

SEQ ID NO: 80712 - DNA, 3163 bp, Zea Mays
caccagtccaccgcaaggcacactcctgtctccaccctgctccgctctttgctcccgctcccgctcccgctcgcctacgctacttgccgttcatcgccggccacagcctctgcccccgccgcttagagttcgcctccgtcgctgctgcaggagctagggtttccggcgccgggcgccggggtatgagcatccgccgccgccgccctgcaggatctaaggtttcgacgactccgctcactgatggagggtggtagaagggcgagcgagtccctctcggcatacacccatggaccatgacgatactgattttcagagccaaaattttcaactagctggtgtaggaagtagcaaattcccatcaggtttgcgaccatttgcactgccaaaacttgatatcgaggaccaactacaaggccatcttcgatttgataatttgatagattcagaagcatttttcagcgtacaagggcacgagaatagctggattgaggttctgtccactggaagcagtgttgttgattttagctctagcgcagctgaatcttgctcgatatctaaaactaataatgtctggtcagaggcaacgtccacagaatctgtcgaaatgctattgaaatcagtgggaggaaatgagacaactggtaacatggacagtaatgctcaccttcagttaattggtatggacagtcaaactgatcaatcgagtgttcatcctaaatctagtacctccccgacagatagtactgtagtgccaactgagaaagatcagtcttggagcactcattctagaatgactgctgacctttcaaacactgagtctcagcttgaacattttgtgcctttcttactggacaagaaagctgcgcaggcagcagattctgttgctgagaagtgccttacaggtgagaagttgtcctcttcaaacaacacaccaggaagctgcccaactgttggcaactattttggggcaggccatgatgataattctttggacaaatttaatgtaccctcagctgaagtagattcaaagaaattgaataatgaatctttcccagagttggctcccctgcagaacatatatactgattcatatcacttcaagaaagatattaaagaatctgaggctgttgttactcctcaagattcgaagttttgccatatcaatgaaaataaagttgaaggtggactacaagaactgcaaaatttgtcatgtgctggtcagtccttgggcgctgtaaacttgtccagtccaccaagcaatgaaactctattgtcaaaaagttctgatggattactagaagccatcacaaatccagttaagatgctgcacaggagcgatgatacttgccataaagtgaacatcactcttcaaccatcttttttagcagtgcaacatggaactgaaggcctgaaaagttcagttcacaggagcaatgagcttgttgttaaggagtttagtattggttcaaattctcttatctctcaccaatctgaggcagacccaagaaattctaatccacatcctgtcagttctgtgtctcccaaaagtaaaattaccgatgccacttgtgttcctgaagaaacaaacaacactgaaacgaatagtacaaacacctgctatacatatgatgaatcaaaacatgtagtgctggagtacaatcaaggttctgttgacaagctaaaaagtggtgacatgggagaaaaggcaactggggaggaaataccagcagtttcagggagcattgagcaaatgatagaaaattatcatgaagaaaatgctactggtacatccaacaataaggttggcctttccgacagtattgcacctgaaaactgtgcagctgacactttgaatgcttcagaggaaccaaacagtccttcgttaaatcatgagaggtcatttgaggaacacgaattgcctgctttaggagaggagcctaaaagcacaaatttactcctttctacttctgggtttcaagagaaaatttcagcatcagtgatcagttctagcagtggtgtcatgcctaccattgttactgacaacgttgctacttctgaggataataatggttgttcaataggtgtttcttctgttgattcttctgttttactagacgaaaaggatttgagaacgtccacagtgaataatgaggagccattcaaggaaggcactaaatctgctttaggagatcaagaaaacgatgaaaaggagaaatacaaggaccatcctaattctttgggtagtttgaccacaggaggaacccaggataaatcaggtaaccatccagatgctctttcactgaaatgccagactggtagatcttcaatacatacagatcttatagatccaaccacggcacctatgttaggtatcccaactggaaaggtggctgaaaagatagtaaaaactccactgaatgcaagtgatgatttgaatgcacatatgcaagacatagtgttaaatcatggtacggattgtagtcctggtactgtgacatcccaaggaaaggaaggctcaagcttgctggaacctggtaatggtatctgcactggggttacatgcggatccccttcagtgattagttgcgctgaatcgtttccccaaggtggtggaaatggcagcaatgatttacttgatcacacactatgtgggcaatctgaggatcctaaagaccgtggggcctcagctgatgctactcagagatcaaaacaatgctgtaccagaaacatgaaatctgctcctggttctgaggagactagtgcagcaggaggtgatagaagcttttcatttgaggtgggagctccacccaatgttgctgagaaagcacatagctctgtttggagtccttttcatttgaagagtactgagacggtcacagaaaatcttcaagctggaagttctttgaaggatactagtgatgatagtaagaaaacatctactatagatgcttgtaaagaacaactatcagaaaggaaagtggctgaaagttctgggggcagccccccagacaactctaatataggcggcagcattaagagcagaagttcgccaccgcagcagcatccaatccctgagtgttctgatttagtgaattttccattcacagaggcacagcatttgcagctacgcgcacaaatatttgtttatggagctcttatgtga

SEQ ID NO: 80713 - DNA, 3097 bp, Zea Mays
caccagtccaccgcaaggcacactcctgtctccaccctgctccgctctttgctcccgctcccgctcccgctcgcctacgctacttgccgttcatcgccggccacagcctctgcccccgccgcttagagttcgcctccgtcgctgctgcaggagctagggtttccggcgccgggcgccggggtatgagcatccgccgccgccgccctgcaggatctaaggtttcgacgactccgctcactgatggagggtggtagaagggcgagcgagtccctctcggcatacacccatggaccatgacgatactgattttcagagccaaaattttcaactagctggtgtaggaagtagcaaattcccatcaggtttgcgaccatttgcactgccaaaacttgatatcgaggaccaactacaaggccatcttcgatttgataatttgatagattcagaagcatttttcagcgtacaagggcacgagaatagctggattgaggttctgtccactggaagcagtgttgttgattttagctctagcgcagctgaatcttgctcgatatctaaaactaataatgtctggtcagaggcaacgtccacagaatctgtcgaaatgctattgaaatcagtgggaggaaatgagacaactggtaacatggacagtaatgctcaccttcagttaattggtatggacagtcaaactgatcaatcgagtgttcatcctaaatctagtacctccccgacagatagtactgtagtgccaactgagaaagatcagtcttggagcactcattctagaatgactgctgacctttcaaacactgagtctcagcttgaacattttgtgcctttcttactggacaagaaagctgcgcaggcagcagattctgttgctgagaagtgccttacaggtgagaagttgtcctcttcaaacaacacaccaggaagctgcccaactgttggcaactattttggggcaggccatgatgataattctttggacaaatttaatgtaccctcagctgaagtagattcaaagaaattgaataatgaatctttcccagagttggctcccctgcagaacatatatactgattcatatcacttcaagaaagatattaaagaatctgaggctgttgttactcctcaagattcgaagttttgccatatcaatgaaaataaagttgaaggtggactacaagaactgcaaaatttgtcatgtgctggtcagtccttgggcgctgtaaacttgtccagtccaccaagcaatgaaactctattgtcaaaaagttctgatggattactagaagccatcacaaatccagttaagatgctgcacaggagcgatgatacttgccataaagtgaacatcactcttcaaccatcttttttagcagtgcaacatggaactgaaggcctgaaaagttcagttcacaggagcaatgagcttgttgttaaggagtttagtattggttcaaattctcttatctctcaccaatctgaggcagacccaagaaattctaatccacatcctgtcagttctgtgtctcccaaaagtaaaattaccgatgccacttgtgttcctgaagaaacaaacaacactgaaacgaatagtacaaacacctgctatacatatgatgaatcaaaacatgtagtgctggagtacaatcaaggttctgttgacaagctaaaaagtggtgacatgggagaaaaggcaactggggaggaaataccagcagtttcagggagcattgagcaaatgatagaaaattatcatgaagaaaatgctactggtacatccaacaataaggttggcctttccgacagtattgcacctgaaaactgtgcagctgacactttgaatgcttcagaggaaccaaacagtccttcgttaaatcatgagaggtcatttgaggaacacgaattgcctgctttaggagaggagcctaaaagcacaaatttactcctttctacttctgggtttcaagagaaaatttcagcatcagtgatcagttctagcagtggtgtcatgcctaccattgttactgacaacgttgctacttctgaggataataatggttgttcaataggtgtttcttctgttgattcttctgttttactagacgaaaaggatttgagaacgtccacagtgaataatgaggagccattcaaggaaggcactaaatctgctttaggagatcaagaaaacgatggtatttctcctggctctgaacaaggaggggaaatgccagctgtgcccatggattcaaacattgccgtttatagtgatactgtttctgctacagaaaaggagaaatacaaggaccatcctaattctttgggtagtttgaccacaggaggaacccaggataaatcaggtaaccatccagatgctctttcactgaaatgccagactggtagatcttcaatacatacagatcttatagatccaaccacggcacctatgttaggtatcccaactggaaaggtggctgaaaagatagtaaaaactccactgaatgcaagtgatgatttgaatgcacatatgcaagacatagtgttaaatcatggtacggattgtagtcctggtactgtgacatcccaaggaaaggaaggctcaagcttgctggaacctggtaatggtatctgcactggggttacatgcggatccccttcagtgattagttgcgctgaatcgtttccccaaggtggtggaaatggcagcaatgatttacttgatcacacactatgtgggcaatctgaggatcctaaagaccgtggggcctcagctgatgctactcagagatcaaaacaatgctgtaccagaaacatgaaatctgctcctggttctgaggagactagtgcagcaggaggtgatagaagcttttcatttgaggtgggagctccacccaatgttgctgagaaagcacatagctctgtttggagtccttttcatttgaagagtactgagacggtcacagaaaatcttcaagctggaagttctttgaaggatactagtgatgataatttagtgaattttccattcacagaggcacagcatttgcagctacgcgcacaaatatttgtttatggagctcttatgtga

SEQ ID NO: 80714 - DNA, 3246 bp, Zea Mays
caccagtccaccgcaaggcacactcctgtctccaccctgctccgctctttgctcccgctcccgctcccgctcgcctacgctacttgccgttcatcgccggccacagcctctgcccccgccgcttagagttcgcctccgtcgctgctgcaggagctagggtttccggcgccgggcgccggggtatgagcatccgccgccgccgccctgcaggatctaaggtttcgacgactccgctcactgatggagggtggtagaagggcgagcgagtccctctcggcatacacccatggaccatgacgatactgattttcagagccaaaattttcaactagctggtgtaggaagtagcaaattcccatcaggtttgcgaccatttgcactgccaaaacttgatatcgaggaccaactacaaggccatcttcgatttgataatttgatagattcagaagcatttttcagcgtacaagggcacgagaatagctggattgaggttctgtccactggaagcagtgttgttgattttagctctagcgcagctgaatcttgctcgatatctaaaactaataatgtctggtcagaggcaacgtccacagaatctgtcgaaatgctattgaaatcagtgggaggaaatgagacaactggtaacatggacagtaatgctcaccttcagttaattggtatggacagtcaaactgatcaatcgagtgttcatcctaaatctagtacctccccgacagatagtactgtagtgccaactgagaaagatcagtcttggagcactcattctagaatgactgctgacctttcaaacactgagtctcagcttgaacattttgtgcctttcttactggacaagaaagctgcgcaggcagcagattctgttgctgagaagtgccttacaggtgagaagttgtcctcttcaaacaacacaccaggaagctgcccaactgttggcaactattttggggcaggccatgatgataattctttggacaaatttaatgtaccctcagctgaagtagattcaaagaaattgaataatgaatctttcccagagttggctcccctgcagaacatatatactgattcatatcacttcaagaaagatattaaagaatctgaggctgttgttactcctcaagattcgaagttttgccatatcaatgaaaataaagttgaaggtggactacaagaactgcaaaatttgtcatgtgctggtcagtccttgggcgctgtaaacttgtccagtccaccaagcaatgaaactctattgtcaaaaagttctgatggattactagaagccatcacaaatccagttaagatgctgcacaggagcgatgatacttgccataaagtgaacatcactcttcaaccatcttttttagcagtgcaacatggaactgaaggcctgaaaagttcagttcacaggagcaatgagcttgttgttaaggagtttagtattggttcaaattctcttatctctcaccaatctgaggcagacccaagaaattctaatccacatcctgtcagttctgtgtctcccaaaagtaaaattaccgatgccacttgtgttcctgaagaaacaaacaacactgaaacgaatagtacaaacacctgctatacatatgatgaatcaaaacatgtagtgctggagtacaatcaaggttctgttgacaagctaaaaagtggtgacatgggagaaaaggcaactggggaggaaataccagcagtttcagggagcattgagcaaatgatagaaaattatcatgaagaaaatgctactggtacatccaacaataaggttggcctttccgacagtattgcacctgaaaactgtgcagctgacactttgaatgcttcagaggaaccaaacagtccttcgttaaatcatgagaggtcatttgaggaacacgaattgcctgctttaggagaggagcctaaaagcacaaatttactcctttctacttctgggtttcaagagaaaatttcagcatcagtgatcagttctagcagtggtgtcatgcctaccattgttactgacaacgttgctacttctgaggataataatggttgttcaataggtgtttcttctgttgattcttctgttttactagacgaaaaggatttgagaacgtccacagtgaataatgaggagccattcaaggaaggcactaaatctgctttaggagatcaagaaaacgatggtatttctcctggctctgaacaaggaggggaaatgccagctgtgcccatggattcaaacattgccgtttatagtgatactgtttctgctacagaaaaggagaaatacaaggaccatcctaattctttgggtagtttgaccacaggaggaacccaggataaatcaggtaaccatccagatgctctttcactgaaatgccagactggtagatcttcaatacatacagatcttatagatccaaccacggcacctatgttaggtatcccaactggaaaggtggctgaaaagatagtaaaaactccactgaatgcaagtgatgatttgaatgcacatatgcaagacatagtgttaaatcatggtacggattgtagtcctggtactgtgacatcccaaggaaaggaaggctcaagcttgctggaacctggtaatggtatctgcactggggttacatgcggatccccttcagtgattagttgcgctgaatcgtttccccaaggtggtggaaatggcagcaatgatttacttgatcacacactatgtgggcaatctgaggatcctaaagaccgtggggcctcagctgatgctactcagagatcaaaacaatgctgtaccagaaacatgaaatctgctcctggttctgaggagactagtgcagcaggaggtgatagaagcttttcatttgaggtgggagctccacccaatgttgctgagaaagcacatagctctgtttggagtccttttcatttgaagagtactgagaaaatcttcaagctggaagttctttgaaggatactagtgatgatagtaagaaaacatctactatagatgcttgtaaagaacaactatcagaaaggaaagtggctgaaagttctgggggcagccccccagacaactctaatataggcggcagcattaagagcagaagttcgccaccgcagcagcatccaatccctgagtgttctgatttagtgaattttccattcacagaggcacagcatttgcagctacgcgcacaaatatttgtttatggagctcttatgtga

SEQ ID NO: 80715 - DNA, 3004 bp, Zea Mays
caccagtccaccgcaaggcacactcctgtctccaccctgctccgctctttgctcccgctcccgctcccgctcgcctacgctacttgccgttcatcgccggccacagcctctgcccccgccgcttagagttcgcctccgtcgctgctgcaggagctagggtttccggcgccgggcgccggggtatgagcatccgccgccgccgccctgcaggatctaaggtttcgacgactccgctcactgatggagggtggtagaagggcgagcgagtccctctcggcatacacccatggaccatgacgatactgattttcagagccaaaattttcaactagctggtgtaggaagtagcaaattcccatcaggtttgcgaccatttgcactgccaaaacttgatatcgaggaccaactacaaggccatcttcgatttgataatttgatagattcagaagcatttttcagcgtacaagggcacgagaatagctggattgaggttctgtccactggaagcagtgttgttgattttagctctagcgcagctgaatcttgctcgatatctaaaactaataatgtctggtcagaggcaacgtccacagaatctgtcgaaatgctattgaaatcagtgggaggaaatgagacaactggtaacatggacagtaatgctcaccttcagttaattggtatggacagtcaaactgatcaatcgagtgttcatcctaaatctagtacctccccgacagatagtactgtagtgccaactgagaaagatcagtcttggagcactcattctagaatgactgctgacctttcaaacactgagtctcagcttgaacattttgtgcctttcttactggacaagaaagctgcgcaggcagcagattctgttgctgagaagtgccttacaggtgagaagttgtcctcttcaaacaacacaccaggaagctgcccaactgttggcaactattttggggcaggccatgatgataattctttggacaaatttaatgtaccctcagctgaagtagattcaaagaaattgaataatgaatctttcccagagttggctcccctgcagaacatatatactgattcatatcacttcaagaaagatattaaagaatctgaggctgttgttactcctcaagattcgaagttttgccatatcaatgaaaataaagttgaaggtggactacaagaactgcaaaatttgtcatgtgctggtcagtccttgggcgctgtaaacttgtccagtccaccaagcaatgaaactctattgtcaaaaagttctgatggattactagaagccatcacaaatccagttaagatgctgcacaggagcgatgatacttgccataaagtgaacatcactcttcaaccatcttttttagcagtgcaacatggaactgaaggcctgaaaagttcagttcacaggagcaatgagcttgttgttaaggagtttagtattggttcaaattctcttatctctcaccaatctgaggcagacccaagaaattctaatccacatcctgtcagttctgtgtctcccaaaagtaaaattaccgatgccacttgtgttcctgaagaaacaaacaacactgaaacgaatagtacaaacacctgctatacatatgatgaatcaaaacatgtagtgctggagtacaatcaaggttctgttgacaagctaaaaagtggtgacatgggagaaaaggcaactggggaggaaataccagcagtttcagggagcattgagcaaatgatagaaaattatcatgaagaaaatgctactggtacatccaacaataaggttggcctttccgacagtattgcacctgaaaactgtgcagctgacactttgaatgcttcagaggaaccaaacagtccttcgttaaatcatgagaggtcatttgaggaacacgaattgcctgctttaggagaggagcctaaaagcacaaatttactcctttctacttctgggtttcaagagaaaatttcagcatcagtgatcagttctagcagtggtgtcatgcctaccattgttactgacaacgttgctacttctgaggataataatggttgttcaataggtgtttcttctgttgattcttctgttttactagacgaaaaggatttgagaacgtccacagtgaataatgaggagccattcaaggaaggcactaaatctgctttaggagatcaagaaaacgatggtatttctcctggctctgaacaaggaggggaaatgccagctgtgcccatggattcaaacattgccgtttatagtgatactgtttctgctacagaaaaggagaaatacaaggaccatcctaattctttgggtagtttgaccacaggaggaacccaggataaatcaggtatcccaactggaaaggtggctgaaaagatagtaaaaactccactgaatgcaagtgatgatttgaatgcacatatgcaagacatagtgttaaatcatggtacggattgtagtcctggtactgtgacatcccaaggaaaggaaggctcaagcttgctggaacctggtaatggtatctgcactggggttacatgcggatccccttcagtgattagttgcgctgaatcgtttccccaaggtggtggaaatggcagcaatgatttacttgatcacacactatgtgggcaatctgaggatcctaaagaccgtggggcctcagctgatgctactcagagatcaaaacaatgctgtaccagaaacatgaaatctgctcctggttctgaggagactagtgcagcaggaggtgatagaagcttttcatttgaggtgggagctccacccaatgttgctgagaaagcacatagctctgtttggagtccttttcatttgaagagtactgagacggtcacagaaaatcttcaagctggaagttctttgaaggatactagtgatgataatttagtgaattttccattcacagaggcacagcatttgcagctacgcgcacaaatatttgtttatggagctcttatgtga

SEQ ID NO: 80716 - DNA, 3171 bp, Zea Mays
caccagtccaccgcaaggcacactcctgtctccaccctgctccgctctttgctcccgctcccgctcccgctcgcctacgctacttgccgttcatcgccggccacagcctctgcccccgccgcttagagttcgcctccgtcgctgctgcaggagctagggtttccggcgccgggcgccggggtatgagcatccgccgccgccgccctgcaggatctaaggtttcgacgactccgctcactgatggagggtggtagaagggcgagcgagtccctctcggcatacacccatggaccatgacgatactgattttcagagccaaaattttcaactagctggtgtaggaagtagcaaattcccatcaggtttgcgaccatttgcactgccaaaacttgatatcgaggaccaactacaaggccatcttcgatttgataatttgatagattcagaagcatttttcagcgtacaagggcacgagaatagctggattgaggttctgtccactggaagcagtgttgttgattttagctctagcgcagctgaatcttgctcgatatctaaaactaataatgtctggtcagaggcaacgtccacagaatctgtcgaaatgctattgaaatcagtgggaggaaatgagacaactggtaacatggacagtaatgctcaccttcagttaattggtatggacagtcaaactgatcaatcgagtgttcatcctaaatctagtacctccccgacagatagtactgtagtgccaactgagaaagatcagtcttggagcactcattctagaatgactgctgacctttcaaacactgagtctcagcttgaacattttgtgcctttcttactggacaagaaagctgcgcaggcagcagattctgttgctgagaagtgccttacaggtgagaagttgtcctcttcaaacaacacaccaggaagctgcccaactgttggcaactattttggggcaggccatgatgataattctttggacaaatttaatgtaccctcagctgaagtagattcaaagaaattgaataatgaatctttcccagagttggctcccctgcagaacatatatactgattcatatcacttcaagaaagatattaaagaatctgaggctgttgttactcctcaagattcgaagttttgccatatcaatgaaaataaagttgaaggtggactacaagaactgcaaaatttgtcatgtgctggtcagtccttgggcgctgtaaacttgtccagtccaccaagcaatgaaactctattgtcaaaaagttctgatggattactagaagccatcacaaatccagttaagatgctgcacaggagcgatgatacttgccataaagtgaacatcactcttcaaccatcttttttagcagtgcaacatggaactgaaggcctgaaaagttcagttcacaggagcaatgagcttgttgttaaggagtttagtattggttcaaattctcttatctctcaccaatctgaggcagacccaagaaattctaatccacatcctgtcagttctgtgtctcccaaaagtaaaattaccgatgccacttgtgttcctgaagaaacaaacaacactgaaacgaatagtacaaacacctgctatacatatgatgaatcaaaacatgtagtgctggagtacaatcaaggttctgttgacaagctaaaaagtggtgacatgggagaaaaggcaactggggaggaaataccagcagtttcagggagcattgagcaaatgatagaaaattatcatgaagaaaatgctactggtacatccaacaataaggttggcctttccgacagtattgcacctgaaaactgtgcagctgacactttgaatgcttcagaggaaccaaacagtccttcgttaaatcatgagaggtcatttgaggaacacgaattgcctgctttaggagaggagcctaaaagcacaaatttactcctttctacttctgggtttcaagagaaaatttcagcatcagtgatcagttctagcagtggtgtcatgcctaccattgttactgacaacgttgctacttctgaggataataatggttgttcaataggtgtttcttctgttgattcttctgttttactagacgaaaaggatttgagaacgtccacagtgaataatgaggagccattcaaggaaggcactaaatctgctttaggagatcaagaaaacgatggtatttctcctggctctgaacaaggaggggaaatgccagctgtgcccatggattcaaacattgccgtttatagtgatactgtttctgctacagaaaaggagaaatacaaggaccatcctaattctttgggtagtttgaccacaggaggaacccaggataaatcaggtaaccatccagatgctctttcactgaaatgccagactggtagatcttcaatacatacagatcttatagatccaaccacggcacctatgttaggtatcccaactggaaaggtggctgaaaagatagtaaaaactccactgaatgcaagtgatgatttgaatgcacatatgcaagacatagtgttaaatcatggtacggattgtagtcctggtactgtgacatcccaaggaaaggaaggctcaagcttgctggaacctggtaatggtatctgcactggggttacatgcggatccccttcagtgattagttgcgctgaatcgtttccccaaggtggtggaaatggcagcaatgatttacttgatcacacactatgtgggcaatctgaggatcctaaagaccgtggggcctcagctgatgctactcagagatcaaaacaatgctgtaccagaaacatgaaatctgctcctggttctgaggagactagtgcagcaggaggtgatagaagcttttcatttgagaaaatcttcaagctggaagttctttgaaggatactagtgatgatagtaagaaaacatctactatagatgcttgtaaagaacaactatcagaaaggaaagtggctgaaagttctgggggcagccccccagacaactctaatataggcggcagcattaagagcagaagttcgccaccgcagcagcatccaatccctgagtgttctgatttagtgaattttccattcacagaggcacagcatttgcagctacgcgcacaaatatttgtttatggagctcttatgtga

SEQ ID NO: 80717 - DNA, 3163 bp, Zea Mays
caccagtccaccgcaaggcacactcctgtctccaccctgctccgctctttgctcccgctcccgctcccgctcgcctacgctacttgccgttcatcgccggccacagcctctgcccccgccgcttagagttcgcctccgtcgctgctgcaggagctagggtttccggcgccgggcgccggggtatgagcatccgccgccgccgccctgcaggatctaaggtttcgacgactccgctcactgatggagggtggtagaagggcgagcgagtccctctcggcatacacccatggaccatgacgatactgattttcagagccaaaattttcaactagctggtgtaggaagtagcaaattcccatcaggtttgcgaccatttgcactgccaaaacttgatatcgaggaccaactacaaggccatcttcgatttgataatttgatagattcagaagcatttttcagcgtacaagggcacgagaatagctggattgaggttctgtccactggaagcagtgttgttgattttagctctagcgcagctgaatcttgctcgatatctaaaactaataatgtctggtcagaggcaacgtccacagaatctgtcgaaatgctattgaaatcagtgggaggaaatgagacaactggtaacatggacagtaatgctcaccttcagttaattggtatggacagtcaaactgatcaatcgagtgttcatcctaaatctagtacctccccgacagatagtactgtagtgccaactgagaaagatcagtcttggagcactcattctagaatgactgctgacctttcaaacactgagtctcagcttgaacattttgtgcctttcttactggacaagaaagctgcgcaggcagcagattctgttgctgagaagtgccttacaggtgagaagttgtcctcttcaaacaacacaccaggaagctgcccaactgttggcaactattttggggcaggccatgatgataattctttggacaaatttaatgtaccctcagctgaagtagattcaaagaaattgaataatgaatctttcccagagttggctcccctgcagaacatatatactgattcatatcacttcaagaaagatattaaagaatctgaggctgttgttactcctcaagattcgaagttttgccatatcaatgaaaataaagttgaaggtggactacaagaactgcaaaatttgtcatgtgctggtcagtccttgggcgctgtaaacttgtccagtccaccaagcaatgaaactctattgtcaaaaagttctgatggattactagaagccatcacaaatccagttaagatgctgcacaggagcgatgatacttgccataaagtgaacatcactcttcaaccatcttttttagcagtgcaacatggaactgaaggcctgaaaagttcagttcacaggagcaatgagcttgttgttaaggagtttagtattggttcaaattctcttatctctcaccaatctgaggcagacccaagaaattctaatccacatcctgtcagttctgtgtctcccaaaagtaaaattaccgatgccacttgtgttcctgaagaaacaaacaacactgaaacgaatagtacaaacacctgctatacatatgatgaatcaaaacatgtagtgctggagtacaatcaaggttctgttgacaagctaaaaagtggtgacatgggagaaaaggcaactggggaggaaataccagcagtttcagggagcattgagcaaatgatagaaaattatcatgaagaaaatgctactggtacatccaacaataaggttggcctttccgacagtattgcacctgaaaactgtgcagctgacactttgaatgcttcagaggaaccaaacagtccttcgttaaatcatgagaggtcatttgaggaacacgaattgcctgctttaggagaggagcctaaaagcacaaatttactcctttctacttctgggtttcaagagaaaatttcagcatcagtgatcagttctagcagtggtgtcatgcctaccattgttactgacaacgttgctacttctgaggataataatggttgttcaataggtgtttcttctgttgattcttctgttttactagacgaaaaggatttgagaacgtccacagtgaataatgaggagccattcaaggaaggcactaaatctgctttaggagatcaagaaaacgatggtatttctcctggctctgaacaaggaggggaaatgccagctgtgcccatggattcaaacattgccgtttatagtgatactgtttctgctacagaaaaggagaaatacaaggaccatcctaattctttgggtagtttgaccacaggaggaacccaggataaatcaggtatcccaactggaaaggtggctgaaaagatagtaaaaactccactgaatgcaagtgatgatttgaatgcacatatgcaagacatagtgttaaatcatggtacggattgtagtcctggtactgtgacatcccaaggaaaggaaggctcaagcttgctggaacctggtaatggtatctgcactggggttacatgcggatccccttcagtgattagttgcgctgaatcgtttccccaaggtggtggaaatggcagcaatgatttacttgatcacacactatgtgggcaatctgaggatcctaaagaccgtggggcctcagctgatgctactcagagatcaaaacaatgctgtaccagaaacatgaaatctgctcctggttctgaggagactagtgcagcaggaggtgatagaagcttttcatttgaggtgggagctccacccaatgttgctgagaaagcacatagctctgtttggagtccttttcatttgaagagtactgagacggtcacagaaaatcttcaagctggaagttctttgaaggatactagtgatgatagtaagaaaacatctactatagatgcttgtaaagaacaactatcagaaaggaaagtggctgaaagttctgggggcagccccccagacaactctaatataggcggcagcattaagagcagaagttcgccaccgcagcagcatccaatccctgagtgttctgatttagtgaattttccattcacagaggcacagcatttgcagctacgcgcacaaatatttgtttatggagctcttatgtga

SEQ ID NO: 80718 - DNA, 3181 bp, Zea Mays
caccagtccaccgcaaggcacactcctgtctccaccctgctccgctctttgctcccgctcccgctcccgctcgcctacgctacttgccgttcatcgccggccacagcctctgcccccgccgcttagagttcgcctccgtcgctgctgcaggagctagggtttccggcgccgggcgccggggtatgagcatccgccgccgccgccctgcaggatctaaggtttcgacgactccgctcactgatggagggtggtagaagggcgagcgagtccctctcggcatacacccatggaccatgacgatactgattttcagagccaaaattttcaactagctggtgtaggaagtagcaaattcccatcaggtttgcgaccatttgcactgccaaaacttgatatcgaggaccaactacaaggccatcttcgatttgataatttgatagattcagaagcatttttcagcgtacaagggcacgagaatagctggattgaggttctgtccactggaagcagtgttgttgattttagctctagcgcagctgaatcttgctcgatatctaaaactaataatgtctggtcagaggcaacgtccacagaatctgtcgaaatgctattgaaatcagtgggaggaaatgagacaactggtaacatggacagtaatgctcaccttcagttaattggtatggacagtcaaactgatcaatcgagtgttcatcctaaatctagtacctccccgacagatagtactgtagtgccaactgagaaagatcagtcttggagcactcattctagaatgactgctgacctttcaaacactgagtctcagcttgaacattttgtgcctttcttactggacaagaaagctgcgcaggcagcagattctgttgctgagaagtgccttacaggtgagaagttgtcctcttcaaacaacacaccaggaagctgcccaactgttggcaactattttggggcaggccatgatgataattctttggacaaatttaatgtaccctcagctgaagtagattcaaagaaattgaataatgaatctttcccagagttggctcccctgcagaacatatatactgattcatatcacttcaagaaagatattaaagaatctgaggctgttgttactcctcaagattcgaagttttgccatatcaatgaaaataaagttgaaggtggactacaagaactgcaaaatttgtcatgtgctggtcagtccttgggcgctgtaaacttgtccagtccaccaagcaatgaaactctattgtcaaaaagttctgatggattactagaagccatcacaaatccagttaagatgctgcacaggagcgatgatacttgccataaagtgaacatcactcttcaaccatcttttttagcagtgcaacatggaactgaaggcctgaaaagttcagttcacaggagcaatgagcttgttgttaaggagtttagtattggttcaaattctcttatctctcaccaatctgaggcagacccaagaaattctaatccacatcctgtcagttctgtgtctcccaaaagtaaaattaccgatgccacttgtgttcctgaagaaacaaacaacactgaaacgaatagtacaaacacctgctatacatatgatgaatcaaaacatgtagtgctggagtacaatcaaggttctgttgacaagctaaaaagtggtgacatgggagaaaaggcaactggggaggaaataccagcagtttcagggagcattgagcaaatgatagaaaattatcatgaagaaaatgctactggtacatccaacaataaggttggcctttccgacagtattgcacctgaaaactgtgcagctgacactttgaatgcttcagaggaaccaaacagtccttcgttaaatcatgagaggtcatttgaggaacacgaattgcctgctttaggagaggagcctaaaagcacaaatttactcctttctacttctgggtttcaagagaaaatttcagcatcagtgatcagttctagcagtggtgtcatgcctaccattgttactgacaacgttgctacttctgaggataataatggttgttcaataggtgtttcttctgttgattcttctgttttactagacgaaaaggatttgagaacgtccacagtgaataatgaggagccattcaaggaaggcactaaatctgctttaggagatcaagaaaacgatggtatttctcctggctctgaacaaggaggggaaatgccagctgtgcccatggattcaaacattgccgtttatagtgatactgtttctgctacagaaaaggagaaatacaaggaccatcctaattctttgggtagtttgaccacaggaggaacccaggataaatcaggtaaccatccagatgctctttcactgaaatgccagactggtagatcttcaatacatacagatcttatagatccaaccacggcacctatgttaggtatcccaactggaaaggtggctgaaaagatagtaaaaactccactgaatgcaagtgatgatttgaatgcacatatgcaagacatagtgttaaatcatggtacggattgtagtcctggtactgtgacatcccaaggaaaggaaggctcaagcttgctggaacctggtaatggtatctgcactggggttacatgcggatccccttcagtgattagttgcgctgaatcgtttccccaaggtggtggaaatggcagcaatgatttacttgatcacacactatgtgggcaatctgaggatcctaaagaccgtggggcctcagctgatgctactcagagatcaaaacaatgctgtaccagaaacatgaaatctgctcctggttctgaggagactagtgcagcaggaggtgatagaagcttttcatttgagacggtcacagaaaatcttcaagctggaagttctttgaaggatactagtgatgatagtaagaaaacatctactatagatgcttgtaaagaacaactatcagaaaggaaagtggctgaaagttctgggggcagccccccagacaactctaatataggcggcagcattaagagcagaagttcgccaccgcagcagcatccaatccctgagtgttctgatttagtgaattttccattcacagaggcacagcatttgcagctacgcgcacaaatatttgtttatggagctcttatgtga

SEQ ID NO: 80719 - DNA, 3166 bp, Zea Mays
gcatacacccatggaccatgacgatactgattttcagagccaaaattttcaactagctggtgtaggaagtagcaaattcccatcaggtttgcgaccatttgcactgccaaaacttgatatcgaggaccaactacaaggccatcttcgatttgataatttgatagattcagaagcatttttcagcgtacaagggcacgagaatagctggattgaggttctgtccactggaagcagtgttgttgattttagctctagcgcagctgaatcttgctcgatatctaaaactaataatgtctggtcagaggcaacgtccacagaatctgtcgaaatgctattgaaatcagtgggaggaaatgagacaactggtaacatggacagtaatgctcaccttcagttaattggtatggacagtcaaactgatcaatcgagtgttcatcctaaatctagtacctccccgacagatagtactgtagtgccaactgagaaagatcagtcttggagcactcattctagaatgactgctgacctttcaaacactgagtctcagcttgaacattttgtgcctttcttactggacaagaaagctgcgcaggcagcagattctgttgctgagaagtgccttacaggtgagaagttgtcctcttcaaacaacacaccaggaagctgcccaactgttggcaactattttggggcaggccatgatgataattctttggacaaatttaatgtaccctcagctgaagtagattcaaagaaattgaataatgaatctttcccagagttggctcccctgcagaacatatatactgattcatatcacttcaagaaagatattaaagaatctgaggctgttgttactcctcaagattcgaagttttgccatatcaatgaaaataaagttgaaggtggactacaagaactgcaaaatttgtcatgtgctggtcagtccttgggcgctgtaaacttgtccagtccaccaagcaatgaaactctattgtcaaaaagttctgatggattactagaagccatcacaaatccagttaagatgctgcacaggagcgatgatacttgccataaagtgaacatcactcttcaaccatcttttttagcagtgcaacatggaactgaaggcctgaaaagttcagttcacaggagcaatgagcttgttgttaaggagtttagtattggttcaaattctcttatctctcaccaatctgaggcagacccaagaaattctaatccacatcctgtcagttctgtgtctcccaaaagtaaaattaccgatgccacttgtgttcctgaagaaacaaacaacactgaaacgaatagtacaaacacctgctatacatatgatgaatcaaaacatgtagtgctggagtacaatcaaggttctgttgacaagctaaaaagtggtgacatgggagaaaaggcaactggggaggaaataccagcagtttcagggagcattgagcaaatgatagaaaattatcatgaagaaaatgctactggtacatccaacaataaggttggcctttccgacagtattgcacctgaaaactgtgcagctgacactttgaatgcttcagaggaaccaaacagtccttcgttaaatcatgagaggtcatttgaggaacacgaattgcctgctttaggagaggagcctaaaagcacaaatttactcctttctacttctgggtttcaagagaaaatttcagcatcagtgatcagttctagcagtggtgtcatgcctaccattgttactgacaacgttgctacttctgaggataataatggttgttcaataggtgtttcttctgttgattcttctgttttactagacgaaaaggatttgagaacgtccacagtgaataatgaggagccattcaaggaaggcactaaatctgctttaggagatcaagaaaacgatggtatttctcctggctctgaacaaggaggggaaatgccagctgtgcccatggattcaaacattgccgtttatagtgatactgtttctgctacagaaaaggagaaatacaaggaccatcctaattctttgggtagtttgaccacaggaggaacccaggataaatcaggtaaccatccagatgctctttcactgaaatgccagactggtagatcttcaatacatacagatcttatagatccaaccacggcacctatgttaggtatcccaactggaaaggtggctgaaaagatagtaaaaactccactgaatgcaagtgatgatttgaatgcacatatgcaagacgccgtcgtcgccaagcataagaccacgccggagctcgctgaggacaccgcaagcctcggcacgggaatggttgtgttcgacgcctacgctggaggagtccccacggccgcagggaccaacaggctccgcgcagtcggccgaggctggagtgctggacacagccgctgcctgcgttggtgcacccagccgtggaaatggttaactaaagacatagtgttaaatcatggtacggattgtagtcctggtactgtgacatcccaaggaaaggaaggctcaagcttgctggaacctggtaatggtatctgcactggggttacatgcggatccccttcagtgattagttgcgctgaatcgtttccccaaggtggtggaaatggcagcaatgatttacttgatcacacactatgtgggcaatctgaggatcctaaagaccgtggggcctcagctgatgctactcagagatcaaaacaatgctgtaccagaaacatgaaatctgctcctggttctgaggagactagtgcagcaggaggtgatagaagcttttcatttgaggtgggagctccacccaatgttgctgagaaagcacatagctctgtttggagtccttttcatttgaagagtactgagacggtcacagaaaatcttcaagctggaagttctttgaaggatactagtgatgatagtaagaaaacatctactatagatgcttgtaaagaacaactatcagaaaggaaagtggctgaaagttctgggggcagccccccagacaactctaatataggcggcagcattaagagcagaagttcgccaccgcagcagcatccaatccctgagtgttctgaggcacagcatttgcagctacgcgcacaaatatttgtttatggagctcttatgtga

SEQ ID NO: 80720 - DNA, 1346 bp, Zea Mays
cgccaatacgccggggatagaaaaatccccaccgaggcgtggaagacagccatcgttctcgcgtggcggcgtcgctaaccctagatcaagacgagtgcatccacggctctccacgccgccgccgatctcgtcgagaggcatccacgactctccacgccgccgccgatctcgttcatccagcgtcaagaatgtttggaagaggatctcctaggatgaacctgatccaagctgcagctatgcaaagagtatcccctagatctactactaacaagcgcaagaagagaacatcaccaaaagttggtcgtcttagagcaaactggaatagtggactagaaaagggtttaattgaaattcttcaagaccacaacaatgactattataagggccaaaatgggtggtcatcggaagcatggaatagaattgtcaagttattccatgagaaattcccttatgtcacatttacaaaatgtcaaatccaagataaagagaaagagttaaagagagactacaaggctcttaaagaggcaagacaacaaagtggggtatcatgggatgagcggttgtgtagaatagaggcagaagaacccatttggaataacctcaccactagtaacgagagacttaagaagtttcggactaaatctttcccactatttgaggctttaggagagctacatgatgagatgaaagaaaaacaagatgaggtggagaaaagggcgacaactaatgcaaatgaggatgatttccctattacaacatgcattgctattgttgatggaatggaagagctttctgatgatgagaaggttgatgcttatgatgtgtttaaggacgcccaaaatagggccattttcatgactgccaaagatgctacacgcataaaatggttgaggaagaagattgctagaacatgatatgtgttgtttgaaacttgagggctcaaagaaaatgcaatgaagaatttggaagaccttgaaattattactagcaattgtttaaaagcaatctagtaggcgaactttccgttggaacctgtcatatcacttgtgaaatcttcattttttaaaagcacctctgaatgtgatccttcgtgtcattaaatcaagactacaaagatggatgtttatttaatttaccataagcacctctgaatgtaatacttcttgttattaaatcaggactagaacgatgaatgttttttctaagcacttttaaatgctatgttaatttgcacattcgatgtgccatggtctttagtatttgtgctatttttcagagttattttaaatttcaatataaatattagtattttttgttttattttaaatttcaaatttgaatattac

SEQ ID NO: 80721 - DNA, 1893 bp, Zea Mays
gaaaaatccccaccgaggcgtggaagacagccatcgttctcgcgtggcggcgtcgctaaccctagatcaagacgagtgcatccacggctctccacgccgccgccgatctcgtcgagaggcatccacgactctccacgccgccgccgatctcgttcatccagcgtcaagaatgtttggaagaggatctcctaggatgaacctgatccaagctgcagctatgcaaagagtatcccctagatctactactaacaagcgcaagaagagaacatcaccaaaagttggtcgtcttagagcaaactggaatagtggactagaaaagggtttaattgaaattcttcaagaccacaacaatgactattataagggccaaaatgggtggtcatcggaagcatggaatagaattgtcaagttattccatgagaaattcccttatgtcacatttacaaaatgtcaaatccaagataaagagaaagagttaaagagagactacaaggctcttaaagaggcaagacaacaaagtggggtatcatgggatgagcggttgtgtagaatagaggcagaagaacccatttggaataacctcaccactagtaacgagagacttaagaagtttcggactaaatctttcccactatttgaggctttaggagagctacatgatggtctgttatctatgttttttctttatcttagtattgggcctcttatttttatcctagtattgaagtcttaaagacttacaacgcttcttggtttagggaatattgctgagggaaccatgaattttacttctattgagccttcccgacctccagtcacacaaccttgtcaaggtgctgctacacatccttctcaagctgcttttacgctcacatagccttctcaacccacttttacacaaccttctcaacccgctttcacacaaccttctcaacccgctttcacacaaccttctcgaattgcttacacacaaccttctcaagccgctttcacacagccttctcaagccgctttcgcacgaccttctcaagccgctttcgcacagccttctcaagctacaatcacacaagccatttctaatgaagatgatgaccttagagtattagatccaatagcccctacatcagtgagcaaaagggcaaaaaatgttggtgctggtagttcaaggacaagaattgacaagcgtggacaagatgggaaggtggttgagatgatggaaaggttttagagatgaaagaaaaacaagatgaggtggagaaaagggcgacaactaatgcaaatgaggatgatttccctattacaacatgcattgctattgttgatggaatggaagagctttctgatgatgagaaggttgatgcttatgatgtgtttaaggacgcccaaaatagggccattttcatgactgccaaagatgctacacgcataaaatggttgaggaagaagattgctagaacatgatatgtgttgtttgaaacttgagggctcaaagaaaatgcaatgaagaatttggaagaccttgaaattattactagcaattgtttaaaagcaatctagtaggcgaactttccgttggaacctgtcatatcacttgtgaaatcttcattttttaaaagcacctctgaatgtgatccttcgtgtcattaaatcaagactacaaagatggatgtttatttaatttaccataagcacctctgaatgtaatacttcttgttattaaatcaggactagaacgatgaatgttttttctaagcacttttaaatgctatgttaatttgcacattcgatgtgccatggtctttagtatttgtgctatttttcagagttattttaaatttcaatataaatattagtattttttgttttattttaaatttcaaatttgaatattac

SEQ ID NO: 80722 - DNA, 1102 bp, Zea Mays
aaaatccccaccgaggcgtggaagacagccatcgttctcgcgtggcggcgtcgctaaccctagatcaagacgagtgcatccacggctctccacgccgccgccgatctcgtcgagaggcatccacgactctccacgccgccgccgatctcgttcatccagcgtcaagaatgtttggaagaggatctcctaggatgaacctgatccaagctgcagctatgcaaagagtatcccctagatctactactaacaagcgcaagaagagaacatcaccaaaagttggtcgtcttagagcaaactggaatagtggactagaaaagggtttaattgaaattcttcaagaccacaacaatgactattataagggccaaaatgggtggtcatcggaagcatggaatagaattgtcaagttattccatgagaaattcccttatgtcacatttacaaaatgtcaaatccaagataaagagaaagagttaaagagagactacaaggctcttaaagaggcaagacaacaaagtggggtatcatgggatgagcggttgtgtagaatagaggcagaagaacccatttggaataacctcaccacttaacgagagacttaagaagtttcggactaaatctttcccactatttgaggctttaggagagctacatgatggtctgttatctatgttttttctttatcttagtattgggcctcttatttttatcctagtattgaagtcttaaagacttacaacgcttcttggtttagggaatattgctgagggaaccatgaattttacttctattgagccttcccgacctccagtcacacaaccttgtcaaggtgctgctacacatccttctcaagctgcttttacgctcacatagccttctcaacccacttttacacaaccttctcaacccgctttcacacaaccttctcaacccgctttcacacaaccttctcgaattgcttacacacaaccttctcaagccgctttcacacagccttctcaagccgctttcgcacgaccttctcaagccgctttcgcacagccttctcaagctacaatcacacaagccatttctaatgaagatgatgaccttagagtattag

SEQ ID NO: 80723 - DNA, 1847 bp, Zea Mays
agacagccatcgttctcgcgtggcggcgtcgctaaccctagatcaagacgagtgcatccacggctctccacgccgccgccgatctcgtcgagaggcatccacgactctccacgccgccgccgatctcgttcatccagcgtctacagatgctagggttctaaggtctgcgctacttggaggattccatgttcctgagggaaagtattatcttgtcgatggaggatatgctaacacaccatcattcattgcaccgtaccgtggtgttcgataccatttgaaagaatttggccatggtcaccaacgaccaagaaactataaggaattatttaatcaccgacatgctttattgcggaaccacatagagagagcaataggagttttgaagaagcgtttccccattctaaaagttggaacacaccacccaattaggaaccaagtgaaaataccagctgcggcagtgttgttccataatattatacggatgcataatggggatgaagattggttgaatagccaaacaagtaacatatcgccagaaacttttgttgatcttcctggaggagacaattactataacagtgatgtcgtgtcgcttaatagccaagtggataatgggaactctgttagagatatgattgcattgaatatgtggaatgattatagtcaacatcgttcatgatatatcaagaatgtttggaagaggatctcctaggatgaacctgatccaagctgcagctatgcaaagagtatcccctagatctactactaacaagcgcaagaagagaacatcaccaaaagttggtcgtcttagagcaaactggaatagtggactagaaaagggtttaattgaaattcttcaagaccacaacaatgactattataagggccaaaatgggtggtcatcggaagcatggaatagaattgtcaagttattccatgagaaattcccttatgtcacatttacaaaatgtcaaatccaagataaagagaaagagttaaagagagactacaaggctcttaaagaggcaagacaacaaagtggggtatcatgggatgagcggttgtgtagaatagaggcagaagaacccatttggaataacctcaccactagtaacgagagacttaagaagtttcggactaaatctttcccactatttgaggctttaggagagctacatgatgagatgaaagaaaaacaagatgaggtggagaaaagggcgacaactaatgcaaatgaggatgatttccctattacaacatgcattgctattgttgatggaatggaagagctttctgatgatgagaaggttgatgcttatgatgtgtttaaggacgcccaaaatagggccattttcatgactgccaaagatgctacacgcataaaatggttgaggaagaagattgctagaacatgatatgtgttgtttgaaacttgagggctcaaagaaaatgcaatgaagaatttggaagaccttgaaattattactagcaattgtttaaaagcaatctagtaggcgaactttccgttggaacctgtcatatcacttgtgaaatcttcattttttaaaagcacctctgaatgtgatccttcgtgtcattaaatcaagactacaaagatggatgtttatttaatttaccataagcacctctgaatgtaatacttcttgttattaaatcaggactagaacgatgaatgttttttctaagcacttttaaatgctatgttaatttgcacattcgatgtgccatggtctttagtatttgtgctatttttcagagttattttaaatttcaatataaatattagtattttttgttttattttaaatttcaaatttgaatattac

SEQ ID NO: 80724 - DNA, 1048 bp, Zea Mays
atgaatgaacaagagaagagaatagacgacgcagagagggggaaggagctgcgaggtgcgagaaaaaggaggccaaaagcagccgctgctgctgctgccttgttggcaagaatgtttggaagaggatctcctaggatgaacctgatccaagctgcagctatgcaaagagtatcccctagatctactactaacaagcgcaagaagagaacatcaccaaaagttggtcgtcttagagcaaactggaatagtggactagaaaagggtttaattgaaattcttcaagaccacaacaatgactattataagggccaaaatgggtggtcatcggaagcatggaatagaattgtcaagttattccatgagaaattcccttatgtcacatttacaaaatgtcaaatccaagataaagagaaagagttaaagagagactacaaggctcttaaagaggcaagacaacaaagtggggtatcatgggatgagcggttgtgtagaatagaggcagaagaacccatttggaataacctcaccactagtaacgagagacttaagaagtttcggactaaatctttcccactatttgaggctttaggagagctacatgatggtctgttatctatgttttttctttatcttagtattgggcctcttatttttatcctagtattgaagtcttaaagacttacaacgcttcttggtttagggaatattgctgagggaaccatgaattttacttctattgagccttcccgacctccagtcacacaaccttgtcaaggtgctgctacacatccttctcaagctgcttttacgctcacatagccttctcaacccacttttacacaaccttctcaacccgctttcacacaaccttctcaacccgctttcacacaaccttctcgaattgcttacacacaaccttctcaagccgctttcacacagccttctcaagccgctttcgcacgaccttctcaagccgctttcgcacagccttctcaagctacaatcacacaagccatttctaatgaagatgatgaccttagagtattag

SEQ ID NO: 80725 - DNA, 1449 bp, Zea Mays
aggattccatgttcctgagggaaagtattatcttgtcgatggaggatatgctaacacaccatcattcattgcaccgtaccgtggtgttcgataccatttgaaagaatttggccatggtcaccaacgaccaagaaactataaggaattatttaatcaccgacatgctttattgcggaaccacatagagagagcaataggagttttgaagaagcgtttccccattctaaaagttggaacacaccacccaattaggaaccaagtgaaaataccagctgcggcagtgttgttccataatattatacggatgcataatggggatgaagattggttgaatagccaaacaagtaacatatcgccagaaacttttgttgatcttcctggaggagacaattactataacagtgatgtcgtgtcgcttaatagccaagtggataatgggaactctgttagagatatgattgcattgaatatgtggaatgattatagtcaacatcgttcatgatatatcaagaatgtttggaagaggatctcctaggatgaacctgatccaagctgcagctatgcaaagagtatcccctagatctactactaacaagcgcaagaagagaacatcaccaaaagttggtcgtcttagagcaaactggaatagtggactagaaaagggtttaattgaaattcttcaagaccacaacaatgactattataagggccaaaatgggtggtcatcggaagcatggaatagaattgtcaagttattccatgagaaattcccttatgtcacatttacaaaatgtcaaatccaagataaagagaaagagttaaagagagactacaaggctcttaaagaggcaagacaacaaagtggggtatcatgggatgagcggttgtgtagaatagaggcagaagaacccatttggaataacctcaccactagtaacgagagacttaagaagtttcggactaaatctttcccactatttgaggctttaggagagctacatgatggtctgttatctatgttttttctttatcttagtattgggcctcttatttttatcctagtattgaagtcttaaagacttacaacgcttcttggtttagggaatattgctgagggaaccatgaattttacttctattgagccttcccgacctccagtcacacaaccttgtcaaggtgctgctacacatccttctcaagctgcttttacgctcacatagccttctcaacccacttttacacaaccttctcaacccgctttcacacaaccttctcaacccgctttcacacaaccttctcgaattgcttacacacaaccttctcaagccgctttcacacagccttctcaagccgctttcgcacgaccttctcaagccgctttcgcacagccttctcaagctacaatcacacaagccatttctaatgaagatgatgaccttagagtattag

SEQ ID NO: 80726 - DNA, 1819 bp, Zea Mays
atttatgtgttgagtcataactgtgccctagtcgtcccaccaactgataagcagaatcgatctcctcccatcacctccatcacaacctctcgacggcagcttcatccccacctcaatcggcggcagcctagggcttcatcccccacccccaattccatgtcatgtggatctgaatcagcccactcccaaatctccaatccactcgccggcttttcctcgtgcccagttcacgacatttgctcggggatctgaccaatgtcgtcttctgctcgtgttcctcgcagccgctcagattggagatcaagggtcaagttggtggacttgcaccccacataggcatggatgtcgagcctgtactcgaggagtgcctgcatctgggattatcaaacacagtcaatttgtaggagagaggacgccatacatcaaagatgactgaagaagaggaagatgaagaatacctcgaagaggaagaagatgcccttgctggtgcaggggggaacacatttagtttcacaaccttcatctcttaacccctccgatcccggtgcgtggcggattagactccgatggggaagtctctggcgaggtggatcaagttcgtgctcttcgggaagaagtcgtcgtccaggatgattttggattcaagctgaaagaagaggctatgctgaatagagtactaaaggagacaatcttgtcaaaggtagttgccattgaacaattgcaatctgatctggcatcttcatttcgcatccaagatgttatgagaaatgagatccagagagtccagaatgaactttcttgcataacccacaaagctaagcagttggagcttcaggatttccagtaatctacgaaggagctggctgctcttcgtggaacactgaaaacggtgatggaagacagggacctgtagtggcaggaggtgaagtagctgagaagaaacatgagcatcatgcagaacgaggttgtatcgctgaagaagaagatcgaagccttggacgaagacatacttgtcaaggagggacagatcacgatattgcaggacagcatcgacaagccgttcaacatcatctgcagcccaagttcgatgcaagagttcgacatggcgtgaagacggctgctgttttcttgctatgatgttctgaactatgatgggttcagcaggcgccatttttctcttagagcaattgttgacatataagaaatggtggcagcaccagcttaggatgtacaacaattgaatctcctacagaagttgtttctaatgtgctactgagctctattgtattccagcctacgcaatcttggtctccagtgtgcctccaagaaaagctccatagccccatagtttctgcaaaggttcaacaacttcaggatcaattataggatgagaagcaagaaaaaatggacttcatgaagaagcggaaaccattgataatatcaagaggtcgatggaagaaaataacaacctccttcgtcaactattaagcttcaattgaagacaagtgtctccatcataagtctagttgactactataggatctgcagtcttgtggcagctatagtaggtgtttatagtagctctagatttcaagctataggattattttttattatgtttaatgtttaatactttgagttgaagttataagatttgctttgaattttaagttaaaggatttgcagatatatggtttgaagttatatgcttatttgatggatgaattatttgtgttcaacaaattcatacgatattttggctatgatgtgtaatattctatgacgatatcaattcatatgatgtgttccttccgatgat

SEQ ID NO: 80727 - DNA, 2245 bp, Zea Mays
gtcataactgtgccctagtcgtcccaccaactgataagcagaatcgatctcctcccatcacctccatcacaacctctcgacggcagcttcatccccacctcaatcggcggcagcctagggcttcatcccccacccccaattccatgtcatgtggatctgaatcagcccactcccaaatctccaatccactcgccggcttttcctcgtgcccagttcacgacatttgctcggggatctgaccaatgtcgtcttctgctcgtgttcctcgcagccgctcagattggagatcaagggtcaagttggtggacttgcaccccacataggcatggatgtcgagcctgtactcgaggagtgcctgcatctgggattatcaaacacagtcaatttgtaggagagaggacgccatacatcaaagatgactgaagaagaggaagatgaagaatacctcgaagaggaagaagatgcccttgctggtgcaggggggaacacatttagtttcacaaccttcatgtgagccctttgttgactatttgttactaccttgacatatgctatttccttgctttaataactacctcaagttgacggaagaattacttgttaaatagatgtttttctttgttaccataaaattatttcaacgctatttatgaacctaggtaaattgagtcttgcactggctttgaaagtgaataagtgattcgggtgaggtgcaaactaaaacaatattattaagtatactgattcgggtgaggtgcaaattgaaccaacattatcccataaggccataactgatttttatatttatgttctataactaagatgaccaggaaccctgaaatgaatgctgacctattttgcccaataactactactcggtaaatggcatggtgtgtttgcctttgttgggagtggctatagtaataatctgaccaacatttcctgtagatgaattttggtagtggagtagatctgtgcactgatgtgtggttctgttgttgcaagctcttaacccctccgatcccggtgcgtggcggattagactccgatggggaagtctctggcgaggtggatcaagttcgtgctcttcgggaagaagtcgtcgtccaggatgattttggattcaagctgaaagaagaggctatgctgaatagagtactaaaggagacaatcttgtcaaaggtagttgccattgaacaattgcaatctgatctggcatcttcatttcgcatccaagatgttatgagaaatgagatccagagagtccagaatgaactttcttgcataacccacaaagctaagcagttggagcttcagaacgaggttgtatcgctgaagaagaagatcgaagccttggacgaagacatacttgtcaaggagggacagatcacgatattgcaggacagcatcgacaagccgttcaacatcatctgcagcccaagttcgatgcaagagttcgacatggcgtgaagacggctgctgttttgtaagtgagttggtggatgaaaattcaagttattgtagaagacaacatatttttttgcttattacagcttgctatgatgttctgaactatgatgggttcagcaggcgccatttttctcttagagcaattgttgacatataagaaatggtggcagcaccagcttaggatgtacaacaattgaatctcctacagaagttgtttctaatgtgctactgagctctattgtattccagcctacgcaatcttggtctccagtgtgcctccaagaaaagctccatagccccatagtttctgcaaaggttcaacaacttcaggatcaattataggatgagaagcaagaaaaaatggacttcatgaagaagcggaaaccattgataatatcaagaggtcgatggaagaaaataacaacctccttcgtcaactattaagcttcaattgaagacaagtgtctccatcataagtctagttgactactataggatctgcagtcttgtggcagctatagtaggtgtttatagtagctctagatttcaagctataggattattttttattatgtttaatgtttaatactttgagttgaagttataagatttgctttgaattttaagttaaaggatttgcagatatatggtttgaagttatatgcttatttgatggatgaattatttgtgttcaacaaattcatacgatattttggctatgatgtgtaatattctatgacgatatcaattcatatgatgtgttccttccgatgat

SEQ ID NO: 80728 - DNA, 2381 bp, Zea Mays
cctagtcgtcccaccaactgataagcagaatcgatctcctcccatcacctccatcacaacctctcgacggcagcttcatccccacctcaatcggcggcagcctagggcttcatcccccacccccaattccatgtcatgtggatctgaatcagcccactcccaaatctccaatccactcgccggcttttcctcgtgcccagttcacgacatttgctcggggatctgaccaatgtcgtcttctgctcgtgttcctcgcagccgctcagattggagatcaagtggaaattttctcaatggtcggacagggtcaagttggtggacttgcaccccacataggcatggatgtcgagcctgtactcgaggagtgcctgcatctgggattatcaaacacagtcaatttgtaggagagaggacgccatacatcaaagatgactgaagaagaggaagatgaagaatacctcgaagaggaagaagatgcccttgctggtgcaggggggaacacatttagtttcacaaccttcatgtgagccctttgttgactatttgttactaccttgacatatgctatttccttgctttaataactacctcaagttgacggaagaattacttgttaaatagatgtttttctttgttaccataaaattatttcaacgctatttatgaacctaggtaaattgagtcttgcactggctttgaaagtgaataagtgattcgggtgaggtgcaaactaaaacaatattattaagtatactgattcgggtgaggtgcaaattgaaccaacattatcccataaggccataactgatttttatatttatgttctataactaagatgaccaggaaccctgaaatgaatgctgacctattttgcccaataactactactcggtaaatggcatggtgtgtttgcctttgttgggagtggctatagtaataatctgaccaacatttcctgtagatgaattttggtagtggagtagatctgtgcactgatgtgtggttctgttgttgcaagctcttaacccctccgatcccggtgcgtggcggattagactccgatggggaagtctctggcgaggtggatcaagttcgtgctcttcgggaagaagtcgtcgtccaggatgattttggattcaagctgaaagaagaggctatgctgaatagagtactaaaggagacaatcttgtcaaaggtagttgccattgaacaattgcaatctgatctggcatcttcatttcgcatccaagatgttatgagaaatgagatccagagagtccagaatgaactttcttgcataacccacaaagctaagcagttggagcttcaggatttccagtaatctacgaaggagctggctgctcttcgtggaacactgaaaacggtgatggaagacagggacctgtagtggcaggaggtgaagtagctgagaagaaacatgagcatcatgcagaacgaggttgtatcgctgaagaagaagatcgaagccttggacgaagacatacttgtcaaggagggacagatcacgatattgcaggacagcatcgacaagccgttcaacatcatctgcagcccaagttcgatgcaagagttcgacatggcgtgaagacggctgctgttttgtaagtgagttggtggatgaaaattcaagttattgtagaagacaacatatttttttgcttattacagcttgctatgatgttctgaactatgatgggttcagcaggcgccatttttctcttagagcaattgttgacatataagaaatggtggcagcaccagcttaggatgtacaacaattgaatctcctacagaagttgtttctaatgtgctactgagctctattgtattccagcctacgcaatcttggtctccagtgtgcctccaagaaaagctccatagccccatagtttctgcaaaggttcaacaacttcaggatcaattataggatgagaagcaagaaaaaatggacttcatgaagaagcggaaaccattgataatatcaagaggtcgatggaagaaaataacaacctccttcgtcaactattaagcttcaattgaagacaagtgtctccatcataagtctagttgactactataggatctgcagtcttgtggcagctatagtaggtgtttatagtagctctagatttcaagctataggattattttttattatgtttaatgtttaatactttgagttgaagttataagatttgctttgaattttaagttaaaggatttgcagatatatggtttgaagttatatgcttatttgatggatgaattatttgtgttcaacaaattcatacgatattttggctatgatgtgtaatattctatgacgatatcaattcatatgatgtgttccttccgatgat

SEQ ID NO: 80729 - DNA, 762 bp, Zea Mays
caccaactgataagcagaatcgatctcctcccatcacctccatcacaacctctcgacggcagcttcatccccacctcaatcggcggcagcctagggcttcatcccccacccccaattccatgtcatgtggatctgaatcagcccactcccaaatctccaatccactcgccggcttttcctcgtgcccagttcacgacatttgctcggggatctgaccaatgtcgtcttctgctcgtgttcctcgcagccgctcagattggagatcaagtggaaattttctcaatggtcggacagggtcaagttggtggacttgcaccccacataggcatggatgtcgagcctgtactcgaggagtgcctgcatctgggattatcaaacacagtcaatttgtaggagagaggacgccatacatcaaagatgactgaagaagaggaagatgaagaatacctcgaagaggaagaagatgcccttgctggtgcaggggggaacacatttagtttcacaaccttcatctcttaacccctccgatcccggtgcgtggcggattagactccgatggggaagtctctggcgaggtggatcaagttcgtgctcttcgggaagaagtcgtcgtccaggtccagctccaccaaggccaataatttatcgataagaatgttgttacgatttcaagtgtggctcaagatatgcatctccagctatggagaaagagctcacgttctctgagagctctctagtgatctcggagcttgtgcttgttag

SEQ ID NO: 80730 - DNA, 290 bp, Zea Mays
cgaatcggcatccccatcccataccatcgacccacgaatgcccccgactcccgcacggccgccccccgccgtcgccgccggcgagccgtcggcgatgggctacgaccagggcctgcctccccatgacgccacctggccgcagagatccgactacgacccatacgcctacgcccgccacagcgccgctgccgcctcctcctactaccagccgcccccaccgggaacggagcatgctgctcccgcggccgccttctcgtcgtggtcgtccgcagtgggatcatcgaacagcg

SEQ ID NO: 80731 - DNA, 1974 bp, Zea Mays
caacgctgcgctgcgccgccacgccgtcactggcgtcgtcgcctcttcgcctcctccgcgccagtgctgcgctgtctcgtcgatatcggatccggaggtcggtagaccaggattcatgtcgggccgttgtggaagagaaaacttcaaaccggatcactctcgctttcgatctgggcccaaacgaacagctgtcgcataaagggtcgaattctaaaccgggacatttccttccgcctggaatcagacccggaatgggataaacctgccgaaacgaacgggccctaaaggaagtctattccccgctctggagatcgatgatggttgggggtggtataggtacactcaacggtgtaagcagaggtcgtgggccttcgcaaggtggaggcagaggtggaagccctatgtatcatcctcttatatggaatgcaggaattacatcaccacgtggtagaggccgtgggcgaggtcgaggcagtggccgaggtcgtagaaacaagagcagtgataggcagttagccattcaagcatccggtggatcttttgcattacaggctcagcccgaaacggtctgtgcaccagcacacatggtgcaagctacaaccagcagttcaacacggggtactgttgttccagctgcttggtgtgatatatgccacgtggggtgtaatagcaaggaaatccttgagcagcacaaaaatggaaagaggcataaacggtctgttcagagaatgcaagatatggctcgcctgcaaggtacgactcctgctatagctgacatgggtgctccatcatcttctcagttagctgaagtagaaggcccctctaggtcagtacatatggtcccacctcttggttcaacaagccttagtggggagcacaaagacttggctccagaaaatgtcggagcttcagtttatggggtgcaaattactgaggtgccaggcagttcttccaagcaaaacaaaacacatcatacatcaacagttggtcacggtgttgaagcacaggtagaactgcatgtcgctgttcaagcttgtcagccttcaaatgagatgaaagatggcggtgaagccccaccaaatgcaacaggtccatcaaatgcacaactggtggaagcaaggatgggtgtcaacggcaacaacaatggctcaaagaggaaaccgacaggagctggccgtggtcgaaagaagctgagagtgtctcaagccccacagcaaaggcggcctgagcgagtaagggagcaaccgctagtctgcaccatttgcaacgcgatttgtgatacaagagctgtatttgacatccatctggttggtaaaaagcatcaatcacgactcaagcgttctcaaggcccagacgtgttgttcggtcctttggttgggcatattcctccaaaccagtccgcagctcacatgacaggagcccctgagccactgtattttggctttaagagtatgggagcttctttggttgagcaggaggcatatctggctggcgcgatgcagcacgtgttgcccgttcttccacaagctggtccaaccatcatggctgctgattatcctgcacaaccggtggctagcaatcggtgctgctagcaatggaagacctgtaactgcatcactgtgcacagccgttggggaagctgaagtgagaatgtgacaggcatgcctgtatgtgccccgcatgatgtctactgcctcacaggtttcattgcttttcggtgggggcgactggagagcaaccgaattcgtagtagaagtagtactgaacaatctgaatatcagatgaaaccatagaactcgtctcccagtctgcaaaatgcacaaggcttccgtcgaattgctagtagtactatgatggaacaatttggttgacataggcctgggtgtatgtctgcaaaacgcttttttaaagtcggtctcaacagcgactttttatgatacattgtgttaataactgtgacaaccagcttcatct

SEQ ID NO: 80732 - DNA, 1926 bp, Zea Mays
ctggagttttgatggactctttcctgtattacatgaaagtaagtttctttgtatgcactttatggataaatgattgtattgtataaatcagtttgcttatacattatatggtgtttgttttaaggaatagggtgatccatcatattctcactccatgtttttgttttgttttgtttggggaatggaatgagttgatccattgtcatctcattcctttcaagctattcctgtgagggttgggccaatgaggtgttgcatgcaagtttgttcaggttgggggtggtataggtacactcaacggtgtaagcagaggtcgtgggccttcgcaaggtggaggcagaggtggaagccctatgtatcatcctcttatatggaatgcaggaattacatcaccacgtggtagaggccgtgggcgaggtcgaggcagtggccgaggtcgtagaaacaagagcagtgataggcagttagccattcaagcatccggtggatcttttgcattacaggctcagcccgaaacggtctgtgcaccagcacacatggtgcaagctacaaccagcagttcaacacggggtactgttgttccagctgcttggtgtgatatatgccacgtggggtgtaatagcaaggaaatccttgagcagcacaaaaatggaaagaggcataaacggtctgttcagagaatgcaagatatggctcgcctgcaaggtacgactcctgctatagctgacatgggtgctccatcatcttctcagttagctgaagtagaaggcccctctaggtcagtacatatggtcccacctcttggttcaacaagccttagtggggagcacaaagacttggctccagaaaatgtcggagcttcagtttatggggtgcaaattactgaggtgccaggcagttcttccaagcaaaacaaaacacatcatacatcaacagttggtcacggtgttgaagcacaggtagaactgcatgtcgctgttcaagcttgtcagccttcaaatgagatgaaagatggcggtgaagccccaccaaatgcaacaggtccatcaaatgcacaactggtggaagcaaggatgggtgtcaacggcaacaacaatggctcaaagaggaaaccgacaggagctggccgtggtcgaaagaagctgagagtgtctcaagccccacagcaaaggcggcctgagcgagtaagggagcaaccgctagtctgcaccatttgcaacgcgatttgtgatacaagagctgtatttgacatccatctggttggtaaaaagcatcaatcacgactcaagcgttctcaaggcccagacgtgttgttcggtcctttggttgggcatattcctccaaaccagtccgcagctcacatgacaggagcccctgagccactgtattttggctttaagagtatgggagcttctttggttgagcaggaggcatatctggctggcgcgatgcagcacgtgttgcccgttcttccacaagctggtccaaccatcatggctgctgattatcctgcacaaccggtggctagcaatcggtgctgctagcaatggaagacctgtaactgcatcactgtgcacagccgttggggaagctgaagtgagaatgtgacaggcatgcctgtatgtgccccgcatgatgtctactgcctcacaggtttcattgcttttcggtgggggcgactggagagcaaccgaattcgtagtagaagtagtactgaacaatctgaatatcagatgaaaccatagaactcgtctcccagtctgcaaaatgcacaaggcttccgtcgaattgctagtagtactatgatggaacaatttggttgacataggcctgggtgtatgtctgcaaaacgcttttttaaagtcggtctcaacagcgactttttatgatacattgtgttaataactgtgacaaccagcttcatct

SEQ ID NO: 80733 - DNA, 1704 bp, Zea Mays
gtcacatactccatgatcacaccaataattcatggataaatgaaacactggttgggggtggtataggtacactcaacggtgtaagcagaggtcgtgggccttcgcaaggtggaggcagaggtggaagccctatgtatcatcctcttatatggaatgcaggaattacatcaccacgtggtagaggccgtgggcgaggtcgaggcagtggccgaggtcgtagaaacaagagcagtgataggcagttagccattcaagcatccggtggatcttttgcattacaggctcagcccgaaacggtctgtgcaccagcacacatggtgcaagctacaaccagcagttcaacacggggtactgttgttccagctgcttggtgtgatatatgccacgtggggtgtaatagcaaggaaatccttgagcagcacaaaaatggaaagaggcataaacggtctgttcagagaatgcaagatatggctcgcctgcaaggtacgactcctgctatagctgacatgggtgctccatcatcttctcagttagctgaagtagaaggcccctctaggtcagtacatatggtcccacctcttggttcaacaagccttagtggggagcacaaagacttggctccagaaaatgtcggagcttcagtttatggggtgcaaattactgaggtgccaggcagttcttccaagcaaaacaaaacacatcatacatcaacagttggtcacggtgttgaagcacaggtagaactgcatgtcgctgttcaagcttgtcagccttcaaatgagatgaaagatggcggtgaagccccaccaaatgcaacaggtccatcaaatgcacaactggtggaagcaaggatgggtgtcaacggcaacaacaatggctcaaagaggaaaccgacaggagctggccgtggtcgaaagaagctgagagtgtctcaagccccacagcaaaggcggcctgagcgagtaagggagcaaccgctagtctgcaccatttgcaacgcgatttgtgatacaagagctgtatttgacatccatctggttggtaaaaagcatcaatcacgactcaagcgttctcaaggcccagacgtgttgttcggtcctttggttgggcatattcctccaaaccagtccgcagctcacatgacaggagcccctgagccactgtattttggctttaagagtatgggagcttctttggttgagcaggaggcatatctggctggcgcgatgcagcacgtgttgcccgttcttccacaagctggtccaaccatcatggctgctgattatcctgcacaaccggtggctagcaatcggtgctgctagcaatggaagacctgtaactgcatcactgtgcacagccgttggggaagctgaagtgagaatgtgacaggcatgcctgtatgtgccccgcatgatgtctactgcctcacaggtttcattgcttttcggtgggggcgactggagagcaaccgaattcgtagtagaagtagtactgaacaatctgaatatcagatgaaaccatagaactcgtctcccagtctgcaaaatgcacaaggcttccgtcgaattgctagtagtactatgatggaacaatttggttgacataggcctgggtgtatgtctgcaaaacgcttttttaaagtcggtctcaacagcgactttttatgatacattgtgttaataactgtgacaaccagcttcatct

SEQ ID NO: 80734 - DNA, 1589 bp, Zea Mays
gaaacgctgatgaccgagataaccggtgactgctttctccgcctccgcttctagaaagaggactgaaggagcgaggcgactgtcgccgcctatattaatacgcgccctcctccaacttctctcctctccactcctttctctcccagctcccaaaattccctctccgtcgccgccgctcccaaaatcccctctccgtcgccgcctctcgccaggtcgtttccaagccccgttgggggcctcgccggcgccggcattggatataacctcgcccgctacctccgtccgaatgcagggccttgatatttaatgggctggaggtggtacatgcatgttcgcagtgacaagaacacattgaaacgttggtttttcattgacaagaggcttgttaaagcatttttggtgcactaaccttttgttgtctgtaattggtttcacaacaagtttcttggggggttgtgtcctgttgatggatttgaagacaggcctcaattcacctgttattgctgaccatctccctacgttagcattgcctgctgctgtcatgactttcacaacacctactagctttccctctccggggctttgcttgaacactacaaagaagatacctctgcctggtaagattgaagaagttcgtgctgctggatggcttgatctcatgaaggcctcatcacctacccgcaaaaggcagatcaaggatgtcatctgtgatgctcaatctgatcttgatttgcaatactgcaactggacatgatcttgctgggagtaaaaggttggcattgtttcttgactatgacggaacactttcaccgattgtggacaatcctgaaaatgcattaatgtctgatgagatgcgtgctgcagtgaggcatgcggcatcacttttcccaactgcaatcattagcggaagatctcgtgataaggtttttgactttgtgaagctaaatgaattgtactacgctggaagccatggaatggacataatgggccctgttaggaagactactgactccaatggcgtggaatgtattcggtcaactgatgtgcatggtaaagaagtcaacctgttccaacctgctagtgagtttttacctatgatcactgaggtgtatgaaaaacttggtgagagtgttaaggacattgatggtgcaaggatggaagacaacaagttctgtgtatctgtgcattaccgtaatgtggcggaagatgactataaaaaggttttccatcgtgtaactgctgttttggaaggttacccttgcctaagactaacccatgggaggaaggtttttgaggtccgtcctgttattgattggaacaaaggtaaagctgtggagtttttacttgaatcgcttgggctcagcgagagtgaagatgttctccctatctatgttggagatgacagaacagatgaagatgcattcaaagttctgaaggcaagcaaccgtggctttggaatattggtgtcgtctatacccaaagagagtgacgccttctactccttgagggatccagctgaggtaactcatagcactgtggcaaccacaacgaacttttgctttgaatatttcttgggtcaaaaggaaaac

SEQ ID NO: 80735 - DNA, 1604 bp, Zea Mays
ccgagataaccggtgactgctttctccgcctccgcttctagaaagaggactgaaggagcgaggcgactgtcgccgcctatattaatacgcgccctcctccaacttctctcctctccactcctttctctcccagctcccaaaattccctctccgtcgccgccgctcccaaaatcccctctccgtcgccgcctctcgccaggtcgtttccaagccccgttgggggcctcgccggcgccggcattggatataacctcgcccgctacctccgtccgaatgcagggccttgatatttaatgggctggaggtggtacatgcatgttcgcagtgacaagaacacattgaaacgttggtttttcattgacaagaggcttgttaaagcatttttggtgcactaaccttttgttgtctgtaattggtttcacaacaagtttcttggggggttgtgtcctgttgatggatttgaagacaggcctcaattcacctgttattgctgaccatctccctacgttagcattgcctgctgctgtcatgactttcacaacacctactagctttccctctccggggctttgcttgaacactacaaagaagatacctctgcctggtaagattgaagaagttcgtgctgctggatggcttgatctcatgaaggcctcatcacctacccgcaaaaggcagatcaaggatgtcatctgtgatgctcaatctgatcttgatttgcaatactgcaactggacagtgaactatccttctgctttgatctcatttgaggcaattagtgatcttgctgggagtaaaaggttggcattgtttcttgactatgacggaacactttcaccgattgtggacaatcctgaaaatgcattaatgtctgatgagtgaggcatgcggcatcacttttcccaactgcaatcattagcggaagatctcgtgataaggtttttgactttgtgaagctaaatgaattgtactacgctggaagccatggaatggacataatgggccctgttaggaagactactgactccaatggcgtggaatgtattcggtcaactgatgtgcatggtaaagaagtcaacctgttccaacctgctagtgagtttttacctatgatcactgaggtgtatgaaaaacttggtgagagtgttaaggacattgatggtgcaaggatggaagacaacaagttctgtgtatctgtgcattaccgtaatgtggcggaagatgactataaaaaggttttccatcgtgtaactgctgttttggaaggttacccttgcctaagactaacccatgggaggaaggtttttgaggtccgtcctgttattgattggaacaaaggtaaagctgtggagtttttacttgaatcgcttgggctcagcgagagtgaagatgttctccctatctatgttggagatgacagaacagatgaagatgcattcaaagttctgaaggcaagcaaccgtggctttggaatattggtgtcgtctatacccaaagagagtgacgccttctactccttgagggatccagctgaggtaactcatagcactgtggcaaccacaacgaacttttgctttgaatatttcttgggtcaaaaggaaaac

SEQ ID NO: 80736 - DNA, 1577 bp, Zea Mays
ctccaacttctctcctctccactcctttctctcccagctcccaaaattccctctccgtcgccgccgctcccaaaatcccctctccgtcgccgcctctcgccaggtcgtttccaagccccgttgggggcctcgccggcgccggcattggatataacctcgcccgctacctccgtccgaatgcagggccttgatatttaatgggctggaggtggtacatgcatgttcgcagtgacaagaacacattgaaacgttggtttttcattgacaagaggcttgttaaagcatttttggtgcactaaccttttgttgtctgtaattggtttcacaacaagtttcttggggggttgtgtcctgttgatggatttgaagacaggcctcaattcacctgttattgctgaccatctccctacgttagcattgcctgctgctgtcatgactttcacaacacctactagctttccctctccggggctttgcttgaacactacaaagaagatacctctgcctggtaagattgaagaagttcgtgctgctggatggcttgatctcatgaaggcctcatcacctacccgcaaaaggcagatcaaggatgtcatctgtgatgctcaatctgatcttgatttgcaatactgcaactggacagtatgtatctgaacctatactgtatggcagaattgcacaagatgttagtgattcccattgcttcacctttgtaggtgaactatccttctgctttgatctcatttgaggcaattagtgatcttgctgggagtaaaaggttggcattgtttcttgactatgacggaacactttcaccgattgtggacaatcctgaaaatgcattaatgtctgatgagatgcgtgctgcagtgaggcatgcggcatcacttttcccaactgcaatcattagcggaagatctcgtgataagctaaatgaattgtactacgctggaagccatggaatggacataatgggccctgttaggaagactactgactccaatggcgtggaatgtattcggtcaactgatgtgcatggtaaagaagtcaacctgttccaacctgctagtgagtttttacctatgatcactgaggtgtatgaaaaacttggtgagagtgttaaggacattgatggtgcaaggatggaagacaacaagttctgtgtatctgtgcattaccgtaatgtggcggaagatgactataaaaaggttttccatcgtgtaactgctgttttggaaggttacccttgcctaagactaacccatgggaggaaggtttttgaggtccgtcctgttattgattggaacaaaggtaaagctgtggagtttttacttgaatcgcttgggctcagcgagagtgaagatgttctccctatctatgttggagatgacagaacagatgaagatgcattcaaagttctgaaggcaagcaaccgtggctttggaatattggtgtcgtctatacccaaagagagtgacgccttctactccttgagggatccagctgaggtaactcatagcactgtggcaaccacaacgaacttttgctttgaatatttcttgggtcaaaaggaaaac

SEQ ID NO: 80737 - DNA, 1455 bp, Zea Mays
actcctttctctcccagctcccaaaattccctctccgtcgccgccgctcccaaaatcccctctccgtcgccgcctctcgccaggtcgtttccaagccccgttgggggcctcgccggcgccggcattggatataacctcgcccgctacctccgtccgaatgcagggccttgatatttaatgggctggaggtggtacatgcatgttcgcagtgacaagaacacattgaaacgttggtttttcattgacaagaggcttgttaaagcatttttggtgcactaaccttttgttgtctgtaattggtttcacaacaagtttcttggggggttgtgtcctgttgatggatttgaagacaggcctcaattcacctgttattgctgaccatctccctacgttagcattgcctgctgctgtcatgactttcacaacacctactagctttccctctccggggctttgcttgaacactacaaagaagatacctctgcctggtaagattgaagaagttcgtgctgctggatggcttgatctcatgaaggcctcatcacctacccgcaaaaggcagatcaaggatgtcatctgtgatgctcaatctgatcttgatttgcaatactgcaactggacagcaattagtgatcttgctgggagtaaaaggttggcattgtttcttgactatgacggaacactttcaccgattgtggacaatcctgaaaatgcattaatgtctgatgagtgaggcatgcggcatcacttttcccaactgcaatcattagcggaagatctcgtgataaggtttttgactttgtgaagctaaatgaattgtactacgctggaagccatggaatggacataatgggccctgttaggaagactactgactccaatggcgtggaatgtattcggtcaactgatgtgcatggtaaagaagtcaacctgttccaacctgctagtgagtttttacctatgatcactgaggtgtatgaaaaacttggtgagagtgttaaggacattgatggtgcaaggatggaagacaacaagttctgtgtatctgtgcattaccgtaatgtggcggaagatgactataaaaaggttttccatcgtgtaactgctgttttggaaggttacccttgcctaagactaacccatgggaggaaggtttttgaggtccgtcctgttattgattggaacaaaggtaaagctgtggagtttttacttgaatcgcttgggctcagcgagagtgaagatgttctccctatctatgttggagatgacagaacagatgaagatgcattcaaagttctgaaggcaagcaaccgtggctttggaatattggtgtcgtctatacccaaagagagtgacgccttctactccttgagggatccagctgaggtaactcatagcactgtggcaaccacaacgaacttttgctttgaatatttcttgggtcaaaaggaaaac

SEQ ID NO: 80738 - DNA, 1401 bp, Zea Mays
tggctgtgtcctgtgtgggattcttcctcgcggggggtccctgcggccgagacgggaatgcagggccttgatatttaatgggctggaggtggtacatgcatgttcgcagtgacaagaacacattgaaacgttggtttttcattgacaagaggcttgttaaagcatttttggtgcactaaccttttgttgtctgtaattggtttcacaacaagtttcttggggggttgtgtcctgttgatggatttgaagacaggcctcaattcacctgttattgctgaccatctccctacgttagcattgcctgctgctgtcatgactttcacaacacctactagctttccctctccggggctttgcttgaacactacaaagaagatacctctgcctggtaagattgaagaagttcgtgctgctggatggcttgatctcatgaaggcctcatcacctacccgcaaaaggcagatcaaggatgtcatctgtgatgctcaatctgatcttgatttgcaatactgcaactggacagtgaactatccttctgctttgatctcatttgaggcaattagtgatcttgctgggagtaaaaggttggcattgtttcttgactatgacggaacactttcaccgattgtggacaatcctgaaaatgcattaatgtctgatgagatgcgtgctgcagtgaggcatgcggcatcacttttcccaactgcaatcattagcggaagatctcgtgataaggtttttgactttgtgaagctaaatgaattgtactacgctggaagccatggaatggacataatgggccctgttaggaagactactgactccaatggcgtggaatgtattcggtcaactgatgtgcatggtaaagaagtcaacctgttccaacctgctagtgagtttttacctatgatcactgaggtgtatgaaaaacttggtgagagtgttaaggacattgatggtgcaaggatggaagacaacaagttctgtgtatctgtgcattaccgtaatgtggcggaagatgactataaaaaggttttccatcgtgtaactgctgttttggaaggttacccttgcctaagactaacccatgggaggaaggtttttgaggtccgtcctgttattgattggaacaaaggtaaagctgtggagtttttacttgaatcgcttgggctcagcgagagtgaagatgttctccctatctatgttggagatgacagaacagatgaagatgcattcaaagttctgaaggcaagcaaccgtggctttggaatattggtgtcgtctatacccaaagagagtgacgccttctactccttgagggatccagctgaggtaactcatagcactgtggcaaccacaacgaacttttgctttgaatatttcttgggtcaaaaggaaaac

SEQ ID NO: 80739 - DNA, 855 bp, Zea Mays
atcagactctatttctattcatttttaaactaaaattaattaaggggtcaaacaaattgtgaagaaacatttaaagaaacatttggattatgatctattaccacccatacccaaaatgtattatttactctgttctgcaaaagggccttgtgtacaaaggcatgcctgtttcacaacgtgtaaaaagaatgtgtatgtcctatgatttctgaattcatgttatttcttgagaatcggtatcttttcttgacatgttttattgattgagctaacctaaacgtgtccaactgttgcagactcccaaagtctacccgtacgacaacttgagagctgagcttggtgatagaccatagaaggttttttgtctgtttgacaaggcactttgatgaatatgatctgagatctatatctcctttccatcagagagaagcagggggaaacttatttaccatggtttttttgtgactgccttgttgtaaaccaccgttatgtgatttgctgaatattgtgaagcatgggtttgccctacaataatgcaaccagctctgaacctattcctgatgctacagattcgagtattaacaatccgttgccagcatttcttagtcggatgtgtcatgcaccactatgagcctgtttgtagcaataacctggcagctaacattcgagtgcagtgatgatgccacgatacacgatggttttcacgtttccgtcgaagagaacatttggctgaatatatttttgcgcgcattaaggtcatgtttagcagactgtatatatggtcgtgtaaaatacactgttttatattgtattatgtataaagtagagtttaaaatataaaatagagtttaaaat

SEQ ID NO: 80740 - DNA, 702 bp, Zea Mays
tccccttccactcccgattcgttctggcgcgtggtggtctcccgactcccccattggcccaatccctcatgccctgcctctacctccagtccatgtctcttccctcctagacctaggtgccagtggcggcgcctccgcactacggcctccagtctatgcctccacctccatgctccactgcacggatccggatccggcaacgacgacctccctgcggtcagcggtctgcgacctccattgattcgcaccacatcgttcgccccttcctagcagtgagcatacaaagtataatgaagggttgaccatgtacaccttcgatcggaaataatactcgagcagtgcaagcatgaaaacgaagctgagaagcttcagttccgtgttttggacacgcaacgaaggatcagtaagaggaagcgataagatcttagaggcttggacaacatgtctaatgatggaaaaaacttttatacccttaaaatatcttgtagtttgtgtgcataggactgagtgcatgattgtaatttttacaacactataaatagagatacaatgtcatgcacaggggacactttgtataagatcttcaaggcttcatgattctgtgaattctgtgatgtatatgtgatgattatgtgatatatgttctgtttgtttggatggaataacaaaaacaaataaaatgggtattctggtcactttgcc

SEQ ID NO: 80741 - DNA, 689 bp, Zea Mays
tccccttccactcccgattcgttctggcgcgtggtggtctcccgactcccccattggcccaatccctcatgccctgcctctacctccagtccatgtctcttccctcctagacctaggtgccagtggcggcgcctccgcactacggcctccagtctatgcctccacctccatgctccactgcacggatccggatccggcaacgacgacctccctgcggtcagcggtctgcgacctccattgattcgcaccacatcgttcgccccttcctagcagtataatgaagggttgaccatgtacaccttcgatcggaaataatactcgagcagtgcaagcatgaaaacgaagctgagaagcttcagttccgtgttttggacacgcaacgaaggatcagtaagaggaagcgataagatcttagaggcttggacaacatgtctaatgatggaaaaaacttttatacccttaaaatatcttgtagtttgtgtgcataggactgagtgcatgattgtaatttttacaacactataaatagagatacaatgtcatgcacaggggacactttgtataagatcttcaaggcttcatgattctgtgaattctgtgatgtatatgtgatgattatgtgatatatgttctgtttgtttggatggaataacaaaaacaaataaaatgggtattctggtcactttgcc

SEQ ID NO: 80742 - DNA, 500 bp, Zea Mays
tccgcactacggcctccagtctatgcctccacctccatgctccactgcacggatccggatccggcaacgacgacctccctgcggtataatgaagggttgaccatgtacaccttcgatcggaaataatactcgagcagtgcaagcatgaaaacgaagctgagaagcttcagttccgtgttttggacacgcaacgaaggatcagtaagaggaagcgataagatcttagaggcttggacaacatgtctaatgatggaaaaaacttttatacccttaaaatatcttgtagtttgtgtgcataggactgagtgcatgattgtaatttttacaacactataaatagagatacaatgtcatgcacaggggacactttgtataagatcttcaaggcttcatgattctgtgaattctgtgatgtatatgtgatgattatgtgatatatgttctgtttgtttggatggaataacaaaaacaaataaaatgggtattctggtcactttgcc

SEQ ID NO: 80743 - DNA, 457 bp, Zea Mays
caaaaccgaatatatgagatgtgactttggtactacaattagtgagggtggagatgtaagtttgggaggccaggtagtaccaaaggacaccttccgttatttgggatcgatgctacagagagatggtgacattgatgaagaggttagccatagaatcaaagcgaggttgatgaaatggcgtcaagcatcaagagtcctatacaacaagagagtgccacagaagtttaaagtcaagttctacaggacagcgattaggcctgctatgttatatggggctgagtgttggcctactaagagacgacatatccaacaactaagtgtcgcagagatgcgtatgttgcgttggatatgtgggcacacaagattggaccgagtgagaaacgatgacatacgcgatcgactaggaatagcgtcaattggagaaaagcttattcaacaccggttgagatggtttggg

SEQ ID NO: 80744 - DNA, 568 bp, Zea Mays
cactttggctgcgtcatgaataaaacagaaagaaggcttacagctacatcaaatcatctaacacatgcaggatggctagaattggttaactcagtgctctcttctttgccaacatatgcaatgtgcactctgcaggtgccagtaacagttcttgagtatattgatagagctagaaggcaccgtttatggagagggtcagatagcaatgctaagatgaagcctctggttgtgtggaaaaaaattgtagactcaaaaggaaaggaggcattggcctcattaatctgagaagtcaaaatagagcctttctgcttaaacatttggacaaattctatagcaaaaaggagatcccttgggtgaaacttgtcttgcacgtgcattattccaatggtgaaatcccacatgcaactagtgacaaacagacaaaggctctttttggtggagacatcttgaagctatgtgatctcttcagaggaattgattttggcaccacacgaggatggagatatgattttggcaccacacgaggatgtagatgttagtttggaaagtgtagtgcctaagaaggacc

SEQ ID NO: 80745 - DNA, 637 bp, Zea Mays
gtacaatatgttaataccattctactgtgtgttgcaggcgaaagtgtgcagtgaatttcaatttcaatggcaacaaatagcgaggctaatgacttattctatatttgaaattctatgtcaagtctgaaaagacgtttcaacgttcgtttaaatgtttaaacgttgaaaagttggttcataacattttaacgttttaccgctttaataaccatgacttcgggcatggtcgtatggataagctttgctcatactgaatgtgtcacttcaattccatctaccaatttaccagttttcttttcctataaaatgctaaattaccataggtggagtgatatctgtaggcatgcaaattttccatgagggtccaaatttcaacatttgaaagcaatatactatagttttgtctggtaggaactttattttgcatggtgtctgataggaacttgaactaataatatcttctaatgacttaacaatagcccaaggagtcaggtttttaacatatcatagatagttgccgtgggtggagtgatatctatagcacaacaaacactggaagaccaaaatgcaatcagagaaatagcagttagcaagaaataacagttagcaatgtgcactcacatatggtatattggag

SEQ ID NO: 80746 - DNA, 194 bp, Zea Mays
gccggcgcggtgtcggagggcggaagccgcggcgcgtgcgccgccgccgcccaggatgcgggaccctgccgcggttagcctcccagccatctctcgcttgctcgctcaccgatctgtgcgagtcctcctgcagtgagttcggttgcgcggctcgtcggcagccgtggagacagaagtagggccgaaaaaaaaac

SEQ ID NO: 80747 - DNA, 2412 bp, Zea Mays
agcacagggcacacagcctacttttgcgaaaaggtgacagcaacatgcatggcggtcacaacacaaccggacttttacaactggaaccgtgtgaagctgcgttactgcgacggcgggtccttcatgggcgattcagcagtgtatataaacagctcctcggtgctctacttcagtggccagaggatatgggacgctattgtcgccgatctgctcaggaagggactggcgagagccgacaaggttctgctctcaggctgttcggcaggaggcctagctacgttcttccactgcgacggccttaagcagcggcttggagccgcagccacggtgaaatgcctgagcgacgccggatttttccttgatctgagtgacatttctgggagcaacaccataaggcaattctttagcagcctagtatccctgcagggaatccagaagaatttgaacatggactgcctgagttcaacttcaacagacaatgcatacctgtgtttctttccacagttcgcgcttgcgaacatccgaaccccgtttttcatcttgaattcagcttatgatgtataccagttccaccacattctggtgccgccttcgtctgatcctggaggccattggagccgctgcaagtcggatcctggtggatgcaacgcaacacagatcgcaaccctccaaggactgagaagtggaatgctgacatctctgagacagtttaaaagcaaaccggaggcagggatgttcatcaactcctgcttcgcgcattgccagagtgagctgcaggacacatggttcgcaccaaattctccatccatagataacaagaaaattgcagaggtggtaggtgattggtacttcgaaagaggagctgccgtggagattgactgcgcctatccctgtgattcaacttgtcgcaaccttataccaattgataagaatgggttcgctggcgcatgaagtggacctcgattcagagccatcaacatttgcccaaacatgattgattacctgtatatattgcacattgcatcacaattcaacttggcacatggatgaataaaatgtagagccagtgctctcgaaagatatgcaaaatttggcatgtttttcccggtactttgatctgcgggtcttccttcatttattggcggcaatgtttttttttttggctttactaacagttgactgggtagctgacttacggatttgtgtggtgctgtgattgtttctttggtcataaaaacagtagaccctactgctgcccgaattttggaggtttcacaagataatgggatttgtagcatcatttatttgttggcctccatattcttctctgtacaaagaggggaagaaagcaaacgtaacaacactaattcttttctagtgcaatgacacaactctctcgtctctaggacacaaaagtggttacaattcttcacctacttgatttgccaaaaaacctgtatagtagtttcacaaaagtcaagctgctttatatgcatgcaatgcaaagtgaacagaaaaagatttcacgattcctgagattctggctacttgtccgcatatgtttgttatgttcgtaaggtgccttgctagcttaactgtacctcgttgcatcatttcgacggatccgcccgcccggccagcagatctgtatgtcctgttgatacgaggacgcggtcaggcagtgacggccggcagagatccctatatctggccttcctttatataacgacaagtgttcgagagcgcgcagccctgtccactggtcgtccagcctccaggttcctgaggctgcaaagatcctgatggacagcgttgagccggtgagagtatctcccgaacgacttggtcagtttgtgcatcaatcttgtacgaaatccaacttctgtctttgcatggcagtgttctgtctagttttgaagtttgcttctcctcggctcgcagggccgtggttcaaggcagctcggcgcgcccaggagatggtaccgcaccaagaagatttggctggccaccggcgtcgccgtcaccgtcgtggtgatcctcctcatggtcctcatagcttgccatggcttcaaatgtcgctgaaccctgagccatgggccagggctgctcgctgccaaaggatgggagcacaatagctcatgcaagctctagataagctcagctcaatcgtccactatatgcagcagtgtgcagcttcaaacggcgaagcattctgcatctgtgcttgtggtggcggcctctgttttctcctctagctcgttttgatgtaccctcccagtagttgaattggatctttgagcgacttacaagccttctaaattttgtgggactttgccatatgtagtatgtatgcttattaatcattttatagctgcatgagatggaggggcttgattccttgatagaaaaaac

SEQ ID NO: 80748 - DNA, 2373 bp, Zea Mays
gcacagggcacacagcctacttttgcgaaaaggtgacagcaacatgcatggcggtcacaacacaaccggacttttacaactggaaccgtgtgaagctgcgttactgcgacggcgggtccttcatgggcgattcagcagtgtatataaacagctcctcggtgctctacttcagtggccagaggatatgggacgctattgtcgccgatctgctcaggaagggactggcgagagccgacaaggttctgctctcaggctgttcggcaggaggcctagctacgttcttccactgcgacggccttaagcagcggcttggagccgcagccacggagtgacatttctgggagcaacaccataaggcaattctttagcagcctagtatccctgcagggaatccagaagaatttgaacatggactgcctgagttcaacttcaacagacaatgcatacctgtgtttctttccacagttcgcgcttgcgaacatccgaaccccgtttttcatcttgaattcagcttatgatgtataccagttccaccacattctggtgccgccttcgtctgatcctggaggccattggagccgctgcaagtcggatcctggtggatgcaacgcaacacagatcgcaaccctccaaggactgagaagtggaatgctgacatctctgagacagtttaaaagcaaaccggaggcagggatgttcatcaactcctgcttcgcgcattgccagagtgagctgcaggacacatggttcgcaccaaattctccatccatagataacaagaaaattgcagaggtggtaggtgattggtacttcgaaagaggagctgccgtggagattgactgcgcctatccctgtgattcaacttgtcgcaaccttataccaattgataagaatgggttcgctggcgcatgaagtggacctcgattcagagccatcaacatttgcccaaacatgattgattacctgtatatattgcacattgcatcacaattcaacttggcacatggatgaataaaatgtagagccagtgctctcgaaagatatgcaaaatttggcatgtttttcccggtactttgatctgcgggtcttccttcatttattggcggcaatgtttttttttttggctttactaacagttgactgggtagctgacttacggatttgtgtggtgctgtgattgtttctttggtcataaaaacagtagaccctactgctgcccgaattttggaggtttcacaagataatgggatttgtagcatcatttatttgttggcctccatattcttctctgtacaaagaggggaagaaagcaaacgtaacaacactaattcttttctagtgcaatgacacaactctctcgtctctaggacacaaaagtggttacaattcttcacctacttgatttgccaaaaaacctgtatagtagtttcacaaaagtcaagctgctttatatgcatgcaatgcaaagtgaacagaaaaagatttcacgattcctgagattctggctacttgtccgcatatgtttgttatgttcgtaaggtgccttgctagcttaactgtacctcgttgcatcatttcgacggatccgcccgcccggccagcagatctgtatgtcctgttgatacgaggacgcggtcaggcagtgacggccggcagagatccctatatctggccttcctttatataacgacaagtgttcgagagcgcgcagccctgtccactggtcgtccagcctccaggttcctgaggctgcaaagatcctgatggacagcgttgagccggtgagagtatctcccgaacgacttggtcagtttgtgcatcaatcttgtacgaaatccaacttctgtctttgcatggcagtgttctgtctagttttgaagtttgcttctcctcggctcgcagggccgtggttcaaggcagctcggcgcgcccaggagatggtaccgcaccaagaagatttggctggccaccggcgtcgccgtcaccgtcgtggtgatcctcctcatggtcctcatagcttgccatggcttcaaatgtcgctgaaccctgagccatgggccagggctgctcgctgccaaaggatgggagcacaatagctcatgcaagctctagataagctcagctcaatcgtccactatatgcagcagtgtgcagcttcaaacggcgaagcattctgcatctgtgcttgtggtggcggcctctgttttctcctctagctcgttttgatgtaccctcccagtagttgaattggatctttgagcgacttacaagccttctaaattttgtgggactttgccatatgtagtatgtatgcttattaatcattttatagctgcatgagatggaggggcttgattccttgatagaaaaaac

SEQ ID NO: 80749 - DNA, 2848 bp, Zea Mays
aagggaccaaaacctcccccttcctttccaaccaaggtcaccgcgcgcctcccatggccacggcgcccctcgccttccgcctccccttccccttctcattcccctccgcctcccgccctcctccttccagaatcctagcccctccgaccccgcgccggctccccctacgcctcgccgccgcggccgcacgacggttccgcccgcccaccgccgacgacgaaccccctgaggccgcggaggactcttctcatggcctaacccgctatgaccagcttgcgcgaagcgtggagcgcgcccggatccgccagccggagatcacccctgacaacccgctcttctcgtccccctccactgcaggaggcggcggcggaggcagctacgacccagacgacgagttcttcgacgaaattgaccgcgctatcgctgagaagcgggaggagttcacgcggcgcgggctcatcaagccatcccctgcttcgccgccgccgtcgcaatcgcagccggaggacgaggacctcaccgacgagctctcccctgaggaggtgatcgatctcgatgagattcggaagcttcagggactcagtgttgtatccgtggccgacgaggaggatgaggaggtggaggggggcgaggacgaggacgatggattgccgctcgatgaggacggggaaggctttgacgtggccgaggagctcggcctcgagggtgccaggatgcgacaaccggctttccgcatgacgctggctgagctccttgacgagagcaagctcgtcccggtggccgtgacgggcgaccaggatgtcgccctcgcaggagtgcagcgcgacgccagcctggtggcggccggcgacctgtttgtgtgcgtgggagaggacgggctcgcggggctcaccgaagccgacaagcgtggggccgttgccgtcgtagctgatcaggacctcaacattgagggcaccctggcctgtcgcgcgctggtcattgtagacgacattttgactgcgctccgggtactccctgcctgcttgtacagccggccgtcgatgaacatggctatcataggtgtcactggcacagatggcgtaactaccacaactcacctcgtgaaagcaatgtacgaggctatgggggtgaggactggcttggtgggtgttcttgggacctatgccttcagcagcaacaagctcgatgcacgccctgatgcatctagtgaccccattgctgcgcagaagctgatggcaacaatgttacacaatggcactgaggcagtggtgttggagaaaggcactgatgggatgcctccatctggtgtggacagtgagatagattatgatattgctgttttgactaatgttaggcacactgatgaagagaatggcatgacctacgaggagtatatgagcagaatggcctctcttttctccagaatggtggaccctgagcgccatcgtaaggtggtgaacatcgatgatccaagtgccccatttttcgccgcacaaggagggcatgatgtccctgtggtaacatattcatttgagaacaagaaggctgatgtgcacacgcttaaataccagctttccctgtttgagacggaggttctggtacagacaccacatgggatcctcgagatctcctctgggctgcttggaagagataacatctacagcatccttgcaactgtggcagttggcattgcagtgggtgcaccactggaggacatagtcaggggcatagaagaggtggatgcgatcccaggtcggtgtgagctaatcgatgaggagcaagcctttggggtaatcgttgatcatgcaaggacaccagaagctctgtcaaggcttctggatggtgtaagggagctgggaccacgccggattgtcactgttgttggatgttgcggagagaaagaaagagggaagaggcccgtgatgacaaagatcgcagctgataaaagtgatgttgtcatgttgacatcagacaatccagcaaatgaagatccattagatatcctagatgatatgttggcaggtgtaggctggactatggaagaatacttgaaatatggtgctaatgattattacccaccccttccaaatgggcatagactattcctacatgatattagaagagttgcagttcgagctgctgttgcaatgggtgaacaaggcgatgttatcactggcaaagggaatgatacctatcagattgaaggcgataaaaatgaattttttgatgacagagaagagtgccgagaagcattacaatacgtcgatcaattgcaccgagctggaatagacacctcagagttcccttggcggttaccagaaagccactgattttgatttaggcaagatagtcgagtttatcaactgaagagcaacaccagactcccaatttaaagaacgtgtgcttttttaggatttgaggatatgatatccaagtcctgcaagaaaattactccttacgtgctgagttttctaacccaagtgctaatggctaacaaattgctagcttatcagctattcagttacactgccatactagttagtagataaccagatggcccagtaaatgttgtattagttcatgcacgtaaatgaggtgtagctgtgaaagtagatcgatgaaggttcctgatgtgaaaaagtcaaaagacaatgtaggagcttctgggtcacagtttcaaaagattttgtcccttggcagtgattgtaagatcttttggaagttatgccttttgttgttctgccatctagattgtgtttcactgaatgcctttttagccaacaatttatatagtttctttcctattttagttgtccattaatctgaattcttcatagctaataacaac

SEQ ID NO: 80750 - DNA, 2622 bp, Zea Mays
aagggaccaaaacctcccccttcctttccaaccaaggtcaccgcgcgcctcccatggccacggcgcccctcgccttccgcctccccttccccttctcattcccctccgcctcccgccctcctccttccagaatcctagcccctccgaccccgcgccggctccccctacgcctcgccgccgcggccgcacgacggttccgcccgcccaccgccgacgacgaaccccctgaggccgcggaggactcttctcatggcctaacccgctatgaccagcttgcgcgaagcgtggagcgcgcccggatccgccagccggagatcacccctgacaacccgctcttctcgtccccctccactgcaggaggcggcggcggaggcagctacgacccagacgacgagttcttcgacgaaattgaccgcgctatcgctgagaagcgggaggagttcacgcggcgcgggctcatcaagccatcccctgcttcgccgccgccgtcgcaatcgcagccggaggacgaggacctcaccgacgagctctcccctgaggaggtgatcgatctcgatgagattcggaagcttcagggactcagtgttgtatccgtggccgacgaggaggatgaggaggtggaggggggcgaggacgaggacgatggattgccgctcgatgaggacggggaaggctttgacgtggccgaggagctcggcctcgagggtgccaggatgcgacaaccggctttccgcatgacgctggctgagctccttgacgagagcaagctcgtcccggtggccgtgacgggcgaccaggatgtcgccctcgcaggagtgcagcgcgacgccagcctggtggcggccggcgacctgtttgtgtgcgtgggagaggacgggctcgcggggctcaccgaagccgacaagcgtggggccgttgccgtcgtagctgatcaggacctcaacattgagggcaccctggcctgtcgcgcgctggtcattgtagacgacattttgactgcgctccgggtactccctgcctgcttgtacagccggccgtcgatgaacatggctatcataggtgtcactggcacagatggcgtaactaccacaactcacctcgtgaaagcaatgtacgaggctatgggggtgaggactggcttggtgggtgttcttgggacctatgccttcagcagcaacaagctcgatgcacgccctgatgcatctagtgaccccattgctgcgcagaagctgatggcaacaatgttacacaatggcactgaggcagtggtgttggagaaaggcactgatgggatgcctccatctggtgtggacagtgagatagattatgatattgctgttttgactaatgttaggcacactgatgaagagaatggcatgacctacgaggagtatatgagcagaatggcctctcttttctccagaatggtggaccctgagcgccatcgtaagttggcattgcagtgggtgcaccactggaggacatagtcaggggcatagaagaggtggatgcgatcccaggtcggtgtgagctaatcgatgaggagcaagcctttggggtaatcgttgatcatgcaaggacaccagaagctctgtcaaggcttctggatggtgtaagggagctgggaccacgccggattgtcactgttgttggatgttgcggagagaaagaaagagggaagaggcccgtgatgacaaagatcgcagctgataaaagtgatgttgtcatgttgacatcagacaatccagcaaatgaagatccattagatatcctagatgatatgttggcaggtgtaggctggactatggaagaatacttgaaatatggtgctaatgattattacccaccccttccaaatgggcatagactattcctacatgatattagaagagttgcagttcgagctgctgttgcaatgggtgaacaaggcgatgtggtcgttatcactggcaaagggaatgatacctatcagattgaaggcgataaaaatgaattttttgatgacagagaagagtgccgagaagcattacaatacgtcgatcaattgcaccgagctggaatagacacctcagagttcccttggcggttaccagaaagccactgattttgatttaggcaagatagtcgagtttatcaactgaagagcaacaccagactcccaatttaaagaacgtgtgcttttttaggatttgaggatatgatatccaagtcctgcaagaaaattactccttacgtgctgagttttctaacccaagtgctaatggctaacaaattgctagcttatcagctattcagttacactgccatactagttagtagataaccagatggcccagtaaatgttgtattagttcatgcacgtaaatgaggtgtagctgtgaaagtagatcgatgaaggttcctgatgtgaaaaagtcaaaagacaatgtaggagcttctgggtcacagtttcaaaagattttgtcccttggcagtgattgtaagatcttttggaagttatgccttttgttgttctgccatctagattgtgtttcactgaatgcctttttagccaacaatttatatagtttctttcctattttagttgtccattaatctgaattcttcatagctaataacaac

SEQ ID NO: 80751 - DNA, 3168 bp, Zea Mays
aagggaccaaaacctcccccttcctttccaaccaaggtcaccgcgcgcctcccatggccacggcgcccctcgccttccgcctccccttccccttctcattcccctccgcctcccgccctcctccttccagaatcctagcccctccgaccccgcgccggctccccctacgcctcgccgccgcggccgcacgacggttccgcccgcccaccgccgacgacgaaccccctgaggccgcggaggactcttctcatggcctaacccgctatgaccagcttgcgcgaagcgtggagcgcgcccggatccgccagccggagatcacccctgacaacccgctcttctcgtccccctccactgcaggaggcggcggcggaggcagctacgacccagacgacgagttcttcgacgaaattgaccgcgctatcgctgagaagcgggaggagttcacgcggcgcgggctcatcaagccatcccctgcttcgccgccgccgtcgcaatcgcagccggaggacgaggacctcaccgacgagctctcccctgaggaggtgatcgatctcgatgagattcggaagcttcagggactcagtgttgtatccgtggccgacgaggaggatgaggaggtggaggggggcgaggacgaggacgatggattgccgctcgatgaggacggggaaggctttgacgtggccgaggagctcggcctcgagggtgccaggatgcgacaaccggctttccgcatgacgctggctgagctccttgacgagagcaagctcgtcccggtggccgtgacgggcgaccaggatgtcgccctcgcaggagtgcagcgcgacgccagcctggtggcggccggcgacctgtttgtgtgcgtgggagaggacgggctcgcggggctcaccgaagccgacaagcgtggggccgttgccgtcgtagctgatcaggacctcaacattgagggcaccctggcctgtcgcgcgctggtcattgtagacgacattttgactgcgctccgggtactccctgcctgcttgtacagccggccgtcgatgaacatggctatcataggtgtcactggcacagatggcgtaactaccacaactcacctcgtgaaagcaatgtacgaggctatgggggtgaggactggcttggtgggtgttcttgggacctatgccttcagcagcaacaagctcgatgcacgccctgatgcatctagtgaccccattgctgcgcagaagctgatggcaacaatgttacacaatggcactgaggcagtggtgttggagaaaggcactgatgggatgcctccatctggtgtggacagtgagatagattatgatattgctgttttgactaatgttaggcacactgatgaagagaatggcatgacctacgaggagtatatgagcagaatggcctctcttttctccagaatggtggaccctgagcgccatcgtaaggtggtgaacatcgatgatccaagtgccccatttttcgccgcacaaggagggcatgatgtccctgtggtaacatattcatttgagaacaagaaggctgatgtgcacacgcttaaataccagctttccctgtttgagacggaggttctggtacagacaccacatgggatcctcgagatctcctctgggctgcttggaagagataacatctacagcatccttgcaactgtggcagttggcattgcagtgggtgcaccactggaggacatagtcaggggcatagaagaggtggatgcgatcccaggtcggtgtgagctaatcgatgaggagcaagcctttggggtaatcgttgatcatgcaaggacaccagaagctctgtcaaggcttctggatggtgtaagggagctgggaccacgccggattgtcactgttgttggatgttgcggagagaaagaaagagggaagaggcccgtgatgacaaagatcgcagctgataaaagtgatgttgtcatgttgacatcagacaatccagcaaatgaagatccattagatatcctagatgatatgttggcaggtgtaggctggactatggaagaatacttgaaatatggtgctaatgattattacccaccccttccaaatgggcatagactattcctacatgatattagaagagttgcagttcgagctgctgttgcaatgggtgaacaaggcgatgtggtcgttatcactggcaaagggaatgatacctatcagattgaaggcgataaaaatgaattttttgatgacagagaagagtgccgagaagcattacaatacgtcgatcaattgcaccgagctggaatagacacctcagagttcccttggcggtatgtttcctctaaatcattagttactaggtcatctttcatgagtttggacttatcgccagattactgagccatttcaaaaacctttctccaatcattatttattaaaaaagagccccaacactactgagggaaaatccaaagaaatcataacctattaacctttagaacttgaattcctgacattgtcctcgcaactcatgattccacgtgcaggttctatgagagcttcagctatactgattttgttgctggaaactttcatctcacatgaaaattgcctatttattgtcttgttctatttattgtgacaggttaccagaaagccactgattttgatttaggcaagatagtcgagtttatcaactgaagagcaacaccagactcccaatttaaagaacgtgtgcttttttaggatttgaggatatgatatccaagtcctgcaagaaaattactccttacgtgctgagttttctaacccaagtgctaatggctaacaaattgctagcttatcagctattcagttacactgccatactagttagtagataaccagatggcccagtaaatgttgtattagttcatgcacgtaaatgaggtgtagctgtgaaagtagatcgatgaaggttcctgatgtgaaaaagtcaaaagacaatgtaggagcttctgggtcacagtttcaaaagattttgtcccttggcagtgattgtaagatcttttggaagttatgccttttgttgttctgccatctagattgtgtttcactgaatgcctttttagccaacaatttatatagtttctttcctattttagttgtccattaatctgaattcttcatagctaataacaac

SEQ ID NO: 80752 - DNA, 3245 bp, Zea Mays
aagggaccaaaacctcccccttcctttccaaccaaggtcaccgcgcgcctcccatggccacggcgcccctcgccttccgcctccccttccccttctcattcccctccgcctcccgccctcctccttccagaatcctagcccctccgaccccgcgccggctccccctacgcctcgccgccgcggccgcacgacggttccgcccgcccaccgccgacgacgaaccccctgaggccgcggaggactcttctcatggcctaacccgctatgaccagcttgcgcgaagcgtggagcgcgcccggatccgccagccggagatcacccctgacaacccgctcttctcgtccccctccactgcaggaggcggcggcggaggcagctacgacccagacgacgagttcttcgacgaaattgaccgcgctatcgctgagaagcgggaggagttcacgcggcgcgggctcatcaagccatcccctgcttcgccgccgccgtcgcaatcgcagccggaggacgaggacctcaccgacgagctctcccctgaggaggtgatcgatctcgatgagattcggaagcttcagggactcagtgttgtatccgtggccgacgaggaggatgaggaggtggaggggggcgaggacgaggacgatggattgccgctcgatgaggacggggaaggctttgacgtggccgaggagctcggcctcgagggtgccaggatgcgacaaccggctttccgcatgacgctggctgagctccttgacgagagcaagctcgtcccggtggccgtgacgggcgaccaggatgtcgccctcgcaggagtgcagcgcgacgccagcctggtggcggccggcgacctgtttgtgtgcgtgggagaggacgggctcgcggggctcaccgaagccgacaagcgtggggccgttgccgtcgtagctgatcaggacctcaacattgagggcaccctggcctgtcgcgcgctggtcattgtagacgacattttgactgcgctccgggtactccctgcctgcttgtacagccggccgtcgatgaacatggctatcataggtgtcactggcacagatggcgtaactaccacaactcacctcgtgaaagcaatgtacgaggctatgggggtgaggactggcttggtgggtgttcttgggacctatgccttcagcagcaacaagctcgatgcacgccctgatgcatctagtgaccccattgctgcgcagaagctgatggcaacaatgttacacaatggcactgaggcagtggtgttggagaaaggcactgatgggatgcctccatctggtgtggacagtgagatagattatgatattgctgttttgactaatgttaggcacactgatgaagagaatggcatgacctacgaggagtatatgagcagaatggcctctcttttctccagaatggtggaccctgagcgccatcgtaaggtggtgaacatcgatgatccaagtgccccatttttcgccgcacaaggagggcatgatgtccctgtggtaacatattcatttgagaacaagaaggctgatgtgcacacgcttaaataccagctttccctgtttgagacggaggttctggtacagacaccacatgggatcctcgagatctcctctgggctgcttggaagagataacatctacagcatccttgcaactgtggcagttggcattgcagtgggtgcaccactggaggacatagtcaggggcatagaagaggtggatgcgatcccaggtcggtgtgagctaatcgatgaggagcaagcctttggggtaatcgttgatcatgcaaggacaccagaagctctgtcaaggcttctggatggtgtaagggagctgggaccacgccggattgtcactgttgttggatgttgcggagagaaagaaagagggaagaggcccgtgatgacaaagatcgcagctgataaaagtgatgttgtcatgttgacatcagacaatccagcaaatgaagatccattagatatcctagatgatatgttggcaggtgtaggctggactatggaagaatacttgaaatatggtgctaatgattattacccaccccttccaaatgggcatagactattcctacatgatattagaagagttgcagttcgagctgctgttgcaatgggtgaacaaggcgatgtggtcgtaagtttcttgtctatgttatcaggaagccttttctgtagttctgagcttgtgaccatataactgagttgtaaagaaatttttggaactcatagattgctgtttccgtacattgatcttttaacagaaaagcctgcagaagacgacattaaccctatcatatttaccagttggacttcgaaatataatccatatctctttagaagcatgcaaactatgttactgttgttgtaccaccatctagaaagtggtaattgtgctatattagtgttgtgatgagaaagtgttcttgattctttaaaccacagttataatgcagtagtgttcacctgtcttgcttcttgggttcatcatgatcctgacatctatgcttctacggtcctaccttcaggttatcactggcaaagggaatgatacctatcagattgaaggcgataaaaatgaattttttgatgacagagaagagtgccgagaagcattacaatacgtcgatcaattgcaccgagctggaatagacacctcagagttcccttggcggttaccagaaagccactgattttgatttaggcaagatagtcgagtttatcaactgaagagcaacaccagactcccaatttaaagaacgtgtgcttttttaggatttgaggatatgatatccaagtcctgcaagaaaattactccttacgtgctgagttttctaacccaagtgctaatggctaacaaattgctagcttatcagctattcagttacactgccatactagttagtagataaccagatggcccagtaaatgttgtattagttcatgcacgtaaatgaggtgtagctgtgaaagtagatcgatgaaggttcctgatgtgaaaaagtcaaaagacaatgtaggagcttctgggtcacagtttcaaaagattttgtcccttggcagtgattgtaagatcttttggaagttatgccttttgttgttctgccatctagattgtgtttcactgaatgcctttttagccaacaatttatatagtttctttcctattttagttgtccattaatctgaattcttcatagctaataacaac

SEQ ID NO: 80753 - DNA, 1565 bp, Zea Mays
cttagatttaaacttcaaaatgcagttcgaatttagaattaaattttagtaaagaaattaaaaatagacaaaaaagagagaaaggagagaattaaatcgagctaaccataaaatggccagaccatttcactcgacatgcaagcatgagcgtgcatagattttttttaacccttttcttatttctttattctttctatcggctgcttcatgacgatatccatgggccccagcgctaacaggtcacagcggttgttgtgctctacagagactatcatgtgggccctattctctagaattgtatccatgcatagtttgttacgtacgaatcaaatcaggtaaccgtccatgcatgcggtttctgcgggcgggctcattgcgattaggagcaggttgttgagatccgaaatttctgccagatgccaactgaaccagctcttgagtattaaaaccgaacccccgtgactccctgcactatctcatccgctgctgggagcttgcaatcttccaggaacgtttttttggtgctagccgagagagaatcgagaggaagagagagagaaaaccatgcgctgtagcctgcttgtgaagccacaaggcctcggctggtcgctcaggagggatctcaccggtgggcgctagaaggttggacaaccgatgtcgcggggtgtgaagctcgccggacttgggatctctgcgcggtcacctgtgctcggctgagccgtggtctggagcgaccacatggcgaggggactggacatcggagtttagagcgtcgccgtgatccaagcgccacggtcggtcaactctgctccggtcgacggtgaaactggaagaacgtatgaagctagacttgttgcaatttatagacatgtaagagagaacggagttgagggacaacctatttctgtttcaacagaacaatttgtaaactttgaatggcaaccagttatctagatctttgcctgatgcgattggttacctgatgaactttaacagattacaaataaaagataacaacatatcaggcccatacctaactcttttgccaacttaacaagaattaaacatctgtaagtgtcgagtatctttattttctgcccatcctgatgcttctgatttgtaaaattagtaaataattatggttccaattttaccttttagtcacatgaatattaactcattacaaatcccatctgagttgtctagcttgccttgactccttcatttgtaagtagacctcaactttttctctaatattttctattttgcaagttgcagattacttgtaagttgacatgtcttgtgctgtgaacttgcagccttgttgataacaataatttctattttgcaagttgtagattacttgtaatttgtttcgtttattgagtaacactatcatcattatgtcgttcctaccgcactttccacatatctttcataagcggatattgttttcaatagttttgtgattaccagtccatggattacgatggactaaatgcaaatgacataggcttgtatagatcaagaaccatgctaacagtgatgaagaaagatgaatgaag

SEQ ID NO: 80754 - DNA, 3487 bp, Zea Mays
gtcaagaacaggtaccgcaggatgaggcgcttggaggatgctgcgatgtgttcgtgagaggtctaggccgtcgtctcccagtcaactttggttgctggaccgttgtctccttataatgtatttatttatttattttgtatagaactcctgttatgtagtaaagatgtgacattcgatcctgtgccatgaatcatcatatgtgtgagacttggtcccagcacacctggtgattatgttcgcgcccgggttttggacccctaaaatccgggtgtgacagaagtggtatcagaggaatgttgactgtaggacgaaacctagatagaaatagacaaacctttacctacttaccttactctgattcttctatacttttcttgatctaatctcatcttctactgttctactctgattaaccttacctttgctactctgattcttttctaaacttatctcaatcctttctcatctatttccgctttgctctgattattctaccatgttccttctaaagacaaaagtggatttcatactttgaaaccctgtgcctaaagtgactttaggaataggagacctactcttaggaacaaaaataaaactattttttatagatatctatgcgcttgagtgtttgttcttatgatatctgtttgatttagatctttgattgagtgtggtgaattatggagtaatgtccgcaattacatctgcatatacatataggcataaataaaattcataagataaccacacaacttagattatcctccattaaaatgtatctatttcatagagattcctcttatcttaaaagattctttcttatcttaatagatctgactaatctcaaaagattctatcctattcttagagatacatcttgttctaataagcatacttatccccaccaccttgcttatttcataatgtcgtaacaaacacgatctattccaaaattaaattaagtatactttatccagtctaatctgattacaccaatttaattctgatcccatctaatttgatcggatctaacctaatggacaaacatgttagataatactggtaaaataagattggatcctactcttataaatatgttttaatccaagttggactaagattccaatttagactagaccacatacaacaaccttgccatatgcaactaccttaaccactcgatagttacataacccctctgttttaaccaacagggattttgacctacctcatatagcctgccctacccacagctatcttatccaagacaccactacgaagaagatcaacctcatcaaggaaaggataagagtcatcgtcaaggataaaagttaaaccagatctctagatgcatcaagatccaccatccaggatagaagtttttcttgcctaaccttctcttatcctaagcttttctaaatcttacttattagctaaaacataatatgcacatgttttctagccacacttgctaatgaagagaaacttttggaagcattaaaactaattgaaaacgaaaagtaaaaaaaaactttctatatccctttcttgctaatctcgaggacgagattatttttaagggggtaggatttgtaatacccaaaatcttagaaataaaatagaatccttgattatatgattttgtgactatatttttgcatatcaacaatgtgggtccagttaaggcaaataataattatctaaatatataaattgtgcatcatgctgggtctttaaatgtgcacttgacttagatttaaacttcaaaatgcagttcgaatttagaattaaattttagtaaagaaattaaaaatagacaaaaaagagagaaaggagagaattaaatcgagctaaccataaaatggccagaccatttcactcgacatgcaagcatgagcgtgcatagattttttttaacccttttcttatttctttattctttctatcggctgcttcatgacgatatccatgggccccagcgctaacaggtcacagcggttgttgtgctctacagagactatcatgtgggccctattctctagaattgtatccatgcatagtttgttacgtacgaatcaaatcaggtaaccgtccatgcatgcggtttctgcgggcgggctcattgcgattaggagcaggttgttgagatccgaaatttctgccagatgccaactgaaccagctcctgagtattaaaaccgaacccccgtgactccctgcactatctcatccgctgctgggagcttgcaatcttccaggaacgtttttttggtgctagccgagagagaatcgagaggaagagagagagaaaaccatgcgctgtagcctgcttgtgaagccacaaggcctcggctggtcgctcaggagggatctcaccggtgggcgctagaaggttggacaaccgatgtcgcggggtgtgaagctcgccggacttgggatctctgcgcggtcacctgtgctcggctgagccgtggtctggagcgaccacatggcgaggggactggacatcggagtttagagcgtcgccgtgatccaagcgccacggtcggtcaactctgctccggtcgacggtgaaactggaagaacgtatgaagctagacttgttgcaatttatagacatgtaagagagaacggagttgagggacaacctatttctgtttcaacagaacaatttgtagtaagtcaaatcacctctcatactatgatcttgcaactgtttctttctctcttttctaagaataactattgcattaacatattttactaacttgtataaattgttattttcaagagattttatgtactgtctctttacatacaatgctaattgccacatccacaatcttgcagaactttgaatggcaaccagttatctagatctttgcctgatgcgattggttacctgatgaactttaacagattacaaataaaagataacaacatatcaggcccatacctaactcttttgccaacttaacaagaattaaacatctgtaagtgtcgagtatctttattttctgcccatcctgatgcttctgatttgtaaaattagtaaataattatggttccaattttaccttttagtcacatgaatattaactcattacaaatcccatctgagttgtctagcttgccttgactccttcatttgtaagtagacctcaactttttctctaatattttctattttgcaagttgcagattacttgtaagttgacatgtcttgtgctgtgaacttgcagccttgttgataacaataatttctattttgcaagttgtagattacttgtaatttgtttcgtttattgagtaacactatcatcattatgtcgttcctaccgcactttccacatatctttcataagcggatattgttttcaatagttttgtgattaccagtccatggattacgatggactaaatgcaaatgacataggcttgtatagatcaagaaccatgctaacagtgatgaagaaagatgaatgaag

SEQ ID NO: 80755 - DNA, 1816 bp, Zea Mays
tggaggggcgaagtgactgtggccacttcggccctgtcgactgaggaatgtgtgtcaggataaggtgtcaggcgatcctcgcattgaatactcctgcgatacggtcggttggcgaggcgatctggccaaggttgcttcactgcgaagcctgcccgagctgggcctcgggcgagtcgagggtgcgcccgttgcttgaggaggccctcgggcgaggcgtgaattcgcctgggtctactgttcctgcccgaggctgggttcgggcgaggcgagatcgcgtcccttgagtggacggggccttgacttgacttgcgcccatcaggctctgcagcttgtgctgatggtgattaccagccgagtttaggagtcttgggggtacccctaattatggtccccgacattaatgttaatatcaggagggtggtcattccctccctggtcgagtttttttatatattgctagtactcaaatatcatttgttaggatcgtttgaatcaatacttatttcatattaaactactgtatcccaggctataattttagggaatacacgatgcattacagctgatcaggcaaaagaataacaaagaaaatttacttgcagaaatcatgctggcatttaatttccatataatcacaaatttagaactaaacgaaaacttgtgtggacttacaagtttcttaaaaaggctatataaaaactggacgcatctgtaatgccaaaggaggcacatcagacagccaatgaatgaacatgtctggcagccttctttgcttcctctatgagctctgggccttagtccagatgattccttggtgaacagtgcagtctgtttgttaaattcaaaagatcaaaaggcacacgatcttgtggaatgctttagtagggtcatgactcatgagttggcttatggaaacagaaaataacagaaatggagcaaactggtcgagtagaagtgtgtaatgaagcaaggatgtatataagtaacaaagtgggaacacaaagagagaaggcttgcccttaccatccatggtggctgattaagcttgcaccccccagtgaacaagcaacctatatgaatgtttacccaatttttatgccctcctatgcattgaataattgaatttaatgtcatcttttaaccgaaccaactttttgtacaggtgaaactggaagaacgtatgaagctagacttgttgcaatttatagacatgtaagagagaacggagttgagggacaacctatttctgtttcaacagaacaatttgtaaactttgaatggcaaccagttatctagatctttgcctgatgcgattggttacctgatgaactttaacagattacaaataaaagataacaacatatcaggcccatacctaactcttttgccaacttaacaagaattaaacatcttcacatgaatattaactcattacaaatcccatctgagttgtctagcttgccttgactccttcatttgtaagtagacctcaactttttctctaatattttctattttgcaagttgcagattacttgtaagttgacatgtcttgtgctgtgaacttgcagccttgttgataacaataatttctattttgcaagttgtagattacttgtaatttgtttcgtttattgagtaacactatcatcattatgtcgttcctaccgcactttccacatatctttcataagcggatattgttttcaatagttttgtgattaccagtccatggattacgatggactaaatgcaaatgacataggcttgtatagatcaagaaccatgctaacagtgatgaagaaagatgaatgaag

SEQ ID NO: 80756 - DNA, 538 bp, Zea Mays
tcctgcgccgctcaactctgaaaaacaaaaatcccaccagtcatcgcccccttctctctgattttttcatgcgttggccacaaccacaaccttatcttctggccgcgcgccttcttcttccgcacaaattttccagctccctctgcgtttctctctgctcgcctcggcctccaactccggccatggtggccaccggaagcgcgtctcccggctccagctcaacggtctgcgttctccctgctctcccaagctgcgcgcccctgtcctgttccctgcgcgcgctgttcctgctcgctttggcatccgcgccatggagccctgcagggacgggccggtaaatttagaggccctgtactaaaattcaaaagaggtcctatttcatagaaaaaaaatacaatcagaactatattgtaatagaattcatatattctaaattgcaaaacatttactagatgtgtttgaaaagcagcaagctagctgctaactaagttaagcttaaatggtgtaatattagtctgctcattgatgcatattgttt

SEQ ID NO: 80757 - DNA, 1116 bp, Zea Mays
caaagaggaggtgctctttttcaccagaagatcttcataggaaaaatgaggatgatgaatttaggaacttccttcagcggatagattttaaactgaaggatgaagaagaacttaaagaaaggatggatgagatctgtaatttgggcgtcttataggggtcaaattctcaccagaacagtaagaggaatgatgtactacagaaaggcacttgaaatccaatgccttcaagatatgacagatcctgctaaagttgaccgagacagatcaataggatcctaccaagagttgcaatctgatattgaaatggcacaagctattgctgatatcaaattcacctatgttgtctcatgcaaggtagaagatgctaccaaagtacaaatgcttctgttcagtgccactctgtcagattgggtgaataagctctctatgaggtttctgaaagttgacaggaaaacagttgatcttgtcggtaatgagaaactgaaggccagtgcatctgttaagcaccttgttcttccttgtaataaggcagcaagggcacaagttattccagacattatccgatgttatagccatggaggtcgaaccatcatcttcactaagacgaaggattctgcatcagagctttctggtttgattcctggatcccgtgccttgcatggagatgtagcgcaagcgcagcgtgaagtaattcttgctggattctgtagcgggaagttccaagttttggttgcgacaaatgtggcggctcgtggtctggatattaatgatgtgcagcttatcattcagttcaagctctgcaacgggaggtccgttcagtttgacgtcggcaacgtggtcatggtgaccggcgggaggaacaccgggcgtgtaggagtgatcaagaactgggagaagcacaagggcatcttcgaggaaaacatagaatggaattcaaatttggtcgtcgcaaaagtgtggagacttgaattcatataaagttaggcttaacattagtgcaaatagttgtattttagtttagatttagagtacacttatgtatgccttatttgacaatgcttatttatgatatattgaatggtacttatttatattatatgaattataatgttgttc

SEQ ID NO: 80758 - DNA, 867 bp, Zea Mays
agttgctttcattgatgaggtcgaagctccaaccagaaatggagcaactaagaagacatattattccgttcttgtcaaaggtggtgaaaagtatgatgaggcaaggtagaagatgctaccaaagtacaaatgcttctgttcagtgccactctgtcagattgggtgaataagctctctatgaggtttctgaaagttgacaggaaaacagttgatcttgtcggtaatgagaaactgaaggccagtgcatctgttaagcaccttgttcttccttgtaataaggcagcaagggcacaagttattccagacattatccgatgttatagccatggaggtcgaaccatcatcttcactaagacgaaggattctgcatcagagctttctggtttgattcctggatcccgtgccttgcatggagatgtagcgcaagcgcagcgtgaagtaattcttgctggattctgtagcgggaagttccaagttttggttgcgacaaatgtggcggctcgtggtctggatattaatgatgtgcagcttatcattcagttcaagctctgcaacgggaggtccgttcagtttgacgtcggcaacgtggtcatggtgaccggcgggaggaacaccgggcgtgtaggagtgatcaagaactgggagaagcacaagggcatcttcgaggaaaacatagaatggaattcaaatttggtcgtcgcaaaagtgtggagacttgaattcatataaagttaggcttaacattagtgcaaatagttgtattttagtttagatttagagtacacttatgtatgccttatttgacaatgcttatttatgatatattgaatggtacttatttatattatatgaattataatgttgttc

SEQ ID NO: 80759 - DNA, 679 bp, Zea Mays
agcccctctcggccggctatcggcaaattcgacatccgctccgccgtctacagtctacataaggaatcgaggtagccccagtcgtcttcggcgctcaagtttcggccgccggccgcggtgccctccgccccttcccaatcctgcccccaagccccagtcagccatcgaaactccaacccccaggcggccaggcccaagcgtccggcggttgcggccccgcggcttggcgaaggcgaccggtggctaggccccagcgactcagggcggatcaaatgggaggctggccaagtgccgacagctgatcagagatgccgagtcagccggtgtgaagctggataggaggctgctttcgcggttgtctgaaactggaggcagacatccttagttgactctggtgagtgttgttgacatgtgttatgcacgggtagaatccggacaggacaggaacaccacagaggaaaattatctctagcatttattgtagagtaatacaaagagtaatcttggcagaagattagtacgttgttgcccagtttccctttgtatttgtcagtaatccatgatttcatgacaacgatgaattgctggctgaaatcggctccacctttaagccaaaatcctgaaactgctaacgcatgcttgcaagttcctttgtatcctttcttctgagcataccatg

SEQ ID NO: 80760 - DNA, 1872 bp, Zea Mays
agcccctctcggccggctatcggcaaattcgacatccgctccgccgtctacagtctacataaggaatcgaggtagccccagtcgtcttcggcgctcaagtttcggccgccggccgcggtgccctccgccccttcccaatcctgcccccaagccccagtcagccatcgaaactccaacccccaggcggccaggcccaagcgtccggcggttgcggccccgcggcttggcgaaggcgaccggtggctaggccccagcgactcagggcggatcaacgatagaggtctcgccaaggagatggagtcagaattcagtgacgagatatgtgccgagaatggtgctgaagaggacgatgaaacagaggatttaatttggagcaaagaagagatcgatgctatttcggcgctcttcgaccggccgatgcgccagaagcccctgaagccgcgaaaccccgcgaggcagagggcgcttccattgccactgccgcacaagacgaggctgcccgtggctcctgcgccgaagcagcacgtccgcctcgctgcaagagcggggctctcttctcgtgcttgcttcagcgaccaggtgcgcaagaaaccggagttccttctcgggattgcccgggagatcgcagcgcttcctcccgagcacgacgtctccacggtgctcgaccgttgggcgaggttcctccggaaaggctccctgtcacttaccattcgtgagctcgggcacatggggctccccgagcgcgcgctccagacactgtgctgggcccagaggcagaaagctgtgccgttgttccctgacgatcgtgttcttgcttcggccatcgaggttttggcacgctttgaacggctcagagtggagtctgcgctggagcaatgtgtgcccacggccagccgtgccgttctcgaggccatggcgagcgggttcatcagggcggggaaagtagaccgcgtgcgcaagctcctggaacttgcaaggatcaataacaggacgctgcaccccagcatctacgtgaagttgatgttggaagccacccggacacctgaaggctacgggcttgcgtcggcactggttgatgagcttggcgagaggccggagttggagttgcgtccacaggactgcacggctgtcatgaaggtctgcataaggctccgacggtacgcagccgtggagagccttttcagctggttcaggggggccattgggagccccaccgtggtgatgtacacgacggtgatccacagccggtgccgtgacgggaggcaccgagaggcactgtccctggtgtgggaaatggagcaggcaggctgcctgcttgatctgccggcctaccgagttatcgtcaagctatgcgtggcattgcacgatccggggagggctctccgctatctgtcaaggatgaaggaggctggttttattccaactggcgacatgtacgacagtctgatcgagggctatttggcagatgggaggctggccaagtgccgacagctgatcagagatgccgagtcagccggtgtgaagctggataggaggctgctttcgcggttgtctgaaactggaggcagacatccttagttgactctggtgagtgttgttgacatgtgttatgcacgggtagaatccggacaggacaggaacaccacagaggaaaattatctctagcatttattgtagagtaatacaaagagtaatcttggcagaagattagtacgttgttgcccagtttccctttgtatttgtcagtaatccatgatttcatgacaacgatgaattgctggctgaaatcggctccacctttaagccaaaatcctgaaactgctaacgcatgcttgcaagttcctttgtatcctttcttctgagcataccatg

SEQ ID NO: 80761 - DNA, 1852 bp, Zea Mays
agcccctctcggccggctatcggcaaattcgacatccgctccgccgtctacagtctacataaggaatcgaggtagccccagtcgtcttcggcgctcaagtttcggccgccggccgcggtgccctccgccccttcccaatcctgcccccaagccccagtcagccatcgaaactccaacccccaggcggccaggcccaagcgtccggcggttgcggccccgcggcttggcgaaggcgaccggtggctaggccccagcgactcagggcggatcaagtaagatttgtagtttcaattaattaggcctgcagatgcacccccgatgcccggttttggatttcccactgccgatgcccgagatgaaggccgccactgcgctggggagctggctgctcccggctgcgcctgccattcgccccacactggtgaatctcagatcccgggggttctgcagtcatggttatttcccctcggcgtcccggatttcttgctcatcagagttatctgatagcgatagaggtctcgccaaggagatggagtcagaattcagtgacgagatatgtgccgagaatggtgctgaagaggacgatgaaacagaggatttaatttggagcaaagaagagatcgatgctatttcggcgctcttcgaccggccgatgcgccagaagcccctgaagccgcgaaaccccgcgaggcagagggcgcttccattgccactgccgcacaagacgaggctgcccgtggctcctgcgccgaagcagcacgtccgcctcgctgcaagagcggggctctcttctcgtgcttgcttcagcgaccaggtgcgcaagaaaccggagttccttctcgggattgcccgggagatcgcagcgcttcctcccgagcacgacgtctccacggtgctcgaccgttgggcgaggttcctccggaaaggctccctgtcacttaccattcgtgagctcgggcacatggggctccccgagcgcgcgctccagacactgtgctgggcccagaggcagaaagctgtgccgttgttccctgacgatcgtgttcttgcttcggccatcgaggttttggcacgctttgaacggctcagagtggagtctgcgctggagcaatgtgtgcccacggccagccgtgccgttctcgaggccatggcgagcgggttcatcagggcggggaaagtagaccgcgtgcgcaagctcctggaacttgcaaggatcaataacaggacgctgcaccccagcatctacgtgaagttgatgttggaagccacccggacacctgaaggctacgggcttgcgtcggcactggttgatgagcttggcgagaggccggagttggagttgcgtccacaggactgcacggctgtcatgaaggtctgcataaggctccgacggtacgcagccgtggagagccttttcagctggttcaggggggccattgggagccccaccgtggtgatgtacacgacggtgatccacagccggtgccgtgacgggaggcaccgagaggcactgtccctggtgtgggaaatggagcaggcaggctgcctgcttgatctgccggcctaccgagttatcgtcaagctatgcgtggcattgcacgatccggggagggctctccgctatctgtcaaggatgaaggaggctggttttattccaactggcgacatgtacgacagtctgatcgagggctatttggcagatgggaggctggccaagtgccgacagctgatcagagatgccgagtcagccggtgtgaagctggataggaggctgctttcgcggttgtctgaaactggaggcagacatccttagttgactctgctatgactacgaccagagcatcggttcatc

SEQ ID NO: 80762 - DNA, 560 bp, Zea Mays
tgacgaatcttcttcgtgatgtggtggttctaccgcaaaggaccctccggcttctctggcgcctccacggccgaggaggtcaccgccggcgtcgacggccaccttctggtcgccgtcatcacaggtgcgacgagcggcatcgggctggagacggcgcgcgttctggcgctgcgcggtgtgcgcgtcgtcatggccgtccgcaacgtctcagccgggctcatggccaaggatgccatcgtggccaagacccccgacgcaagaatcgacgttctggagctggacctcagctccatagcttccgtgaggagattcgcctccgagttcgactctctcaaactgcccctcaacattctcatcaagtagagaaaatctccgaaccctggccccctatcactaacggaccggcgtcaactgtccactctgcaacggcccaaccgaaaggtggcgcacaggacaatgcaatccgagagcagatgagacacaacaaggagacttttttaaccaaacctaaaaattcgctgccgagggaaatcgaacccaggacttagagatgctactcg

SEQ ID NO: 80763 - DNA, 1255 bp, Zea Mays
tgacgaatcttcttcgtgatgtggtggttctaccgcaaaggaccctccggcttctctggcgcctccacggccgaggaggtcaccgccggcgtcgacggccaccttctggtcgccgtcatcacaggtgcgacgagcggcatcgggctggagacggcgcgcgttctggcgctgcgcggtgtgcgcgtcgtcatggccgtccgcaacgtctcagccgggctcatggccaaggatgccatcgtggccaagacccccgacgcaagaatcgacgttctggagctggacctcagctccatagcttccgtgaggagattcgcctccgagttcgactctctcaaactgcccctcaacattctcatcaacaacgccggagtgatgacaaggaactgcacacgttcctgcgacggtctggagctgcattttgcaacaaatcacatcggtcattttcttctaacaaacctcgtactggagaacatgaagagcacgtgcagggacacaggcaccgagggacggatcgtcaatgtgacatctgcagggcatgtgatgacctatcctgaagggatacgcttcgaaacaatccgtgatccatccggctgcaaatctgctgtacgtagtttgaacgacttcattgcttacggccaatccaagctcgccaacatccttcatacaaatgaattgtcccggatcttcaaggaggaaggagtgaacatttcagccaattcagttcatcctggtctcatcgccacgaaccttttcagggcctttggcaggaccatcattgccgctttttttaacaccgttggaaggatcgtgcgtagaagcgtagaacagggcgctgcgacaacatgctatgtggcagtgcatcctcaagtgaaggggctaagtgggaagtactttgctaactgtaatatagccagcccgagctcgcaagcctcggatgctgagttggccaagaagctatgggaattcagtctgcagacagtttcttgattaggcgcttgtcagatctgctgatgcgcgtgtattcatgtgtatgtgtatgtttatacattttctccagagttcatgtcggtgtatgccgttaaatatgtctagacttttattcaaaattattcaagaatcgaactcatggagccctaagcttctagagtcgaagtcaatcgcaagagttgtgttttacccaggcttgctcgtaaaatgatagagagagagagaaggacaagaaagaaagaaaaatagttcatgcagaagttgcgaa

SEQ ID NO: 80764 - DNA, 2200 bp, Zea Mays
cacatcaatataacatcaaattagcacagttcaacagtcaacgccacaaagaactgctccatgtattgcggtagagtacatgtccacaatatctcagaatcaaatcttatgaaacttacataatctaaaattaatcttctaattaaaacctgatacagttagcatttacatgaaacaccttaacaaaacatcaaataaacaaacaaatagtagagtcattccactaataacacttctgcgttaacaatgttgtgcaactccagagtccagaggctaattcactctttcataaacaacacctgcatggttattttcacatgctcctgcacatttctggttaacaagactcccacgcatggaggtggtcaagctcgtataaaggtgataattagctctagattttacactattaaatttaatgattgaatcgaattagtatcgagctctattcctattcatttttaaagtaaaattaattgagctctaacttattgtgaataaacatttagataatgatcctttaccaccactaagctcgtatcaatcacaataacctcagaaccttctaaatctacatgagatgaacagtgaatcttcaaaaaacttgcgactgcggactcttcccaacaattcaatctttgtcatttggtttccccatcatggcaggcaagtacataaccgcaacttcaatcaccaatactcatttaatcaataaagcattggaacatgtgcatcagatcaaggtgttgaggaagatcgtgagcatgctctatcgcgttttttggatcattatgatctaaatcaatatgaccaaaaaacttccaactagtcataaaaaagttacagcttctaaagttttagatattagctactcataccaaagtacatatatctataataaccagttaaattagaaatcttatgcttaaaacaactacttcaaattagcttaatgttcccattcaaaaaatggtttaaagtttaaacataaacttgcatgtgtgttgcaacaacattgtaatcgaacaagtacatatgtatgttcagctacctaacctcagttcaacaatggttttggggtctgcttgtttggttcaaagcatgccactaagcagtctacaccccaggtacacaaaaaattccaaagcctggaattgcatgaagagccaggcaaagctgcctggattaaaaccaaacaggccaagattgaagcagggggataaaaccgatagtgtttggtggcaggggtagatgaataaagcaaaaatgtgcaactcggtgaaatttggcaggcaggagcaaagtttggtacatctagttcctgatgctaatttcattaaggccatgtgattctagtgctacttttttttatctaggatggcaatcacatatatcactgagaaggaagtagcccacatcttcgtggtaaagggaagtaacagctccttaggggggtttcgcgtaacatattcctggttttttgggtggcacataggaaacaagtatttcaaaaaaacgactaaactgaagctgaagcaggttccaaacaagcaaatacatgcagtctcaaatgcgacctttcgatacataggttcagaacatttgcggcagggctaaaaacataggcccagaagaagacataagtaatgtagtgtgaggaatatcaggtggtctatggcatccacacagtcctcctaagcttccaggttgggctctcttggccatctggtttgggaaggggctccaataagcaggctccaaacttcaatgtcttggctgtttttagtatgggaagggagcaagggggcaaaggtgaaacgagcaggtccatcagatacttgagttgggttcaatgtgttcaaaaggcaaaaaaaaaattaagccaggcaatgcataatcacataatcattctgacatatcgagaaaaggttgaagaatcatacctgctttatcaagcaatctaaatcctaataaccatgatgctttccatagtgaagagaactatgaccagataacctgatggaagttattatcagttacaaagaacagtgtgaacaactggctggaaaaaagacaaaacactaacagttgctatatacagctatgtaccagactgaatttctatactggtaaatcaaacattgaatagccctccttacccactactagaggagcgggcactgtatccgctgtaagccgc

SEQ ID NO: 80765 - DNA, 1058 bp, Zea Mays
atttaatttcccaaaataccaatctagccaaaaccattttgtatgaccgtataccaccccgcacccacccgaggtgattgggattgtgaagaagagaggagagaaggtgaagtggactgcacagcacacacaactcgtcctcggtcctccgtacccttccgcgctccgccccagcacgaaacgccgaaaccctaccctttggcttctccgtcctcgtcctcgcccccgcccatccgcgcaccagccgaatgtcgtcgggaggcggtggggggcagcagttccgctacacgcagacgccgtccaaggtgctgcacctgcggaaccttccgtgggagtgcgcggaagaggagctcgtcgagctctgcaagcctttcggccgcatcgtcaacaccaagagcggcgtcggcgccaaccacaaccaggcctttgtcgagttcactgacgttaatcaggcaagaaataattaacaacaagagtcctggagagactgctggaaatgtcttgcttgttaccatagagggtgttcaatctagtgatgtcaccattgatgtgatccatatggcccatgataactggagaaaatatcattatcagcacctgcaattggagagataccatgtttgttttgctgccttctaactagtacattccaagttcttatgaactctcatgtttcatctggaggatgcaactttctaagtatcctccatcaacgcgcttatctccggtgtaggacacctcctgtttatccaagttactgatgaaaggttttctcggcttttgggtatgttcataaaatagccacctttgaaaaggctgcaggttttcaggcattgatccagtacactgatgcggctactgcttcagctgctaaagaatccttagatggaaggagcatcccaagttacttgcttccggagcatgtaacatcctgctgcctgcgaatttctttttctgcacataaggatttgaacatcaagtttcagtcgaaaccgcagcagttttcagatcgtctgatcgatcccactgggcgatcaggtgtcgatcagggcgattag

SEQ ID NO: 80766 - DNA, 1157 bp, Zea Mays
aaccattttgtatgaccgtataccaccccgcacccacccgaggtgattgggattgtgaagaagagaggagagaaggtgaagtggactgcacagcacacacaactcgtcctcggtcctccgtacccttccgcgctccgccccagcacgaaacgccgaaaccctaccctttggcttctccgtcctcgtcctcgcccccgcccatccgcgcaccagccgaatgtcgtcgggaggcggtggggggcagcagttccgctacacgcagacgccgtccaaggtgctgcacctgcggaaccttccgtgggagtgcgcggaagaggagctcgtcgagctctgcaagcctttcggccgcatcgtcaacaccaagagcggcgtcggcgccaaccacaaccaggcctttgtcgagttcactgacgttaatcaggcaagaaataattaacaacaagagtcctggagagactgctggaaatgtcttgcttgttaccatagagggtgttcaatctagtgatgtcaccattgatgtgatccatatgtatgcctgttattttcttgattgccgttgactgaaggaatccaagggagtctacctgacccgatccttgtaaatcaaagattttacatagattttaatttcgtagtaacatattctgcatgaatcagcaggcccatgataactggagaaaatatcattatcagcacctgcaattggagagataccatgtttgttttgctgccttctaactagtacattccaagttcttatgaactctcatgtttcatctggaggatgcaactttctaagtatcctccatcaacgcgcttatctccggtgtaggacacctcctgtttatccaagttactgatgaaaggttttctcggcttttgggtatgttcataaaatagccacctttgaaaaggctgcaggttttcaggcattgatccagtacactgatgcggctactgcttcagctgctaaagaatccttagatggaaggagcatcccaagttacttgcttccggagcatgtaacatcctgctgcctgcgaatttctttttctgcacataaggatttgaacatcaagtttcagtcgaaaccgcagcagttttcagatcgtctgatcgatcccactgggcgatcaggtgtcgatcagggcgattag

SEQ ID NO: 80767 - DNA, 1030 bp, Zea Mays
aaccattttgtatgaccgtataccaccccgcacccacccgaggtgattgggattgtgaagaagagaggagagaaggtgaagtggactgcacagcacacacaactcgtcctcggtcctccgtacccttccgcgctccgccccagcacgaaacgccgaaaccctaccctttggcttctccgtcctcgtcctcgcccccgcccatccgcgcaccagccgaatgtcgtcgggaggcggtggggggcagcagttccgctacacgcagacgccgtccaaggtgctgcacctgcggaaccttccgtgggagtgcgcggaagaggagctcgtcgagctctgcaagcctttcggccgcatcgtcaacaccaagagcggcgtcggcgccaaccacaaccaggcctttgtcgagttcactgacgttaatcaggcaagaaataattaacaacaagagtcctggagagactgctggaaatgtcttgcttgttaccatagagggtgttcaatctagtgatgtcaccattgatgtgatccatatgcaggcccatgataactggagaaaatatcattatcagcacctgcaattggagagataccatgtttgttttgctgccttctaactagtacattccaagttcttatgaactctcatgtttcatctggaggatgcaactttctaagtatcctccatcaacgcgcttatctccggtgtaggacacctcctgtttatccaagttactgatgaaaggttttctcggcttttgggtatgttcataaaatagccacctttgaaaaggctgcaggttttcaggcattgatccagtacactgatgcggctactgcttcagctgctaaagaatccttagatggaaggagcatcccaagttacttgcttccggagcatgtaacatcctgctgcctgcgaatttctttttctgcacataaggatttgaacatcaagtttcagtcgaaaccgcagcagttttcagatcgtctgatcgatcccactgggcgatcaggtgtcgatcagggcgattag

SEQ ID NO: 80768 - DNA, 2623 bp, Zea Mays
attttaaataaaaataaagctcgacgtcgtcgtcacctctctcgccgtccacgagtcacggcgagcggcgtcgacggcgggcgggggtcctggccgttcactgccatgcctgaccccaccaccaaacccccttcgccacgcccccgccgtcgccgcaggctctgcggcctctgcctcggcaccgcgctcctcgcgctcctcgtcgccgcgctcgtccatgtcgtcgccccgcttccgcgcgccgcttccgcctccgcgcgcttctccgtcatcatagacggaggcagcacgggcacccgggcccacgtcttcgtcacggggcacgacggcagcccggatctggcgctatccaccgtgatgcgcgtctccccgggcctctcgtccttcgccgccgacccggcgcgggccggggagtctttgaagccgctgatagattttgcgagggataagattgacggcgcgggcagcgccgctggggaggcggaggtgcgactcatggccaccgcagggctgcgcctgctcgaggagcgcacccaggaggcaatcttagcgtcctgcagggacgttctacgagcctctgggttccggttcgaggacgcgtgggccaaggtgatcccaggctcggatgaaggtatctatgcttgggttgcagcaaattatgctcttggaagacttggaggggatcctaacagaaccgttggaataattgaacttgggggcgcttcagctcagcttgccttcgtttctgatgaagtacttccacccaaactgtcatataattatacttttattgaaacaacatacactctctataccaacagctttttaaactttggtcaaaatgcagctcaagactcgttccatgaaatgctgaggtcaagaggtatttatttggatttaaatgttccttcctctatcaatatagccactccatactttagcactcttgtaagctttgtttttgagaccttgtggtgtcctgttcctgtgtcattggggagaattcagtacctgatgtacaagggaactaagggggtgtttgatttctagggactgattttattccattttagtctctaaattgccagaaattttagtttttctatttggcaatttagagactaaaatggaataaaatggagtgactaaaaattagttcctggaaaccaaacaccccctaagtctcacaatatatatactctgaatgaagagttcattcacagcactagacactgctgaatgaacactgtgcctataagtaattcttactacaactatcttggtattctatgttagtgcaaatgtacctggaccatagttataggataggagctattttagcagtttgacgaagtgggcacttgactgaaaaatttctgaaacagttacttgttccattggcttattatatacttggtaactaaacagagtgtaagatgtgtgtgaaacaggaagggattaataggttgtgtttcctatagttgcattatagtatatggagctactaagtactaattactccatccgttcttttttatttgtcgcattttagttcaaaaatgaactagcggacgacaaatattcgagaatggagagagtaccaagcaagtatctcttcaagttcaccacccacatttgcaggctcttctgaaaatgctacacttgctgatccttgtgctcccagaggatattcacgcaatgaagaaatgatgctgaggatgagtggtgcttcaaggtcaacattagagaaccagtatgttgataatgggactggaaactttacagaatgcatatcttcttcactgcttttactgcaaaaaggaaaggagaagtgccagtatcaacaatgtcacctgggatctactttcgtacctgagctgcgtggatacttcttggcaactgaaaatttctattttacatcaaagttctttggacttaagaagtcttcatcactctctgatttcatgtttgctggagaacaattttgcaatcaggatttgtccacccttagaaaaaaacatcctaataggtcagatgaagatttttcacggtattgcttctcgatggcatatattgtggctctactgcatgacagtcttggtgtatcactggatgataagaggattgagtattcaaaccaggttggagacattcaggttgaatgggctctaggagctttcatcacactgattcaaaatgcaagtttaaagccattacacaccgctgtggaatcaacccatagcaatagaccattgtttgctgtgctgggaatgtttcttttatgtggagtactttttgtatcaagatggaggaagcacaagacgaaagtcatatacgacttagagaaaggccggtacatcataacacacatcagctgatgctgaaccttgtgcagaagaactatatttatacgacaggaatagatgttgtgttgtacaacaatgtaccagttcaattatttgttttattttaggtagcagagctgggtgggtagagcatgaaatatagcacaaatgcgtatagaagaatgtgtagaacaagttgccatgtgttaattgaattattttggtgaataattatacctgttttgtttatcttatgagctccacatttttcatctgtt

SEQ ID NO: 80769 - DNA, 1822 bp, Zea Mays
attttaaataaaaataaagctcgacgtcgtcgtcacctctctcgccgtccacgagtcacggcgagcggcgtcgacggcgggcgggggtcctggccgttcactgccatgcctgaccccaccaccaaacccccttcgccacgcccccgccgtcgccgcaggctctgcggcctctgcctcggcaccgcgctcctcgcgctcctcgtcgccgcgctcgtccatgtcgtcgccccgcttccgcgcgccgcttccgcctccgcgcgcttctccgtcatcatagacggaggcagcacgggcacccgggcccacgtcttcgtcacggggcacgacggcagcccggatctggcgctatccaccgtgatgcgcgtctccccgggcctctcgtccttcgccgccgacccggcgcgggccggggagtctttgaagccgctgatagattttgcgagggataagattgacggcgcgggcagcgccgctggggaggcggaggtgcgactcatggccaccgcagggctgcgcctgctcgaggagcgcacccaggaggcaatcttagcgtcctgcagggacgttctacgagcctctgggttccggttcgaggacgcgtgggccaaggtgatcccaggctcggatgaaggtatctatgcttgggttgcagcaaattatgctcttggaagacttggaggggatcctaacagaaccgttggaataattgaacttgggggcgcttcagctcagcttgccttcgtttctgatgaagtacttccacccaaactgtcatataattatacttttattgaaacaacatacactctctataccaacagctttttaaactttggtcaaaatgcagctcaagactcgttccatgaaatgctgaggtcaagagaggatattcacgcaatgaagaaatgatgctgaggatgagtggtgcttcaaggtcaacattagagaaccagtatgttgataatgggactggaaactttacagaatgcatatcttcttcactgcttttactgcaaaaaggaaaggagaagtgccagtatcaacaatgtcacctgggatctactttcgtacctgagctgcgtggatacttcttggcaactgaaaatttctattttacatcaaagttctttggacttaagaagtcttcatcactctctgatttcatgtttgctggagaacaattttgcaatcaggatttgtccacccttagaaaaaaacatcctaataggtcagatgaagatttttcacggtattgcttctcgatggcatatattgtggctctactgcatgacagtcttggtgtatcactggatgataagaggattgagtattcaaaccaggttggagacattcaggttgaatgggctctaggagctttcatcacactgattcaaaatgcaagtttaaagccattacacaccgctgtggaatcaacccatagcaatagaccattgtttgctgtgctgggaatgtttcttttatgtggagtactttttgtatcaagatggaggaagcacaagacgaaagtcatatacgacttagagaaaggccggtacatcataacacacatcagctgatgctgaaccttgtgcagaagaactatatttatacgacaggaatagatgttgtgttgtacaacaatgtaccagttcaattatttgttttattttaggtagcagagctgggtgggtagagcatgaaatatagcacaaatgcgtatagaagaatgtgtagaacaagttgccatgtgttaattgaattattttggtgaataattatacctgttttgtttatcttatgagctccacatttttcatctgtt

SEQ ID NO: 80770 - DNA, 1865 bp, Zea Mays
attttaaataaaaataaagctcgacgtcgtcgtcacctctctcgccgtccacgagtcacggcgagcggcgtcgacggcgggcgggggtcctggccgttcactgccatgcctgaccccaccaccaaacccccttcgccacgcccccgccgtcgccgcaggctctgcggcctctgcctcggcaccgcgctcctcgcgctcctcgtcgccgcgctcgtccatgtcgtcgccccgcttccgcgcgccgcttccgcctccgcgcgcttctccgtcatcatagacggaggcagcacgggcacccgggcccacgtcttcgtcacggggcacgacggcagcccggatctggcgctatccaccgtgatgcgcgtctccccgggcctctcgtccttcgccgccgacccggcgcgggccggggagtctttgaagccgctgatagattttgcgagggataagattgacggcgcgggcagcgccgctggggaggcggaggtgcgactcatggccaccgcagggctgcgcctgctcgaggagcgcacccaggaggcaatcttagcgtcctgcagggacgttctacgagcctctgggttccggttcgaggacgcgtgggccaaggtgatcccaggctcggatgaaggtatctatgcttgggttgcagcaaattatgctcttggaagacttggaggggatcctaacagaaccgttggaataattgaacttgggggcgcttcagctcagcttgccttcgtttctgatgaagtacttccacccaaactgtcatataattatacttttattgaaacaacatacactctctataccaacagctttttaaactttggtcaaaatgcagctcaagactcgttccatgaaatgctgaggtcaagaggctcttctgaaaatgctacacttgctgatccttgtgctcccagaggatattcacgcaatgaagaaatgatgctgaggatgagtggtgcttcaaggtcaacattagagaaccagtatgttgataatgggactggaaactttacagaatgcatatcttcttcactgcttttactgcaaaaaggaaaggagaagtgccagtatcaacaatgtcacctgggatctactttcgtacctgagctgcgtggatacttcttggcaactgaaaatttctattttacatcaaagttctttggacttaagaagtcttcatcactctctgatttcatgtttgctggagaacaattttgcaatcaggatttgtccacccttagaaaaaaacatcctaataggtcagatgaagatttttcacggtattgcttctcgatggcatatattgtggctctactgcatgacagtcttggtgtatcactggatgataagaggattgagtattcaaaccaggttggagacattcaggttgaatgggctctaggagctttcatcacactgattcaaaatgcaagtttaaagccattacacaccgctgtggaatcaacccatagcaatagaccattgtttgctgtgctgggaatgtttcttttatgtggagtactttttgtatcaagatggaggaagcacaagacgaaagtcatatacgacttagagaaaggccggtacatcataacacacatcagctgatgctgaaccttgtgcagaagaactatatttatacgacaggaatagatgttgtgttgtacaacaatgtaccagttcaattatttgttttattttaggtagcagagctgggtgggtagagcatgaaatatagcacaaatgcgtatagaagaatgtgtagaacaagttgccatgtgttaattgaattattttggtgaataattatacctgttttgtttatcttatgagctccacatttttcatctgtt

SEQ ID NO: 80771 - DNA, 1679 bp, Zea Mays
attttaaataaaaataaagctcgacgtcgtcgtcacctctctcgccgtccacgagtcacggcgagcggcgtcgacggcgggcgggggtcctggccgttcactgccatgcctgaccccaccaccaaacccccttcgccacgcccccgccgtcgccgcaggctctgcggcctctgcctcggcaccgcgctcctcgcgctcctcgtcgccgcgctcgtccatgtcgtcgccccgcttccgcgcgccgcttccgcctccgcgcgcttctccgtcatcatagacggaggcagcacgggcacccgggcccacgtcttcgtcacggggcacgacggcagcccggatctggcgctatccaccgtgatgcgcgtctccccgggcctctcgtccttcgccgccgacccggcgcgggccggggagtctttgaagccgctgatagattttgcgagggataagattgacggcgcgggcagcgccgctggggaggcggaggtgcgactcatggccaccgcagggctgcgcctgctcgaggagcgcacccaggaggcaatcttagcgtcctgcagggacgttctacgagcctctgggttccggttcgaggacgcgtgggccaaggtgatcccaggctcggatgaaggtatctatgcttgggttgcagcaaattatgctcttggaagacttggaggggatcctaacagaaccgttggaataattgaacttgggggcgcttcagctcagcttgccttcgtttctgatgaagtacttccacccaaactgtcatataattatacttttattgaaacaacatacactctctataccaacagctttttaaactttggtcaaaatgcagctcaagactcgttccatgaaatgctgaggtcaagagagaagtgccagtatcaacaatgtcacctgggatctactttcgtacctgagctgcgtggatacttcttggcaactgaaaatttctattttacatcaaagttctttggacttaagaagtcttcatcactctctgatttcatgtttgctggagaacaattttgcaatcaggatttgtccacccttagaaaaaaacatcctaataggtcagatgaagatttttcacggtattgcttctcgatggcatatattgtggctctactgcatgacagtcttggtgtatcactggatgataagaggattgagtattcaaaccaggttggagacattcaggttgaatgggctctaggagctttcatcacactgattcaaaatgcaagtttaaagccattacacaccgctgtggaatcaacccatagcaatagaccattgtttgctgtgctgggaatgtttcttttatgtggagtactttttgtatcaagatggaggaagcacaagacgaaagtcatatacgacttagagaaaggccggtacatcataacacacatcagctgatgctgaaccttgtgcagaagaactatatttatacgacaggaatagatgttgtgttgtacaacaatgtaccagttcaattatttgttttattttaggtagcagagctgggtgggtagagcatgaaatatagcacaaatgcgtatagaagaatgtgtagaacaagttgccatgtgttaattgaattattttggtgaataattatacctgttttgtttatcttatgagctccacatttttcatctgtt

SEQ ID NO: 80772 - DNA, 855 bp, Zea Mays
tctctcttcacagcctctcttcagttgttcacataaactgacataaaaatcacttgaagagaagtgccagtatcaacaatgtcacctgggatctactttcgtacctgagctgcgtggatacttcttggcaactgaaaatttctattttacatcaaagttctttggacttaagaagtcttcatcactctctgatttcatgtttgctggagaacaattttgcaatcaggatttgtccacccttagaaaaaaacatcctaataggtcagatgaagatttttcacggtattgcttctcgatggcatatattgtggctctactgcatgacagtcttggtgtatcactggatgataagaggattgagtattcaaaccaggttggagacattcaggttgaatgggctctaggagctttcatcacactgattcaaaatgcaagtttaaagccattacacaccgctgtggaatcaacccatagcaatagaccattgtttgctgtgctgggaatgtttcttttatgtggagtactttttgtatcaagatggaggaagcacaagacgaaagtcatatacgacttagagaaaggccggtacatcataacacacatcagctgatgctgaaccttgtgcagaagaactatatttatacgacaggaatagatgttgtgttgtacaacaatgtaccagttcaattatttgttttattttaggtagcagagctgggtgggtagagcatgaaatatagcacaaatgcgtatagaagaatgtgtagaacaagttgccatgtgttaattgaattattttggtgaataattatacctgttttgtttatcttatgagctccacatttttcatctgtt

SEQ ID NO: 80773 - DNA, 1436 bp, Zea Mays
ctcttaatatgttgtacagattagccatggtcgattgtcagttcgctataccagtagtgattgactgatttttgtcactttcgtttttagggagtaggaacactagattcgtagactgtcgggccgcatcatcgccgatatgtggcctcacccgtgatataatcccttgcttgggttgggtgaacggtgaaaaagcgggagcggccgatcgggagctgctgggagctagttgggagccaaggcgtcgtcgtaggttgccgtctcgctgccgcccgccggccacagttgctgcggtgccgtcggccatatctgacggctgaccccttaccggcaattcgtgagcaacctgacggggtcttccctgctggagatcgcggcgctctccactgtcgttccggcattggtagttctcagaaagtggagcagcagagataattctaggaaggagtcagcaaagaaaaatgatgatcaagttcatactgttcgtaaagattggatgcagtacttctctacactaggtgtagattatctcactgttgtattgccaattattttggttttcacagtcttatcggaatgggtttttatgtgtgctatttctcttgtaatcctgatatccatttacatcatgtttaaaaggtctcagtttcatcttaaagatggattcagtcagctgcctttgctcagggcagacatatcttcttaccgtgtctcagtggttctggtgacatgtttgtgcatattagctgtggacttcaaaatatttccaagacgctatgctaaggctgaaacatatggtagtggcatcatggatcttggagtaggatcttttgtagtggctaatgcactggtatctagacaagcacgaaatatagcctcaatgagtttcaaggcagttctttgttcgataagtccactcttatctcttggctttgctcgcattatatccacatggggtgttgattatcaggtccatgtaggagaatatggtgtgcattggaacttctttttcaccctcgcagctgtctctatccttacatccgttgtcagaattcatccaaaacattgtggcttagttggtctgcttatccttgctggataccagatttggctgtcttctggattgaatgagtacctcatttctcacaaaagaagtgctgatataatcacccagaataaggagggcatttatagcatccttggatactggggtatgtttctaattggtgtttctttgggtttctatctgttcgttgacactagttcaaagggcaagaaccggaacactcaagtcatgcaaatctgggttcttgctgcttctttttggattttggcaatcatctttgatagctacattgagagagtttctcgtcgaatgtgcaacttcgcttatgttatgcttgtttttggccagaattttcagtgtttgtatttgt

SEQ ID NO: 80774 - DNA, 1998 bp, Zea Mays
ctcttaatatgttgtacagattagccatggtcgattgtcagttcgctataccagtagtgattgactgatttttgtcactttcgtttttagggagtaggaacactagattcgtagactgtcgggccgcatcatcgccgatatgtggcctcacccgtgatataatcccttgcttgggttgggtgaacggtgaaaaagcgggagcggccgatcgggagctgctgggagctagttgggagccaaggcgtcgtcgtaggttgccgtctcgctgccgcccgccggccacagttgctgcggtgccgtcggccatatctgacggctgaccccttaccggcaattcgtgagcaacctgacggggtcttccctgctggagatcgcggcgctctccactgtcgttccggcattggtagttctcagaaagtggagcagcagagataattctaggaaggagtcagcaaagaaaaatgatgatcaagttcatactgttcgtaaagattggatgcagtacttctctacactaggtgtagattatctcactgttgtattgccaattattttggttttcacagtcttatcggaatgggtttttatgtgtgctatttctcttgtaatcctgatatccatttacatcatgtttaaaaggtctcagtttcatcttaaagatggattcagtcagctgcctttgctcagggcagacatatcttcttaccgtgtctcagtggttctggtgacatgtttgtgcatattagctgtggacttcaaaatatttccaagacgctatgctaaggctgaaacatatggtagtggcatcgagtttcaaggcagttctttgttcgataagtccactcttatctcttggctttgctcgcattatatccacatggggtgttgattatcaggtccatgtaggagaatatggtgtgcattggaacttctttttcaccctcgcagctgtctctatccttacatccgttgtcagaattcatccaaaacattgtggcttagttggtctgcttatccttgctggataccagatttggctgtcttctggattgaatgagtacctcatttctcacaaaagaagtgctgatataatcacccagaataaggagggcatttatagcatccttggatactggggtatgtttctaattggtgtttctttgggtttctatctgttcgttgacactagttcaaagggcaagaaccggaacactcaagtcatgcaaatctgggttcttgctgcttctttttggattttggcaatcatctttgatagctacattgagagagtttctcgtcgaatgaggacatatattggacttctctttaacaatatgaactttatctgacagtgcctacaaattaacctataatgaggccaaagaaaggcaaggtgttaggtgcatattattagatgcattcttatatgctttaaatattttgtaatctttcagtcagtatgtcgtacatgtttccacttgatataatgtgcacagaatggttcaaaattccactattgattgctttgcctgctaatgttactgttttatgatttgggagcaactttgccatattatcagacccatggatagtagcaagggggtttgcaaagccatgaaatttactacttacccaagtaaataaacctgctttcctatgagtaccaacaatgggtttgtctggtttttttctttagttgtttggtctattatttttgttcacgcttcaggttagcttcactgttcatgctgactgattgtccaatataggttttatctatcctcacattagctgggtttgcctcatataaaaagaacttggttcttgaagatgcattcaatgaaaatatgcttggctccttccttctggcaaatatccttactggtctggttaatctctcagttaacacgctctctgcctcttccttcactgccttcatgattctatgacagagagaatttgagcactatgacattcatgacagatagtacatactcg

SEQ ID NO: 80775 - DNA, 2851 bp, Zea Mays
ctcttaatatgttgtacagattagccatggtcgattgtcagttcgctataccagtagtgattgactgatttttgtcactttcgtttttagggagtaggaacactagattcgtagactgtcgggccgcatcatcgccgatatgtggcctcacccgtgatataatcccttgcttgggttgggtgaacggtgaaaaagcgggagcggccgatcgggagctgctgggagctagttgggagccaaggcgtcgtcgtaggttgccgtctcgctgccgcccgccggccacagttgctgcggtgccgtcggccatatctgacggctgaccccttaccggcagttatcctcgtccctcacgcttccattcctgcgcctctcgaatctcgatggagggccgcctcttcgataagcccttgaacccgaataagctcctcaaggagcagtaagttcagggtccctagcccacgaatcgaggctgcggttctagtcgctcccttctcgccttacggctctaattaacccatcccctgccttggtgatgcagattcgtgagcaacctgacggggtcttccctgctggagatcgcggcgctctccactgtcgttccggcattggtagttctcagaaagtggagcagcagagataattctaggaaggagtcagcaaagaaaaatgatgatcaagttcatactgttcgtaaagattggatgcagtacttctctacactaggtgtagattatctcactgttgtattgccaattattttggttttcacagtcttatcggaatgggtttttatgtgtgctatttctcttgtaatcctgatatccatttacatcatgtttaaaaggtctcagtttcatcttaaagatggattcagtcagctgcctttgctcagggcagacatatcttcttaccgtgtctcagtggttctggtgacatgtttgtgcatattagctgtggacttcaaaatatttccaagacgctatgctaaggctgaaacatatggtagtggcatcatggatcttggagtaggatcttttgtagtggctaatgcactggtatctagacaagcacgaaatatagcctcaatgagtttcaaggcagttctttgttcgataagtccactcttatctcttggctttgctcgcattatatccacatggggtgttgattatcaggtccatgtaggagaatatggtgtgcattggaacttctttttcaccctcgcagctgtctctatccttacatccgttgtcagaattcatccaaaacattgtggcttagttggtctgcttatccttgctggataccagatttggctgtcttctggattgaatgagtacctcatttctcacaaaagaagtgctgatataatcacccagaataaggagggcatttatagcatccttgttcaaagggcaagaaccggaacactcaagtcatgcaaatctgggttcttgctgcttctttttggattttggcaatcatctttgatagctacattgagagagtttctcgtcgaatgaggacatatattggacttctctttaacaatatgaactttatctgacagtgcctacaaattaacctataatgaggccaaagaaaggcaaggtgttaggtgcatattattagatgcattcttatatgctttaaatattttgtaatctttcagtcagtatgtcgtacatgtttccacttgatataatgtgcacagaatggttcaaaattccactattgattgctttgcctgctaatgttactgttttatgatttgggagcaactttgccatattatcagacccatggatagtagcaagggggtttgcaaagccatgaaatttactacttacccaagtaaataaacctgctttcctatgagtaccaacaatgggtttgtctggtttttttctttagttgtttggtctattatttttgttcacgcttcaggttagcttcactgttcatgctgactgattgtccaatataggttttatctatcctcacattagctgggtttgcctcatataaaaagaacttggttcttgaagatgcattcaatgaaaatatgcttggctccttccttctggcaaatatccttactggtctggttaatctctcagttaacacgctctctgcctcttccttcactgccttcatgattctgtcagtatacgcctttactttatgcatggttactggccttacccatttttgtggtgttaggatgaaattctggtgaattgtaagctaccatttgatatgatgtattcattcattaacttgtcaacaaactggtagctagcttgcttgaaatataatactacgtctgttcttgaatatttgtcgcccggtagtttatttttcaactaaaacgtgacaaataaaaaagtctgaataatttttagggaaagaagccaaattgctatcctaattagttgatccagttattaactctgcctagactcgggagcttacttctttcatgtgtgttcaaggttctttgtgtctcatcagaaacttcctagtttccttcatttcatggtacaacgtgtctgctggtattaatcaataccgctatttacttttgacctaaagacgacacatccacccacggtatatgtgttgacgaattgaagatggtctgtcaagagtttgctgtttcagtatttaatgtcagtcagaatcaggcttgaagtaccataggttcatactgctacagttacccacttgtcacagataaaacagtgggtccaggaaagcagtgctgtagtcgaatgttacttgctggatttctgcagatgacagagagaatttgagcactatgacattcatgacagatagtacatactcg

SEQ ID NO: 80776 - DNA, 2686 bp, Zea Mays
ctcttaatatgttgtacagattagccatggtcgattgtcagttcgctataccagtagtgattgactgatttttgtcactttcgtttttagggagtaggaacactagattcgtagactgtcgggccgcatcatcgccgatatgtggcctcacccgtgatataatcccttgcttgggttgggtgaacggtgaaaaagcgggagcggccgatcgggagctgctgggagctagttgggagccaaggcgtcgtcgtaggttgccgtctcgctgccgcccgccggccacagttgctgcggtgccgtcggccatatctgacggctgaccccttaccggcagttatcctcgtccctcacgcttccattcctgcgcctctcgaatctcgatggagggccgcctcttcgataagcccttgaacccgaataagctcctcaaggagcaattcgtgagcaacctgacggggtcttccctgctggagatcgcggcgctctccactgtcgttccgataattctaggaaggagtcagcaaagaaaaatgatgatcaagttcatactgttcgtaaagattggatgcagtacttctctacactaggtgtagattatctcactgttgtattgccaattattttggttttcacagtcttatcggaatgggtttttatgtgtgctatttctcttgtaatcctgatatccatttacatcatgtttaaaaggtctcagtttcatcttaaagatggattcagtcagctgcctttgctcagggcagacatatcttcttaccgtgtctcagtggttctggtgacatgtttgtgcatattagctgtggacttcaaaatatttccaagacgctatgctaaggctgaaacatatggtagtggcatcgagtttcaaggcagttctttgttcgataagtccactcttatctcttggctttgctcgcattatatccacatggggtgttgattatcaggtccatgtaggagaatatggtgtgcattggaacttctttttcaccctcgcagctgtctctatccttacatccgttgtcagaattcatccaaaacattgtggcttagttggtctgcttatccttgctggataccagatttggctgtcttctggattgaatgagtacctcatttctcacaaaagaagtgctgatataatcacccagaataaggagggcatttatagcatccttgttcaaagggcaagaaccggaacactcaagtcatgcaaatctgggttcttgctgcttctttttggattttggcaatcatctttgatagctacattgagagagtttctcgtcgaatgtgcaacttcgcttatgttatgcttgtttttggccagaattttcagaggacatatattggacttctctttaacaatatgaactttatctgacagtgcctacaaattaacctataatgaggccaaagaaaggcaaggtgttaggtgcatattattagatgcattcttatatgctttaaatattttgtaatctttcagtcagtatgtcgtacatgtttccacttgatataatgtgcacagaatggttcaaaattccactattgattgctttgcctgctaatgttactgttttatgatttgggagcaactttgccatattatcagacccatggatagtagcaagggggtttgcaaagccatgaaatttactacttacccaagtaaataaacctgctttcctatgagtaccaacaatgggtttgtctggtttttttctttagttgtttggtctattatttttgttcacgcttcaggttagcttcactgttcatgctgactgattgtccaatataggttttatctatcctcacattagctgggtttgcctcatataaaaagaacttggttcttgaagatgcattcaatgaaaatatgcttggctccttccttctggcaaatatccttactggtctggttaatctctcagttaacacgctctctgcctcttccttcactgccttcatgattctgtcagtatacgcctttactttatgcatggttactggccttacccatttttgtggtgttaggatgaaattctggtgaattgtaagctaccatttgatatgatgtattcattcattaacttgtcaacaaactggtagctagcttgcttgaaatataatactacgtctgttcttgaatatttgtcgcccggtagtttatttttcaactaaaacgtgacaaataaaaaagtctgaataatttttagggaaagaagccaaattgctatcctaattagttgatccagttattaactctgcctagactcgggagcttacttctttcatgtgtgttcaaggttctttgtgtctcatcagaaacttcctagtttccttcatttcatggtacaacgtgtctgctggtattaatcaataccgctatttacttttgacctaaagacgacacatccacccacggtatatgtgttgacgaattgaagatggtctgtcaagagtttgctgtttcagtatttaatgtcagtcagaatcaggcttgaagtaccataggttcatactgctacagttacccacttgtcacagataaaacagtgggtccaggaaagcagtgctgtagtcgaatgttacttgctggatttctgcagatgacagagagaatttgagcactatgacattcatgacagatagtacatactcg

SEQ ID NO: 80777 - DNA, 2400 bp, Zea Mays
ctcttaatatgttgtacagattagccatggtcgattgtcagttcgctataccagtagtgattgactgatttttgtcactttcgtttttagggagtaggaacactagattcgtagactgtcgggccgcatcatcgccgatatgtggcctcacccgtgatataatcccttgcttgggttgggtgaacggtgaaaaagcgggagcggccgatcgggagctgctgggagctagttgggagccaaggcgtcgtcgtaggttgccgtctcgctgccgcccgccggccacagttgctgcggtgccgtcggccatatctgacggctgaccccttaccggcagttatcctcgtccctcacgcttccattcctgcgcctctcgaatctcgatggagggccgcctcttcgataagcccttgaacccgaataagctcctcaaggagcaattcgtgagcaacctgacggggtcttccctgctggagatcgcggcgctctccactgtcgttccggcattggtagttctcagaaagtggagcagcagagataattctaggaaggagtcagcaaagaaaaatgatgatcaagttcatactgttcgtaaagattggatgcagtacttctctacactaggtgtagattatctcactgttgtattgccaattattttggttttcacagtcttatcggaatgggtttttatgtgtgctatttctcttgtaatcctgatatccatttacatcatgtttaaaaggtctcagtttcatcttaaagatggattcagtcagctgcctttgctcagggcagacatatcttcttaccgtgtctcagtggttctggtgacatgtttgtgcatattagctgtggacttcaaaatatttccaagacgctatgctaaggctgaaacatatggtagtggcatcgagtttcaaggcagttctttgttcgataagtccactcttatctcttggctttgctcgcattatatccacatggggtgttgattatcaggtccatgtaggagaatatggtgtgcattggaacttctttttcaccctcgcagctgtctctatccttacatccgttgtcagaattcatccaaaacattgtggcttagttggtctgcttatccttgctggataccagatttggctgtcttctggattgaatgagtacctcatttctcacaaaagaagtgctgatataatcacccagaataaggagggcatttatagcatccttggatactggggtatgtttctaattggtgtttctttgggtttctatctgttcgttgacactagttcaaagggcaagaaccggaacactcaagtcatgcaaatctgggttcttgctgcttctttttggattttggcaatcatctttgatagctacattgagagagtttctcgtcgaatgtgcaacttcgcttatgttatgcttgtttttggccagaattttcagaggacatatattggacttctctttaacaatatgaactttatctgacagtgcctacaaattaacctataatgaggccaaagaaaggttttatctatcctcacattagctgggtttgcctcatataaaaagaacttggttcttgaagatgcattcaatgaaaatatgcttggctccttccttctggcaaatatccttactggtctggttaatctctcagttaacacgctctctgcctcttccttcactgccttcatgattctgtcagtatacgcctttactttatgcatggttactggccttacccatttttgtggtgttaggatgaaattctggtgaattgtaagctaccatttgatatgatgtattcattcattaacttgtcaacaaactggtagctagcttgcttgaaatataatactacgtctgttcttgaatatttgtcgcccggtagtttatttttcaactaaaacgtgacaaataaaaaagtctgaataatttttagggaaagaagccaaattgctatcctaattagttgatccagttattaactctgcctagactcgggagcttacttctttcatgtgtgttcaaggttctttgtgtctcatcagaaacttcctagtttccttcatttcatggtacaacgtgtctgctggtattaatcaataccgctatttacttttgacctaaagacgacacatccacccacggtatatgtgttgacgaattgaagatggtctgtcaagagtttgctgtttcagtatttaatgtcagtcagaatcaggcttgaagtaccataggttcatactgctacagttacccacttgtcacagataaaacagtgggtccaggaaagcagtgctgtagtcgaatgttacttgctggatttctgcagatgacagagagaatttgagcactatgacattcatgacagatagtacatactcg

SEQ ID NO: 80778 - DNA, 2781 bp, Zea Mays
ctcttaatatgttgtacagattagccatggtcgattgtcagttcgctataccagtagtgattgactgatttttgtcactttcgtttttagggagtaggaacactagattcgtagactgtcgggccgcatcatcgccgatatgtggcctcacccgtgatataatcccttgcttgggttgggtgaacggtgaaaaagcgggagcggccgatcgggagctgctgggagctagttgggagccaaggcgtcgtcgtaggttgccgtctcgctgccgcccgccggccacagttgctgcggtgccgtcggccatatctgacggctgaccccttaccggcagttatcctcgtccctcacgcttccattcctgcgcctctcgaatctcgatggagggccgcctcttcgataagcccttgaacccgaataagctcctcaaggagcaattcgtgagcaacctgacggggtcttccctgctggagatcgcggcgctctccactgtcgttccggcattggtagttctcagaaagtggagcagcagagataattctaggaaggagtcagcaaagaaaaatgatgatcaagttcatactgttcgtaaagattggatgcagtacttctctacactaggtgtagattatctcactgttgtattgccaattattttggttttcacagtcttatcggaatgggtttttatgtgtgctatttctcttgtaatcctgatatccatttacatcatgtttaaaaggtctcagtttcatcttaaagatggattcagtcagctgcctttgctcagggcagacatatcttcttaccgtgtctcagtggttctggtgacatgtttgtgcatattagctgtggacttcaaaatatttccaagacgctatgctaaggctgaaacatatggtagtggcatcgagtttcaaggcagttctttgttcgataagtccactcttatctcttggctttgctcgcattatatccacatggggtgttgattatcaggtccatgtaggagaatatggtgtgcattggaacttctttttcaccctcgcagctgtctctatccttacatccgttgtcagaattcatccaaaacattgtggcttagttggtctgcttatccttgctggataccagatttggctgtcttctggattgaatgagtacctcatttctcacaaaagaagtgctgatataatcacccagaataaggagggcatttatagcatccttggatactggggtatgtttctaattggtgtttctttgggtttctatctgttcgttgacactagttcaaagggcaagaaccggaacactcaagtcatgcaaatctgggttcttgctgcttctttttggattttggcaatcatctttgatagctacattgagagagtttctcgtcgaatgtgcaacttcgcttatgttatgcttgtttttggccagaattttcagaggacatatattggacttctctttaacaatatgaactttatctgacagtgcctacaaattaacctataatgaggccaaagaaaggcaaggtgttaggtgcatattattagatgcattcttatatgctttaaatattttgtaatctttcagtcagtatgtcgtacatgtttccacttgatataatgtgcacagaatggttcaaaattccactattgattgctttgcctgctaatgttactgttttatgatttgggagcaactttgccatattatcagacccatggatagtagcaagggggtttgcaaagccatgaaatttactacttacccaagtaaataaacctgctttcctatgagtaccaacaatgggtttgtctggtttttttctttagttgtttggtctattatttttgttcacgcttcaggttagcttcactgttcatgctgactgattgtccaatataggttttatctatcctcacattagctgggtttgcctcatataaaaagaacttggttcttgaagatgcattcaatgaaaatatgcttggctccttccttctggcaaatatccttactggtctggttaatctctcagttaacacgctctctgcctcttccttcactgccttcatgattctgtcagtatacgcctttactttatgcatggttactggccttacccatttttgtggtgttaggatgaaattctggtgaattgtaagctaccatttgatatgatgtattcattcattaacttgtcaacaaactggtagctagcttgcttgaaatataatactacgtctgttcttgaatatttgtcgcccggtagtttatttttcaactaaaacgtgacaaataaaaaagtctgaataatttttagggaaagaagccaaattgctatcctaattagttgatccagttattaactctgcctagactcgggagcttacttctttcatgtgtgttcaaggttctttgtgtctcatcagaaacttcctagtttccttcatttcatggtacaacgtgtctgctggtattaatcaataccgctatttacttttgacctaaagacgacacatccacccacggtatatgtgttgacgaattgaagatggtctgtcaagagtttgctgtttcagtatttaatgtcagtcagaatcaggcttgaagtaccataggttcatactgctacagttacccacttgtcacagataaaacagtgggtccaggaaagcagtgctgtagtcgaatgttacttgctggatttctgcagatgacagagagaatttgagcactatgacattcatgacagatagtacatactcg

SEQ ID NO: 80779 - DNA, 3514 bp, Zea Mays
ctcttaatatgttgtacagattagccatggtcgattgtcagttcgctataccagtagtgattgactgatttttgtcactttcgtttttagggagtaggaacactagattcgtagactgtcgggccgcatcatcgccgatatgtggcctcacccgtgatataatcccttgcttgggttgggtgaacggtgaaaaagcgggagcggccgatcgggagctgctgggagctagttgggagccaaggcgtcgtcgtaggttgccgtctcgctgccgcccgccggccacagttgctgcggtgccgtcggccatatctgacggctgaccccttaccggcagttatcctcgtccctcacgcttccattcctgcgcctctcgaatctcgatggagggccgcctcttcgataagcccttgaacccgaataagctcctcaaggagcagtaagttcagggtccctagcccacgaatcgaggctgcggttctagtcgctcccttctcgccttacggctctaattaacccatcccctgccttggtgatgcagattcgtgagcaacctgacggggtcttccctgctggagatcgcggcgctctccactgtcgttccggcattggtagttctcagaaagtggagcagcagagataattctaggaaggagtcagcaaagaaaaatgatgatcaagttcatactgttcgtaaagattggatgcagtacttctctacactaggtgtagattatctcactgttgtattgccaattattttggttttcacagtcttatcggaatgggtttttatgtgtgctatttctcttgtaatcctgatatccatttacatcatgtttaaaaggtctcagtttcatcttaaagatggattcagtcagctgcctttgctcagggcagacatatcttcttaccgtgtctcagtggttctggtgacatgtttgtgcatattagctgtggacttcaaaatatttccaagacgctatgctaaggctgaaacatatggtagtggcatcgagtttcaaggcagttctttgttcgataagtccactcttatctcttggctttgctcgcattatatccacatggggtgttgattatcaggtccatgtaggagaatatggtgtgcattggaacttctttttcaccctcgcagctgtctctatccttacatccgttgtcagaattcatccaaaacattgtggcttagttggtctgcttatccttgctggataccagatttggctgtcttctggattgaatgagtacctcatttctcacaaaagaagtgctgatataatcacccagaataaggagggcatttatagcatccttggatactggggtatgtttctaattggtgtttctttgggtttctatctgttcgttgacactagttcaaagggcaagaaccggaacactcaagtcatgcaaatctgggttcttgctgcttctttttggattttggcaatcatctttgatagctacattgagagagtttctcgtcgaatgaggacatatattggacttctctttaacaatatgaactttatctgacagtgcctacaaattaacctataatgaggccaaagaaaggcaaggtgttaggtgcatattattagatgcattcttatatgctttaaatattttgtaatctttcagtcagtatgtcgtacatgtttccacttgatataatgtgcacagaatggttcaaaattccactattgattgctttgcctgctaatgttactgttttatgatttgggagcaactttgccatattatcagacccatggatagtagcaagggggtttgcaaagccatgaaatttactacttacccaagtaaataaacctgctttcctatgagtaccaacaatgggtttgtctggtttttttctttagttgtttggtctattatttttgttcacgcttcaggttagcttcactgttcatgctgactgattgtccaatataggttttatctatcctcacattagctgggtttgcctcatataaaaagaacttggttcttgaagatgcattcaatgaaaatatgcttggctccttccttctggcaaatatccttactggtctggttaatctctcagttaacacgctctctgcctcttccttcactgccttcatgattctctgttggccggcggcatcgtcgacgacagaccgcgcggcggcgattccgacccatccatggggcggccgccgtgctgcgacaaggagagcgtgaagaaggggccgtggacgcccgaggaggacctggtcctcgtctcttacgtccaggagcacggccccggcaactggcgcgcagtccccgccaacacagggctgctgcggtgcagcaagagctgccgcctccggtggaccaactacctccgcccgggcatccgccgcggcggcttctccgaccaggaggacaggctcatcgtccacctccaggcgctcctcggcaaccgctgggccgccatcgcctcctacctccccgaccgcaccgacaacgacgtcaagaactactggaacacgcacctcaagaagaagctcctcgctcagcagcagcagcagctgcgcgcctcgccgtcgccgcccaaggggcagtgggagctcaagctgcagaccgacatcaacctcgccaggcgcgccctgcgcgacgccctctccatcgacgccggcccgccagggatggccgtcgcgggctcggcggcgccggcgccgtccgccggcccagcagcgccacaacaagcgtacgctctcaccgcgcgcagcgtcgacaggatgatgctggacgggtgggcggcggcggctccagcggcagggaggaggagctgcgtcgtcggtggcaccgtcgtcatcccggccccggcgacgacgcccggcgcggccgagagcgcgtcgaggtcgtcgtcggagctaacgacggcggagtgttctgcctccatctccagcgcctccgatcagcgcgccgcgccggtggccgaccaccagctgctcgcgtccgaggagaataattatacggcgtcggccgtgcagcagggagaggtgccgctgtcggcgatcgagtcgtggctgctggaggacgccggcgccggcgagcagaagctggcgcacgatggccccctgctcgatgccgcgctgcatagttttggcttctagtaaaatgtcaaaatgtgttactagaaatcgagtgtggttaattatgccagtcggtgccactactagctagtccttttctgccctactaatttagctcactagctgttctacttgtcatccgtagtacacagatgacgatttgtgtcactgcatgaagcaatgtgcaagtgggtgatcgtgatatatatactacgtcgaaagtgaaatgtaacacgatccgtctgctcgttttgtcactgcatgaagcaatgtgcaagtgggtgtgtctttattgtagtttttgagaaacgagtcgttctattttgcgtttgtcaaacatatcacatcagagtcactcattcttttggttg

SEQ ID NO: 80780 - DNA, 3511 bp, Zea Mays
atccatttatctagtgtaaccactattaggagtttcaaggcagttctttgttcgataagtccactcttatctcttggctttgctcgcattatatccacatggggtgttgattatcaggtccatgtaggagaatatggtgtgcattggaacttctttttcaccctcgcagctgtctctatccttacatccgttgtcagaattcatccaaaacattgtggcttagttggtctgcttatccttgctggataccagatttggctgtcttctggattgaatgagtacctcatttctcacaaaagaagtgctgatataatcacccagaataaggagggcatttatagcatccttgttcaaagggcaagaaccggaacactcaagtcatgcaaatctgggttcttgctgcttctttttggattttggcaatcatctttgatagctacattgagagagtttctcgtcgaatgaggacatatattggacttctctttaacaatatgaactttatctgacagtgcctacaaattaacctataatgaggccaaagaaaggcaaggtgttaggtgcatattattagatgcattcttatatgctttaaatattttgtaatctttcagtcagtatgtcgtacatgtttccacttgatataatgtgcacagaatggttcaaaattccactattgattgctttgcctgctaatgttactgttttatgatttgggagcaactttgccatattatcagacccatggatagtagcaagggggtttgcaaagccatgaaatttactacttacccaagtaaataaacctgctttcctatgagtaccaacaatgggtttgtctggtttttttctttagttgtttggtctattatttttgttcacgcttcaggttagcttcactgttcatgctgactgattgtccaatataggttttatctatcctcacattagctgggtttgcctcatataaaaagaacttggttcttgaagatgcattcaatgaaaatatgcttggctccttccttctggcaaatatccttactggtctggttaatctctcagttaacacgctctctgcctcttccttcactgccttcatgattctgtcagtatacgcctttactttatgcatggttactggccttacccatttttgtggtgttaggatgaaattctggtgaattgtaagctaccatttgatatgatgtattcattcattaacttgtcaacaaactggtagctagcttgcttgaaatataatactacgtctgttcttgaatatttgtcgcccggtagtttatttttcaactaaaacgtgacaaataaaaaagtctgaataatttttagggaaagaagccaaattgctatcctaattagttgatccagttattaactctgcctagactcgggagcttacttctttcatgtgtgttcaaggttctttgtgtctcatcagaaacttcctagtttccttcatttcatggtacaacgtgtctgctggtattaatcaataccgctatttacttttgacctaaagacgacacatccacccacggtatatgtgttgacgaattgaagatggtctgtcaagagtttgctgtttcagtatttaatgtcagtcagaatcaggcttgaagtaccataggttcatactgctacagttacccacttgtcacagataaaacagtgggtccaggaaagcagtgctgtagtcgaatgttacttgctggatttctgcagatgacagagagaatttgagcactatgacattcatgacagatagtacatactcggagaacagtggcgtgccggtgctggtagaggtttttggttgctcatttgatgagttttcatgacttggggtgcctctgaaatctgaatcctgcattcctgccaagcacggcatggtattatggagttcctttgtcctgtgagaactggattttcgaatttacatacatacatattgggctgccctcgcacgccactccgaggggtcggccatgttcatgtcatgaggccatattgcccgtgtgccaggctgaccggaaggacggacggctttgttggcgagggtcgctgctgcattaaaagtcgtacgaggactttgtgatgaatttcgtgacgcagatgacccactgacctagctgttggccggcggcatcgtcgacgacagaccgcgcggcggcgattccgacccatccatggggcggccgccgtgctgcgacaaggagagcgtgaagaaggggccgtggacgcccgaggaggacctggtcctcgtctcttacgtccaggagcacggccccggcaactggcgcgcagtccccgccaacacagggctgctgcggtgcagcaagagctgccgcctccggtggaccaactacctccgcccgggcatccgccgcggcggcttctccgaccaggaggacaggctcatcgtccacctccaggcgctcctcggcaaccgctgggccgccatcgcctcctacctccccgaccgcaccgacaacgacgtcaagaactactggaacacgcacctcaagaagaagctcctcgctcagcagcagcagcagctgcgcgcctcgccgtcgccgcccaaggggcagtgggagctcaagctgcagaccgacatcaacctcgccaggcgcgccctgcgcgacgccctctccatcgacgccggcccgccagggatggccgtcgcgggctcggcggcgccggcgccgtccgccggcccagcagcgccacaacaagcgtacgctctcaccgcgcgcagcgtcgacaggatgatgctggacgggtgggcggcggcggctccagcggcagggaggaggagctgcgtcgtcggtggcaccgtcgtcatcccggccccggcgacgacgcccggcgcggccgagagcgcgtcgaggtcgtcgtcggagctaacgacggcggagtgttctgcctccatctccagcgcctccgatcagcgcgccgcgccggtggccgaccaccagctgctcgcgtccgaggagaataattatacggcgtcggccgtgcagcagggagaggtgccgctgtcggcgatcgagtcgtggctgctggaggacgccggcgccggcgagcagaagctggcgcacgatggccccctgctcgatgccgcgctgcatagttttggcttctagtaaaatgtcaaaatgtgttactagaaatcgagtgtggttaattatgccagtcggtgccactactagctagtccttttctgccctactaatttagctcactagctgttctacttgtcatccgtagtacacagatgacgatttgtgtcactgcatgaagcaatgtgcaagtgggtgatcgtgatatatatactacgtcgaaagtgaaatgtaacacgatccgtctgctcgttttgtcactgcatgaagcaatgtgcaagtgggtgtgtctttattgtagtttttgagaaacgagtcgttctattttgcgtttgtcaaacatatcacatcagagtcactcattcttttggttg

SEQ ID NO: 80781 - DNA, 3075 bp, Zea Mays
agggtcgctgctgcattaaaagtcgtacgaggactttgtgatgaatttcgtgacgcagatgacccactgacctagggtagggggcgtaggggtactccactgtagctgggcatgcacgctcctcctgtcctggttggtacagtggtggtgcatttcccttccctaggtgcagggatgtgctctacttcactgcagcgtgttgcgtgaacatcaagtgtacagtgtagcactggactaggcttgtactagcttgcttgcttgcttctttattcattaatgtgttgaaccaatgtacgagagagagagagagagagagagagagagagagagagagagagagagagagagagagaggtgcctaccgtactagtggcatcaggcatgtgtacgcatacgagtactactccatgtctgctccgatccctccacaacagatctctatgggttaatgacttaattctttgccattctagcagttaaatcaccaacacccattaatactattagttgggtcacctacaatctccactaggtaatcaccaagctcccgatcgacaccaaaccgtcgaccatcaagagtaacaagcacgaacactcacttgatctaaacaagcctaataaggatgatggatgcacacttgttactctgtatgcactaattaggttcctaatctcacgatttcatcaaatcttagacaacctcaccagccaaaggctctatctatatctctaatgtgtttctttggcaaaaataaatgggcaagaacactaaaattaacaagttgaagggtatttatactccctaaccaccaaactagcagttagaagaactctggcatgaaaacacatgtgtccgacctattcatagggcccgacaacatgtagagcggaccctagctcctacaatcataatgtctggcccgacagcacacgtcgaatcagtccaatgcgtgaaaaacctctctatctgtttatggactgtgtcgagctgagacgttatagtccgacgaccctgatacacacagtcatctagcctttttaaacaccccatgtgtaggtgcccaaccaaactcaatggtccgacgacccttattttttagggttcagtgagacaatgactataaaaccccgccaaaaacactttctgcaaatgagatttgttccaaaagatttttagacctctaagctaactagtgctaaggccacacctaacacattagactcacttaggtcaagctattaatctataccccttatagtacatccaaacgaaacaaatgcctaaactaagtgtctctcaactctaatcgacacttaaaactagtttatccttagtcttgtcgtttattctttaaatccgaaacaaaatttagttttggaggcatgaaaatcattgattgactaaacaaccactattattttgacctaactcaaatgcctctataaaacacgtgttagtcataataatcttgtgttgtcattagtcactaaactccattattagcctgaatgctttaaatcttctttttggtgattgatgacaacagtgtctcaagtatgtaacgggtactagactatgctgcctctctgccgtacgtctactctgcgtgcagagtgagtgcagtgtgcacaggtatatatacacacacacacgcctctggaacctgaaccttgtcttgatttcttttcatacaccatccaccgggcgaagctgttggccggcggcatcgtcgacgacagaccgcgcggcggcgattccgacccatccatggggcggccgccgtgctgcgacaaggagagcgtgaagaaggggccgtggacgcccgaggaggacctggtcctcgtctcttacgtccaggagcacggccccggcaactggcgcgcagtccccgccaacacagggctgctgcggtgcagcaagagctgccgcctccggtggaccaactacctccgcccgggcatccgccgcggcggcttctccgaccaggaggacaggctcatcgtccacctccaggcgctcctcggcaaccgctgggccgccatcgcctcctacctccccgaccgcaccgacaacgacgtcaagaactactggaacacgcacctcaagaagaagctcctcgctcagcagcagcagcagctgcgcgcctcgccgtcgccgcccaaggggcagtgggagctcaagctgcagaccgacatcaacctcgccaggcgcgccctgcgcgacgccctctccatcgacgccggcccgccagggatggccgtcgcgggctcggcggcgccggcgccgtccgccggcccagcagcgccacaacaagcgtacgctctcaccgcgcgcagcgtcgacaggatgatgctggacgggtgggcggcggcggctccagcggcagggaggaggagctgcgtcgtcggtggcaccgtcgtcatcccggccccggcgacgacgcccggcgcggccgagagcgcgtcgaggtcgtcgtcggagctaacgacggcggagtgttctgcctccatctccagcgcctccgatcagcgcgccgcgccggtggccgaccaccagctgctcgcgtccgaggagaataattatacggcgtcggccgtgcagcagggagaggtgccgctgtcggcgatcgagtcgtggctgctggaggacgccggcgccggcgagcagaagctggcgcacgatggccccctgctcgatgccgcgctgcatagttttggcttctagtaaaatgtcaaaatgtgttactagaaatcgagtgtggttaattatgccagtcggtgccactactagctagtccttttctgccctactaatttagctcactagctgttctacttgtcatccgtagtacacagatgacgatttgtgtcactgcatgaagcaatgtgcaagtgggtgatcgtgatatatatactacgtcgaaagtgaaatgtaacacgatccgtctgctcgttttgtcactgcatgaagcaatgtgcaagtgggtgtgtctttattgtagtttttgagaaacgagtcgttctattttgcgtttgtcaaacatatcacatcagagtcactcattcttttggttg

SEQ ID NO: 80782 - DNA, 2109 bp, Zea Mays
ctccctcatcaaccaatttaggttttggcaatcccgtgttccttcatcgggccaggacctatttggctctctacctgtaaccattcttataggtggagtctcttttgtatattatcatcctggcttagtctatttgttaccgcgtgagattttttattggttacgtctggtaatggtgttatgactaaaactggcggtgccgcgacgaaaccgagggcctcctgtgggtgatcaacacatggttgcgctacttggcacgcgctggtatcacagttagtagtcataatccattatgagattatatcgatatgttatctttgagcaaattgttcttaccacgtgagattcattatcggtgccagttcggtaatggtgtcatgattaaggacttatggtgccgcagcgaaactgagagccccttgtgaatgtacacgcaaggttatgctgcttggcgcatgctggtatcgaggtatctagtcatgatccattatggaactacattaatatattatctttcgtggacttttcccttgaaatgatttttgtgttgtttgctaaaacaatcaaacaatatatgccatcactattggatcaaaagagtatataactctgatgtattctttaagtaaaattcttaccagttccgaagtcttcaaaaaaaacgaaacttatctgtatctatccatgtaaaaaaactcacccctttcatgtgtggtctattttctcttaattttggtggtgactacaatacaagttccctttacgtcctttgtgtaaaggtgaagcctcgaagctttttagtgttgagagataattaattggtcctcttcatggagaaagtaatctaccactaggagtttgttcattcgctcttttatttaatccatgtatttccgaaccaagttatttcatctcgcatgaaggaacgaatgaacaacatgaccaaatggattttcactcaaatgcatgatcaactgttaacaaatgtgaactctcaaccctggtttgccgatggataataagaagacttgctcaatgtcaaaagtagttcaacaagttggttttactaacttgtaactgcccaatgaacaaaggttgagtttagagatcgttttatcgagttgtccaaactcacttagttcagcctatcctaaagaaacccttatcaagatcaagtgaaggttatgaacatatgcgcagatcttgtgccatattggattagattatgagcgtatgtatcttaactttaccttgttggccgaggcactttgccatcctcagctgactgattacagcctgaccacagttctagtcgtgcctcaatcgcctcacatgtgattttctaacatgtgtgatcaagccgagccatgcttagtgcttgataaaatggattggacacgaggtcaacatctacagatcccttcattccttgaatctctattatttttcttggacttggattccctggctaaccacgagttaattgtgatgttattcgacatccatcctcgtcttatgtgctaggaattgctatccatttgtccaccgttctcaacagactcagatagtacagtgttatcagaaaaaaacaaattgcacacatgtagccttatgtgttcttctagctgatgtcgtctctattgatggacatccctaattagcttaaaatgatacatgctatacccacttgaggaaccaacatcttggagtactcatctctactcggaactgtcttatgctatcgctattatggacagggttacacgcctctctactcttagaagtctttcgttctgaatctcgggacgagattcttttaaggggggagggttgtaacaccccaggtgtttatcgtctgctcgaccacgagtgcggactttaacatgtgatagcggtgaataaaatggacactaaattttaatcatcttcgtcgatcacgatttcgatatcgtgtctgtctccatctgtttaaattgtcctaaattatttcgcaaaaattcagacttcagtaattttcggaacatcgaatccagtatcgtttgggttaagccatcaacgtcttgcccaaactttaattctggaaatcggatctagtttcttaaactgcat

SEQ ID NO: 80783 - DNA, 5738 bp, Zea Mays
aggcaaattgtggcaattgaggtaacgaaccaaacatgcccctagtgcatcgttacattacatccacctgcctgctatcctcctacagctaagcgaagaagctaacaccctgccctgtccatcatcgcccacgaatctcctgcagactcctcaattgtatcccttcatctccagcaacgcatgagaatacctctatgccctgtccatcgccggcatgcttgagcagcagacacagacagcttcaggtgaagtgcctgctgccgtccttcccagcctcaacactccgagggcgtcacgtcagctcctgttgtgaatcgggtccgagccccgccggaccttccacttgctcgtctgcgccgcgccaacggccgtcgccgtgacgagccgcttccctgtccaagagctgccgccgccgccgccgcctgccgcgggtgcctctgctggcgtcggcgcccgatcacggccgaggaccacgtcctctctcctcaggccgctcaccacggcagcagggtgtgccgccaggaggcagacaaaggccgatatggcgaacagccttgaccaccttcttgcgctcgccatgctgctgctgctgctgccgccgctcagctggagacatgcagcttgtgctgcctgctgctgtgctttggctctagcggcttggttgatgcagtacaatcatcagtcacagcactgtcctgtctgtagatatagcacaacaaccccaaggccacgccgggtcccaaagcacaacaaaggggcaagggacggcacgacatgtctaaggctgctcatagaaggttctgagaccctgacaggtacattttgcaaaagccattggaggactggatggccatgtagggcacaaccagagcaccagcaaagaaccaaccaagcccttgctttagacctctgtttgttgccatctgcgccatctgcctttacctattactactgtcttcagtaaaaaaaaacaaccaacaaacaaacaaacaaacaaaactgaagcattcatgcataggtagagagtagaggctgtggtagccagcagacaccagtacaacccaagtctttgcgcttttgtatgctttccattccatctcttgcgcttgcccttcttgcaagaagcacccttttcgctttgaatcttccaaggccaccaaagctacccattcaaacttaaaggacctgcaccgagtttcaatagcttctttctttcctcacgtttctccatgtaagatgatacgctaacacccaatgctttgcctgcaaatatactgatttattgagtgccgagcacttagatgcagaaaacaagtagatgaatagctataaattgatgcaagattatgataagatcccaatatattccctgcttgtgaagtgggcaagggagcccacaagatcgccctagctgcaaaaggaaaggaggaaaaaattaaaggtgggtggaggaatgaattttccatgatttggccggccttttctttggacagattcctaaagtgctaattcagttatcttattttgaaaggtaaaagatttccacattcatgtcttgctaaaggaccaataaactaacaatcaacaggctttcgtctaggtctctaggacggcaagttagttacacacaaaaaattgggatcctattatacaaaagagcaatcatatcatgctagttatggaacaaaattaggtctacagatcctaggtcataaaaggcaatggaaagcaacaaattcagatttacttctctgctaaggaataggtaatgcaacattggccagagttagtgagttattaccagataaaaagagccatgatcttaaagcagataacatgttgatccgatcacagtaatgatggtgccctgattaaagtaacatcacagctgattccaaatggcatggttatttttctcttggtcatagttacttgcaaagttatgttatatgctagtaaagacgtactagtacagaacaaaccaacttttaccaaagattgcattggagctaaggcatgtccttttacttctctttaatctgagctgttaagacataatgcttgcattcactaactacccataatttaatctgaaacagattttgtaaaattgatagtgcagcaacttagagcgtttcatctaatctacttagaaaaatgacaaaaaatttaatctgaaacggattgtgtaaaattgatagtgcaacaacttagagcatgtcatctaatctacttagaaaaatgactcgtacggcacttaattgctcacaactgcatatggagacacgtccgtggtccacatatgatcaatattttgcaggacattagagatgaggctaacccatggtgcatggtgggtccaaatgccttaaaagcatttgaccatgattctgttattaggtcattgattgaggttttttggcattttctcttgttctttggacctttgcgctaatgggcatgtatgagtattctgtctcttttcttcttaattaaaatgacacccagatctcctgcatgatcaagaaaaaagaatcgtccatatccatcttcgtaattgatacaagaaaatttgcaaattatggtgaaaagcatcagttgttactgtgaacaaagtagccctacattcttttttaacgtaaaaagaagcccaacattcaattctcagatttccaagatatgctttgtattcccatgaaaataggtattcttactcataagtagcttaatcgaagacaactgcatagttgcttgaagtcctacaaatggatcgataatttttgtctctattctctataccttattgaagtgcatttgtcctgatgctattttcagtctaaaagagtagtttagactgagaaccgtaccgccttaagtacgccactgaaaaattgtagctggtgggcaaacagaaagatgttcaacaaaaggtaaaggtgaaagagaaagtacaacatgttcaaatgaaccttcatacccttgcttcggtgaaaagcgagcggtctgttcggactagacttgtccacacctgcaaaaatgccaccagatcacctgataaaatcatatgattttcaattggggttaaaaccgtttttgtgatgtttctatgccttgacaaagagaatctgcaaacttcagtgactcttgtaacaaaatgttaccactaagtgatcgcaagaaaaaacagaatatttcaggcaggaaacaagcccagatcaagagattccttcttggcgtttgaaatggaagcagcgagcgcacggggattgtgaagcaaagcagtggtttgccctggagcatctccactgcacgtccctgtgtgatgccaatttcttgctccatttatgccagagaagaagcgacggccgaagaagccacaccacgctttcgccctgccctaaaagtcatggctactcggctaggcattccgtcgagcagatgggcagcgccctgtatcaacagaggcgcacgacgcaggggcggcaatttgcatcggcgaggctgcggcggtgcggcctgggaacaaccgaagcgaatggaactgggatcggagtgatggatagcaatatagcatcggtgtagattcctgtggcgaggaatttgcgtgggattttcggaaatgcagaagcctgactggacagggcctgctgcagagcaaacgccttttttgggcggaagaaccgcaccgcagcacaaaaaaaagccctctgcatccacccgtccacgtgtccgattccgatctgacggaccggatggaagcaccggaactgacggccccgccgggcgccggtcactgagagtggcaaagtagcaattttttcgactgcgagacgacaccgggaagagagaggagccgcccgccgccgcctcaggcctcagtccagacccctcgtctcactcgctccgccgctggcgattggtgaagagagctccgaggtgggctctactcgtcgcggttctcgcgaggtccgccgatccgcgccccgctctggatctctggctgatttgttgttctgcaagtttgcattggagagaggtgtccctgcatatattggtgtcctcggatcaataaagctgccatttccatctcgtgtttttgacatggcccattgctcgagatgtttaattccatggagtggaaatgatggtatgtacatgatggaagttgacagagtactaaggcctggtggattttgggtgctatcaggcccacccattggctggaagattcactataaagggtggcaacgttcaaaggaagatcttcggaatgagcaaagaaaaatagaacacttcgcacaacttctttgttggaagaaggtatctgagaaggatggtatcgccatatggacaaagaggttaaatgacaagtcttgctccatgaaacaagataatccaaatggtggtaaatgtgatttgacaagcgacagtgatgtgtggtacaagaagatggaagtttgtatgacccccctacccgaggttaatagtgtagatgaggttgccggtggtcaactagagccttttcccaagaggctttatgcagtacctcctcgtataaccgatggctctgtgcctggtttctcagttgagtcatatgaagaggacaataacctttggcggaaacatgttaaggcttacaagaaaatcaataacttgcttgatactggaagatatcgcaatataatggatatgaatgctggtctcggtagctttgctgctgcactagaatctccaaaagtatgggtcatgaatgtcattccaacaattgcaaatacttccactttaggtgtaatctacgagcgtggattaataggaatgtatcatgactggtgtgaaggattttctacttatccaaggacatatgacctcatacattctaatgatatcttcagcttgtaccaaaacaagtgccaatttgaagatatactcctggaaatggacagaatcttacgcccagagggtgcaatcataattcgtgacaaggttgatgttcttgtaaaagtggagaagatagccaatgccatgaggtggaagacaagattggctgatcatgagggtggccctcatgtacctgagaagatactcttcgcggtcaagcaatactggactgctgaaaaaacaagcagctaacgttgttcattttcatttttttctccagtcacagctaacttgccccctggctgtgtttattggaaaaatttctgtcgattatacagcccatgtttgttactgaaaatataaaacaacccccttgagggggagtaaattatgtgggatttagctgtgaacttgggatttgattattccactggtgccgagacgcagaagacatgccaaaaggatcaattggcattgtactagtgactcatatctgatcagacagatgcaactgcttatagttggaaccctgcagcagtccgtcaggaagttatgaactagcagtgaacttatagttttgtataggactcctttgcccctccactcactttttttttgttgtatctcagaatttcatcaactggattgtatctcaacccataaggtcttcctatcctattttattttaattgacaaacattttgggcccaaggatgcaacttgtgaccttggttactaatgagatgataatgttttcttttttgttgtggatgtaagttggttactaatgagatgatatgttttctttttatgtaagttggagcgaaaggggctgagttggttaggtgatctgaattttc

SEQ ID NO: 80784 - DNA, 6472 bp, Zea Mays
aggcaaattgtggcaattgaggtaacgaaccaaacatgcccctagtgcatcgttacattacatccacctgcctgctatcctcctacagctaagcgaagaagctaacaccctgccctgtccatcatcgcccacgaatctcctgcagactcctcaattgtatcccttcatctccagcaacgcatgagaatacctctatgccctgtccatcgccggcatgcttgagcagcagacacagacagcttcaggtgaagtgcctgctgccgtccttcccagcctcaacactccgagggcgtcacgtcagctcctgttgtgaatcgggtccgagccccgccggaccttccacttgctcgtctgcgccgcgccaacggccgtcgccgtgacgagccgcttccctgtccaagagctgccgccgccgccgccgcctgccgcgggtgcctctgctggcgtcggcgcccgatcacggccgaggaccacgtcctctctcctcaggccgctcaccacggcagcagggtgtgccgccaggaggcagacaaaggccgatatggcgaacagccttgaccaccttcttgcgctcgccatgctgctgctgctgctgccgccgctcagctggagacatgcagcttgtgctgcctgctgctgtgctttggctctagcggcttggttgatgcagtacaatcatcagtcacagcactgtcctgtctgtagatatagcacaacaaccccaaggccacgccgggtcccaaagcacaacaaaggggcaagggacggcacgacatgtctaaggctgctcatagaaggttctgagaccctgacaggtacattttgcaaaagccattggaggactggatggccatgtagggcacaaccagagcaccagcaaagaaccaaccaagcccttgctttagacctctgtttgttgccatctgcgccatctgcctttacctattactactgtcttcagtaaaaaaaaacaaccaacaaacaaacaaacaaacaaaactgaagcattcatgcataggtagagagtagaggctgtggtagccagcagacaccagtacaacccaagtctttgcgcttttgtatgctttccattccatctcttgcgcttgcccttcttgcaagaagcacccttttcgctttgaatcttccaaggccaccaaagctacccattcaaacttaaaggacctgcaccgagtttcaatagcttctttctttcctcacgtttctccatgtaagatgatacgctaacacccaatgctttgcctgcaaatatactgatttattgagtgccgagcacttagatgcagaaaacaagtagatgaatagctataaattgatgcaagattatgataagatcccaatatattccctgcttgtgaagtgggcaagggagcccacaagatcgccctagctgcaaaaggaaaggaggaaaaaattaaaggtgggtggaggaatgaattttccatgatttggccggccttttctttggacagattcctaaagtgctaattcagttatcttattttgaaaggtaaaagatttccacattcatgtcttgctaaaggaccaataaactaacaatcaacaggctttcgtctaggtctctaggacggcaagttagttacacacaaaaaattgggatcctattatacaaaagagcaatcatatcatgctagttatggaacaaaattaggtctacagatcctaggtcataaaaggcaatggaaagcaacaaattcagatttacttctctgctaaggaataggtaatgcaacattggccagagttagtgagttattaccagataaaaagagccatgatcttaaagcagataacatgttgatccgatcacagtaatgatggtgccctgattaaagtaacatcacagctgattccaaatggcatggttatttttctcttggtcatagttacttgcaaagttatgttatatgctagtaaagacgtactagtacagaacaaaccaacttttaccaaagattgcattggagctaaggcatgtccttttacttctctttaatctgagctgttaagacataatgcttgcattcactaactacccataatttaatctgaaacagattttgtaaaattgatagtgcagcaacttagagcgtttcatctaatctacttagaaaaatgacaaaaaatttaatctgaaacggattgtgtaaaattgatagtgcaacaacttagagcatgtcatctaatctacttagaaaaatgactcgtacggcacttaattgctcacaactgcatatggagacacgtccgtggtccacatatgatcaatattttgcaggacattagagatgaggctaacccatggtgcatggtgggtccaaatgccttaaaagcatttgaccatgattctgttattaggtcattgattgaggttttttggcattttctcttgttctttggacctttgcgctaatgggcatgtatgagtattctgtctcttttcttcttaattaaaatgacacccagatctcctgcatgatcaagaaaaaagaatcgtccatatccatcttcgtaattgatacaagaaaatttgcaaattatggtgaaaagcatcagttgttactgtgaacaaagtagccctacattcttttttaacgtaaaaagaagcccaacattcaattctcagatttccaagatatgctttgtattcccatgaaaataggtattcttactcataagtagcttaatcgaagacaactgcatagttgcttgaagtcctacaaatggatcgataatttttgtctctattctctataccttattgaagtgcatttgtcctgatgctattttcagtctaaaagagtagtttagactgagaaccgtaccgccttaagtacgccactgaaaaattgtagctggtgggcaaacagaaagatgttcaacaaaaggtaaaggtgaaagagaaagtacaacatgttcaaatgaaccttcatacccttgcttcggtgaaaagcgagcggtctgttcggactagacttgtccacacctgcaaaaatgccaccagatcacctgataaaatcatatgattttcaattggggttaaaaccgtttttgtgatgtttctatgccttgacaaagagaatctgcaaacttcagtgactcttgtaacaaaatgttaccactaagtgatcgcaagaaaaaacagaatatttcaggcaggaaacaagcccagatcaagagattccttcttggcgtttgaaatggaagcagcgagcgcacggggattgtgaagcaaagcagtggtttgccctggagcatctccactgcacgtccctgtgtgatgccaatttcttgctccatttatgccagagaagaagcgacggccgaagaagccacaccacgctttcgccctgccctaaaagtcatggctactcggctaggcattccgtcgagcagatgggcagcgccctgtatcaacagaggcgcacgacgcaggggcggcaatttgcatcggcgaggctgcggcggtgcggcctgggaacaaccgaagcgaatggaactgggatcggagtgatggatagcaatatagcatcggtgtagattcctgtggcgaggaatttgcgtgggattttcggaaatgcagaagcctgactggacagggcctgctgcagagcaaacgccttttttgggcggaagaaccgcaccgcagcacaaaaaaaagccctctgcatccacccgtccacgtgtccgattccgatctgacggaccggatggaagcaccggaactgacggccccgccgggcgccggtcactgagagtggcaaagtagcaattttttcgactgcgagacgacaccgggaagagagaggagccgcccgccgccgcctcaggcctcagtccagacccctcgtctcactcgctccgccgctggcgattggtgaagagagctccgaggtgggctctactcgtcgcggttctcgcgaggtccgccgatccgcgccccgctctggatctctggctgatttgttgttctgcaagggtgtggtatggcacgaaacttgactgagaacaggaccagaaatacactaattgtgattgtggtttttggcctctgttccttcttctatctcttgggtgcttggcagaaaagtggttctggaggaggagacagaatacagaattgggtcaatgagcagaccaaatgtgcacaacttccaaatctgagttttgagacccatcatagtgcatccaaccttccaaatgatactggtagttccaaaatcgaacctttcaaaccatgtgatgagcagtacactgattacactccttgtgaggagcaaaagcgtgcgatgaccttccctagagataacatgatctatcgggagaggcattgtccaccggataaggagaagctttattgcctgatcccagcaccaaagggttatgttgctccttttcgatggccaaagggccgtgattttgttccttatgccaatgtaccacacaagagccttactgttgagaaggctatccagaactgggtgcactatgagggcaatgttttcaggtttcctggtggtggaacacagtttcctcagggtgcagataaatatatagagcagcttgcttctgtcatcccgatagctgaagggaaagtgagaactgcactggatactggttgtggggttgcgagtttgggtgcttacctgttgaataaaaatgttttgaccatgtcatttgcaccacgggataatcatgaggcacaagtacagtttgcattggagagaggtgtccctgcatatattggtgtcctcggatcaataaagctgccatttccatctcgtgtttttgacatggcccattgctcgagatgtttaattccatggagtggaaatgatggtatgtacatgatggaagttgacagagtactaaggcctggtggattttgggtgctatcaggcccacccattggctggaagattcactataaagggtggcaacgttcaaaggaagatcttcggaatgagcaaagaaaaatagaacacttcgcacaacttctttgttggaagaaggtatctgagaaggatggtatcgccatatggacaaagaggttaaatgacaagtcttgctccatgaaacaagataatccaaatggtggtaaatgtgatttgacaagcgacagtgatgtgtggtacaagaagatggaagtttgtatgacccccctacccgaggttaatagtgtagatgaggttgccggtggtcaactagagccttttcccaagaggctttatgcagtacctcctcgtataaccgatggctctgtgcctggtttctcagttgagtcatatgaagaggacaataacctttggcggaaacatgttaaggcttacaagaaaatcaataacttgcttgatactggaagatatcgcaatataatggatatgaatgctggtctcggtagctttgctgctgcactagaatctccaaaagtatgggtcatgaatgtcattccaacaattgcaaatacttccactttaggtgtaatctacgagcgtggattaataggaatgtatcatgactggtgtgaaggattttctacttatccaaggacatatgacctcatacattctaatgatatcttcagcttgtaccaaaacaagtgccaatttgaagatatactcctggaaatggacagaatcttacgcccagagggtgcaatcataattcgtgacaaggttgatgttcttgtaaaagtggagaagatagccaatgccatgaggtggaagacaagattggctgatcatgagggtggccctcatgtacctgagaagatactcttcgcggtcaagcaatactggactgctgaaaaaacaagcagctaacgttgttcattttcatttttttctccagtcacagctaacttgccccctggctgtgtttattggaaaaatttctgtcgattatacagcccatgtttgttactgaaaatataaaacaacccccttgagggggagtaaattatgtgggatttagctgtgaacttgggatttgattattccactggtgccgagacgcagaagacatgccaaaaggatcaattggcattgtactagtgactcatatctgatcagacagatgcaactgcttatagttggaaccctgcagcagtccgtcaggaagttatgaactagcagtgaacttatagttttgtataggactcctttgcccctccactcactttttttttgttgtatctcagaatttcatcaactggattgtatctcaacccataaggtcttcctatcctattttattttaattgacaaacattttgggcccaaggatgcaacttgtgaccttggttactaatgagatgataatgttttcttttttgttgtggatgtaagttggttactaatgagatgatatgttttctttttatgtaagttggagcgaaaggggctgagttggttaggtgatctgaattttc

SEQ ID NO: 80785 - DNA, 6418 bp, Zea Mays
aggcaaattgtggcaattgaggtaacgaaccaaacatgcccctagtgcatcgttacattacatccacctgcctgctatcctcctacagctaagcgaagaagctaacaccctgccctgtccatcatcgcccacgaatctcctgcagactcctcaattgtatcccttcatctccagcaacgcatgagaatacctctatgccctgtccatcgccggcatgcttgagcagcagacacagacagcttcaggtgaagtgcctgctgccgtccttcccagcctcaacactccgagggcgtcacgtcagctcctgttgtgaatcgggtccgagccccgccggaccttccacttgctcgtctgcgccgcgccaacggccgtcgccgtgacgagccgcttccctgtccaagagctgccgccgccgccgccgcctgccgcgggtgcctctgctggcgtcggcgcccgatcacggccgaggaccacgtcctctctcctcaggccgctcaccacggcagcagggtgtgccgccaggaggcagacaaaggccgatatggcgaacagccttgaccaccttcttgcgctcgccatgctgctgctgctgctgccgccgctcagctggagacatgcagcttgtgctgcctgctgctgtgctttggctctagcggcttggttgatgcagtacaatcatcagtcacagcactgtcctgtctgtagatatagcacaacaaccccaaggccacgccgggtcccaaagcacaacaaaggggcaagggacggcacgacatgtctaaggctgctcatagaaggttctgagaccctgacaggtacattttgcaaaagccattggaggactggatggccatgtagggcacaaccagagcaccagcaaagaaccaaccaagcccttgctttagacctctgtttgttgccatctgcgccatctgcctttacctattactactgtcttcagtaaaaaaaaacaaccaacaaacaaacaaacaaacaaaactgaagcattcatgcataggtagagagtagaggctgtggtagccagcagacaccagtacaacccaagtctttgcgcttttgtatgctttccattccatctcttgcgcttgcccttcttgcaagaagcacccttttcgctttgaatcttccaaggccaccaaagctacccattcaaacttaaaggacctgcaccgagtttcaatagcttctttctttcctcacgtttctccatgtaagatgatacgctaacacccaatgctttgcctgcaaatatactgatttattgagtgccgagcacttagatgcagaaaacaagtagatgaatagctataaattgatgcaagattatgataagatcccaatatattccctgcttgtgaagtgggcaagggagcccacaagatcgccctagctgcaaaaggaaaggaggaaaaaattaaaggtgggtggaggaatgaattttccatgatttggccggccttttctttggacagattcctaaagtgctaattcagttatcttattttgaaaggtaaaagatttccacattcatgtcttgctaaaggaccaataaactaacaatcaacaggctttcgtctaggtctctaggacggcaagttagttacacacaaaaaattgggatcctattatacaaaagagcaatcatatcatgctagttatggaacaaaattaggtctacagatcctaggtcataaaaggcaatggaaagcaacaaattcagatttacttctctgctaaggaataggtaatgcaacattggccagagttagtgagttattaccagataaaaagagccatgatcttaaagcagataacatgttgatccgatcacagtaatgatggtgccctgattaaagtaacatcacagctgattccaaatggcatggttatttttctcttggtcatagttacttgcaaagttatgttatatgctagtaaagacgtactagtacagaacaaaccaacttttaccaaagattgcattggagctaaggcatgtccttttacttctctttaatctgagctgttaagacataatgcttgcattcactaactacccataatttaatctgaaacagattttgtaaaattgatagtgcagcaacttagagcgtttcatctaatctacttagaaaaatgacaaaaaatttaatctgaaacggattgtgtaaaattgatagtgcaacaacttagagcatgtcatctaatctacttagaaaaatgactcgtacggcacttaattgctcacaactgcatatggagacacgtccgtggtccacatatgatcaatattttgcaggacattagagatgaggctaacccatggtgcatggtgggtccaaatgccttaaaagcatttgaccatgattctgttattaggtcattgattgaggttttttggcattttctcttgttctttggacctttgcgctaatgggcatgtatgagtattctgtctcttttcttcttaattaaaatgacacccagatctcctgcatgatcaagaaaaaagaatcgtccatatccatcttcgtaattgatacaagaaaatttgcaaattatggtgaaaagcatcagttgttactgtgaacaaagtagccctacattcttttttaacgtaaaaagaagcccaacattcaattctcagatttccaagatatgctttgtattcccatgaaaataggtattcttactcataagtagcttaatcgaagacaactgcatagttgcttgaagtcctacaaatggatcgataatttttgtctctattctctataccttattgaagtgcatttgtcctgatgctattttcagtctaaaagagtagtttagactgagaaccgtaccgccttaagtacgccactgaaaaattgtagctggtgggcaaacagaaagatgttcaacaaaaggtaaaggtgaaagagaaagtacaacatgttcaaatgaaccttcatacccttgcttcggtgaaaagcgagcggtctgttcggactagacttgtccacacctgcaaaaatgccaccagatcacctgataaaatcatatgattttcaattggggttaaaaccgtttttgtgatgtttctatgccttgacaaagagaatctgcaaacttcagtgactcttgtaacaaaatgttaccactaagtgatcgcaagaaaaaacagaatatttcaggcaggaaacaagcccagatcaagagattccttcttggcgtttgaaatggaagcagcgagcgcacggggattgtgaagcaaagcagtggtttgccctggagcatctccactgcacgtccctgtgtgatgccaatttcttgctccatttatgccagagaagaagcgacggccgaagaagccacaccacgctttcgccctgccctaaaagtcatggctactcggctaggcattccgtcgagcagatgggcagcgccctgtatcaacagaggcgcacgacgcaggggcggcaatttgcatcggcgaggctgcggcggtgcggcctgggaacaaccgaagcgaatggaactgggatcggagtgatggatagcaatatagcatcggtgtagattcctgtggcgaggaatttgcgtgggattttcggaaatgcagaagcctgactggacagggcctgctgcagagcaaacgccttttttgggcggaagaaccgcaccgcagcacaaaaaaaagccctctgcatccacccgtccacgtgtccgattccgatctgacggaccggatggaagcaccggaactgacggccccgccgggcgccggtcactgagagtggcaaagtagcaattttttcgactgcgagacgacaccgggaagagagaggagccgcccgccgccgcctcaggcctcagtccagacccctcgtctcactcgctccgccgctggcgattggtgaagagagctccgaggtgggctctactcgtcgcggttctcgcgagggtgtggtatggcacgaaacttgactgagaacaggaccagaaatacactaattgtgattgtggtttttggcctctgttccttcttctatctcttgggtgcttggcagaaaagtggttctggaggaggagacagaatacagaattgggtcaatgagcagaccaaatgtgcacaacttccaaatctgagttttgagacccatcatagtgcatccaaccttccaaatgatactggtagttccaaaatcgaacctttcaaaccatgtgatgagcagtacactgattacactccttgtgaggagcaaaagcgtgcgatgaccttccctagagataacatgatctatcgggagaggcattgtccaccggataaggagaagctttattgcctgatcccagcaccaaagggttatgttgctccttttcgatggccaaagggccgtgattttgttccttatgccaatgtaccacacaagagccttactgttgagaaggctatccagaactgggtgcactatgagggcaatgttttcaggtttcctggtggtggaacacagtttcctcagggtgcagataaatatatagagcagcttgcttctgtcatcccgatagctgaagggaaagtgagaactgcactggatactggttgtggggttgcgagtttgggtgcttacctgttgaataaaaatgttttgaccatgtcatttgcaccacgggataatcatgaggcacaagtacagtttgcattggagagaggtgtccctgcatatattggtgtcctcggatcaataaagctgccatttccatctcgtgtttttgacatggcccattgctcgagatgtttaattccatggagtggaaatgatggtatgtacatgatggaagttgacagagtactaaggcctggtggattttgggtgctatcaggcccacccattggctggaagattcactataaagggtggcaacgttcaaaggaagatcttcggaatgagcaaagaaaaatagaacacttcgcacaacttctttgttggaagaaggtatctgagaaggatggtatcgccatatggacaaagaggttaaatgacaagtcttgctccatgaaacaagataatccaaatggtggtaaatgtgatttgacaagcgacagtgatgtgtggtacaagaagatggaagtttgtatgacccccctacccgaggttaatagtgtagatgaggttgccggtggtcaactagagccttttcccaagaggctttatgcagtacctcctcgtataaccgatggctctgtgcctggtttctcagttgagtcatatgaagaggacaataacctttggcggaaacatgttaaggcttacaagaaaatcaataacttgcttgatactggaagatatcgcaatataatggatatgaatgctggtctcggtagctttgctgctgcactagaatctccaaaagtatgggtcatgaatgtcattccaacaattgcaaatacttccactttaggtgtaatctacgagcgtggattaataggaatgtatcatgactggtgtgaaggattttctacttatccaaggacatatgacctcatacattctaatgatatcttcagcttgtaccaaaacaagtgccaatttgaagatatactcctggaaatggacagaatcttacgcccagagggtgcaatcataattcgtgacaaggttgatgttcttgtaaaagtggagaagatagccaatgccatgaggtggaagacaagattggctgatcatgagggtggccctcatgtacctgagaagatactcttcgcggtcaagcaatactggactgctgaaaaaacaagcagctaacgttgttcattttcatttttttctccagtcacagctaacttgccccctggctgtgtttattggaaaaatttctgtcgattatacagcccatgtttgttactgaaaatataaaacaacccccttgagggggagtaaattatgtgggatttagctgtgaacttgggatttgattattccactggtgccgagacgcagaagacatgccaaaaggatcaattggcattgtactagtgactcatatctgatcagacagatgcaactgcttatagttggaaccctgcagcagtccgtcaggaagttatgaactagcagtgaacttatagttttgtataggactcctttgcccctccactcactttttttttgttgtatctcagaatttcatcaactggattgtatctcaacccataaggtcttcctatcctattttattttaattgacaaacattttgggcccaaggatgcaacttgtgaccttggttactaatgagatgataatgttttcttttttgttgtggatgtaagttggttactaatgagatgatatgttttctttttatgtaagttggagcgaaaggggctgagttggttaggtgatctgaattttc

SEQ ID NO: 80786 - DNA, 925 bp, Zea Mays
tgaaaatatcgcactgtatttttaatctagagtttggtggtctgagtgcttaactgtagctgatggtaagactttcaagaagccaaggcggccttatgagaaggagcgccttgatgctgagttgaaattagtgggtgaatatggcctgaggtgcaagcgtgagctgtggcgtgtgcagtatgccctcagccgcatccgaaatgctgcaagggagctgctcacccttgatgagaagaacccccgtcgtatctttgagggcgaggcactcctgcgccgcatgaaccgctatggtcttctcggtgagggccagaacaagcttgactatgtgcttgcactcaccgttgagaactttctgcagcgccgccttcagaccattgtcttcaagaatggcatggcgaagtccattcatcatgctcgtgtgctcatcaggcaacgccacattagagttgggaggcaacttgtcaacattccctcattcatggtgagagttgactcagagaagcacatcgacttctctcttaccagcccacttggtggtggagaacctggaagggtgaagagaaagaaccaaaagaaggcttctggtggaggcggtgacgacgaagaggaagagtgatcatgtgatgctagctccttcgttttgttagggacctaattttgttacatgaaaacaaaaagttggctgccgaggtttctgaaaaattgcaatttaaaattttgagaactgtaattgctaagactcttcattgccgaagttgtttatccgatgaacacatgttaattcagtgagcttgcactgctgcttacatgagatcactttctgtcaggaagatattagtgtgtactccgatatatagatctgggatatgttgtttcgaagtattttatttatatatagctacgcactcgacatgttgtattctta

SEQ ID NO: 80787 - DNA, 1383 bp, Zea Mays
gcactcctggcttctctcccagccgccgcgcgctccctggctcctcattcttctccacgcacatcctcactccttcctcaacctcctcttcagccactgccgacccatggcgagctcctcacgtcgcgccctccccctactgcggcatgtcggcgccctcgattcctcagcctggcgcgctgccccttttccctgtttctgcgcacgaggtgctctagcttgccggtcatcttctgctcctcccccatggtcgtccctccctcatccctccccatggccgacggcctctccttccatggcttccaagatctgctcagcatccatcccagcgtgcacccctgcttctgtttcctggtggccgacgccactccctggagctcgcccctgccctctgtccagcgccctccctgctccttcccatggtgtggacaccagccccctctcttgttgccatggatagcccctcccatctccttccctctctaaccctagcccctctctactggctgcctttcccatgccaacactttccccatggccgagtttcccctatgcttgatgcatggcgccttggtacaacagcagcagtcagacctttgcaaccccgataaggagaagaaggttttagcggggtacctgtcacgtgttcgatgatatgctcgaactggtggccatcgtcgttcttgctaaaaatcaagtcagatcatgaggtccaaatcccagtttctcccagggagtacttcaagggtccttattacatctgcagattcaagaatcagggttgttgatggccttaatctagttcacaagtacaaagaaagatttttgtcggaggcgttgcttgggagacaactgaaggtaaaatttatgtgttatttactggactgcttgcgcctggagtttgatttttctatttcggttctttagatgttttgaatggtaaaataaaggagctcctggagttttctttgcctagaactagatgggttctctagatgttttgaatgctgaaataaaaatgtggaaacatcaaacatgaactatcggcgagcaggttgtcatatagggttgatatggcgtctgttattgtggaaagtagtgtttctgttagcatgcttccattaagtgtccgacatgccattttccttgtttgtctctgttcttttgctacattggcttagtgttattcgtgtgttttcttccatattttgttgcctgtggcattattcgttatttggttggttgaagatatagagcatgcactcatcatatctaagtgatcggagtgatatttattggcttattagatgcaaataaatgtatttttatttgcaaatgcagcaacaatatactaatttgatgtacttttttctagggtgttct

SEQ ID NO: 80788 - DNA, 1389 bp, Zea Mays
gcactcctggcttctctcccagccgccgcgcgctccctggctcctcattcttctccacgcacatcctcactccttcctcaacctcctcttcagccactgccgacccatggcgagctcctcacgtcgcgccctccccctactgcggcatgtcggcgccctcgattcctcagcctggcgcgctgccccttttccctgtttctgcgcacgaggtgctctagcttgccggtcatcttctgctcctcccccatggtcgtccctccctcatccctccccatggccgacggcctctccttccatggcttccaagatctgctcagcatccatcccagcgtgcacccctgcttctgtttcctggtggccgacgccactccctggagctcgcccctgccctctgtccagcgccctccctgctccttcccatggtgtggacaccagccccctctcttgttgccatggatagcccctcccatctccttccctctctaaccctagcccctctctactggctgcctttcccatgccaacactttccccatggccgagtttcccctatgcttgatgcatggcgccttggtacaacagcagcagtcagacctttgcaaccccgatttagataaggagaagaaggttttagcggggtacctgtcacgtgttcgatgatatgctcgaactggtggccatcgtcgttcttgctaaaaatcaagtcagatcatgaggtccaaatcccagtttctcccagggagtacttcaagggtccttattacatctgcagattcaagaatcagggttgttgatggccttaatctagttcacaagtacaaagaaagatttttgtcggaggcgttgcttgggagacaactgaaggtaaaatttatgtgttatttactggactgcttgcgcctggagtttgatttttctatttcggttctttagatgttttgaatggtaaaataaaggagctcctggagttttctttgcctagaactagatgggttctctagatgttttgaatgctgaaataaaaatgtggaaacatcaaacatgaactatcggcgagcaggttgtcatatagggttgatatggcgtctgttattgtggaaagtagtgtttctgttagcatgcttccattaagtgtccgacatgccattttccttgtttgtctctgttcttttgctacattggcttagtgttattcgtgtgttttcttccatattttgttgcctgtggcattattcgttatttggttggttgaagatatagagcatgcactcatcatatctaagtgatcggagtgatatttattggcttattagatgcaaataaatgtatttttatttgcaaatgcagcaacaatatactaatttgatgtacttttttctagggtgttct

SEQ ID NO: 80789 - DNA, 732 bp, Zea Mays
ctcgcccctgccctctgtccagcgccctccctgctccttcccatggtgtggacaccagccccctctcttgttgccatggatagcccctcccatctccttccctctctaaccctagcccctctctactggctgcctttcccatgccaacactttccccatggccgagtttcccctatgcttgatgcatggcgccttggtacaacagcagcagtcagacctttgcaaccccgatttagataaggagaagaaggttttagcggggtacctgtcacgtgttcgatgatatgctcgaactggtggccatcgtcgttcttgctaaaaatcaagtcagatcatgaggtccaaatcccagtttctcccagggagtacttcaagggtccttattacatctgcagattcaagaatcagggttgttgatggccttaatctagttcacaagtacaaaggtatcaaattttgagcccgggaacttttttaagatcagtaggcatatcacatcatttatttttgcaagacatagttttgtaccagtaccacattgtttttctctgcttctggtaagtgatttagtaaaatgactggttctttacagcctccgatttgcagcctcaaagtggcaatatcctaagcaccagttcaaatcacagcgcattctaattagcaaacataaaaaaacagagaacacatgagaactcaagaactaaataaaaaaagttcaaatatttactgagg

SEQ ID NO: 80790 - DNA, 1073 bp, Zea Mays
ctcgcccctgccctctgtccagcgccctccctgctccttcccatggtgtggacaccagccccctctcttgttgccatggatagcccctcccatctccttccctctctaaccctagcccctctctactggctgcctttcccatgccaacactttccccatggccgagtttcccctatgcttgatgcatggcgccttggtacaacagcagcagtcagacctttgcaaccccggtgagaccagctgcttgcgctatgtttattcctcaccagtgcctatgtttgagtattaattgtgtatgtttgtgtgtgttggtggtggagctaaatcccggaagatttagataaggagaagaaggttttagcggggtacctgtcacgtgttcgatgatatgctcgaactggtggccatcgtcgttcttgctaaaaatcaagtcagatcatgaggtccaaatcccagattcaagaatcagggttgttgatggccttaatctagttcacaagtacaaagaaagatttttgtcggaggcgttgcttgggagacaactgaaggtaaaatttatgtgttatttactggactgcttgcgcctggagtttgatttttctatttcggttctttagatgttttgaatggtaaaataaaggagctcctggagttttctttgcctagaactagatgggttctctagatgttttgaatgctgaaataaaaatgtggaaacatcaaacatgaactatcggcgagcaggttgtcatatagggttgatatggcgtctgttattgtggaaagtagtgtttctgttagcatgcttccattaagtgtccgacatgccattttccttgtttgtctctgttcttttgctacattggcttagtgttattcgtgtgttttcttccatattttgttgcctgtggcattattcgttatttggttggttgaagatatagagcatgcactcatcatatctaagtgatcggagtgatatttattggcttattagatgcaaataaatgtatttttatttgcaaatgcagcaacaatatactaatttgatgtacttttttctagggtgttct

SEQ ID NO: 80791 - DNA, 3363 bp, Zea Mays
ctgccacaaaaaatgaaaccatttcgatacaagtatttcatcagaattgtttaggttggatattttgtagaaattgaatgattcagaacacagtgttggttctttgtaataatctcaatgtaagcaagtatactatatttcaaccaatcaaacagcagagggcaccttggtttgctcaagaaaagtataggcaggttccttcccaatctacaatctacagaagtcaaatggaccaaaaaaagaaatagttgagattgcccctattggtgttggggaatcctttttgcatggccactggaagatgatttttttttttgcagagttaaactagacatgattctatgagtttttctttattcgtagttgtaagcaatgaactcataagggaccagaatactaacagggggaaatattccttgctgcctttgtagccttgctctatttacatcttttttcctcgttcacttctctttgacaatatgtggtctgagaaggtattttgcatatgtgcgctgctagaaagtgggattcccttctaaagttgattcttcctgtcccatcacttcgtttttcaactctaagtccaaaagagtgagtccactccttgcatgaccaccaaccggaaagaaagaaacaaagaaagattgaaatgcaccaatacaatggttatatgatgcccacacggatttaagccaagagatggcctattcaaagacagcatagcagatgttatgaattttgacataaccagaaagaaaaatgtcaccaggagactatatccctttcctaaaacattttatttttcaggtttccttttcctgaagagggactattgtcaacagtcaatggcagttttctgaaaatagttgttctatgctcatagctcaagtttggaatcttccttttctgcaggaaagttccagatgaaagggcaggttgcttgacagccacaccacaagaacaaaatggaatgtgtgcacatcattggaaggttaatcaattaattctttcaaagatatatacaagaaggaagcaacatttaagttcattgaagtggaaatgacaagatgtcaactgtcgttgcttcaatacagtgaatggcactgaccagatgctatcaataagccacctctgagtagtgggtatcaagatgttgacttagcaatttgttgcaacatcattgtgattagctttacttaaaccaattgaaaacaggagtgaaaaagaattcatgaatcctaattaaattccacagctttttatcaacaaaatagagcctgaatttaatagaataacaagccaaaccacacagaaactaggaaacaacaaaagtctcttagcctcatccagctctcaggccttgcgggattatcaaatggtttttttatttaaatgtgcttttacagtttacagcactcctgttaaaaggcagtcagaagaagaaacggatgcaagtgcaacccctttgtttggactacaggccacagaacagaaggaaagcacatcaaagtaaagatgcctgggaatcttggcagaaaacaattgagtaaacaagaagcttatgaggatgtagcaaaataaagtgaaaagatcaagatgcacacagtacacttaatcaatggtgccatggatgaggcatcctcaatctgatttgcttaccttttccttttctttcccatagagtgatataattgaaccagagatggctattgcatctttctaggaattctgctgactttgttaggtcgcagtccccaaaaggaactaaaaattttaaatgaatggcattgccattacaaattagatgccaattgaaatggaatattaagagctttaagtccaacttgcatggaaaaagtcaaagaatcatgttatggtttccttggaggactcttcaactttactgaaaacagaatgtcccctctataaataaagattcaccaatggcaacctagcccaagacaccaaacacccatgcacacgcaacctatcaagatgaaaagaggcctcctggtactttggtccttgttctacttcagtgttgcaaacgctgacactagaaaccaggccaagcagcctcttgagttcaatcaattgagagtatcaaggaaatatgttcaaggaaaacaagattcaactcccaagaacggaaccagtccatcagtgcatagaggctcaacaagcaatcaacgggagcaggataagatcgtatgtatgcctgggcaaacaggggtagcagagtttgaccaatatgcaggatatgtgactgtggatgccaaggctggaagggctttgttctactattttgttgaggctcctcaagatccttcaaacaaacctcttgtcctatggctgaatggagggcctggctgttcatcctttggatctggggccatggttgaacttggacctttctctgttcatagtgacaacaagacactgtacaagaaaaggcatgcatggaacagaatggccaacatgttgttcattgagatcccagctggtgttggatactcatattcaaacactacatcagattactataacactggtcactatataccagaacttgcaaatctgattctctctaagaatagagccaccaatgtaactagtatcaagcttaaaggtgttgcgattggaaatgcagacttggatgataatttgactctaagagcatcatatgactactattggatgcatgctatgatttcgggaaaagcttataaagccgtcaaggataagtgcggctttaatgggacatacactgaagactgccaaaatgccatggacttagccacccaagaaaaaggaaatattgatgactatgacatctatgcaccaatatgccaagatgcctcaaacccttctaaatcaagtgactcgttagtgtttggtgatccatgcacaaaccactacgtctcctcttacctaaatcgtcctgaggtccaaagggcactccatgcaaacacaacagggttaggctacccatggatggactgtaggtatgtatattgaatatctgaatatcatatttccctcaaatttatgtgcaacgtcagaccatatctcttgtgtgaccctattagcaatctgttggtttcctaaagccatatgaaaaggtaggtgctttatgtacaaacaattacttatataatctgaaggaacagaatacttatatatcttttcatcactcacttctcaataacattaattctaaaaaggtagcaacaacctcttccagttaaccatcaaagagtatgtgaaccacgattgccaagaattattccattagcacaacatgctgtatgcaaaaaggtatatttaagtcaacactaaaaaaggcgcaatgccactcaagct

SEQ ID NO: 80792 - DNA, 3730 bp, Zea Mays
ctgccacaaaaaatgaaaccatttcgatacaagtatttcatcagaattgtttaggttggatattttgtagaaattgaatgattcagaacacagtgttggttctttgtaataatctcaatgtaagcaagtatactatatttcaaccaatcaaacagcagagggcaccttggtttgctcaagaaaagtataggcaggttccttcccaatctacaatctacagaagtcaaatggaccaaaaaaagaaatagttgagattgcccctattggtgttggggaatcctttttgcatggccactggaagatgatttttttttttgcagagttaaactagacatgattctatgagtttttctttattcgtagttgtaagcaatgaactcataagggaccagaatactaacagggggaaatattccttgctgcctttgtagccttgctctatttacatcttttttcctcgttcacttctctttgacaatatgtggtctgagaaggtattttgcatatgtgcgctgctagaaagtgggattcccttctaaagttgattcttcctgtcccatcacttcgtttttcaactctaagtccaaaagagtgagtccactccttgcatgaccaccaaccggaaagaaagaaacaaagaaagattgaaatgcaccaatacaatggttatatgatgcccacacggatttaagccaagagatggcctattcaaagacagcatagcagatgttatgaattttgacataaccagaaagaaaaatgtcaccaggagactatatccctttcctaaaacattttatttttcaggtttccttttcctgaagagggactattgtcaacagtcaatggcagttttctgaaaatagttgttctatgctcatagctcaagtttggaatcttccttttctgcaggaaagttccagatgaaagggcaggttgcttgacagccacaccacaagaacaaaatggaatgtgtgcacatcattggaaggttaatcaattaattctttcaaagatatatacaagaaggaagcaacatttaagttcattgaagtggaaatgacaagatgtcaactgtcgttgcttcaatacagtgaatggcactgaccagatgctatcaataagccacctctgagtagtgggtatcaagatgttgacttagcaatttgttgcaacatcattgtgattagctttacttaaaccaattgaaaacaggagtgaaaaagaattcatgaatcctaattaaattccacagctttttatcaacaaaatagagcctgaatttaatagaataacaagccaaaccacacagaaactaggaaacaacaaaagtctcttagcctcatccagctctcaggccttgcgggattatcaaatggtttttttatttaaatgtgcttttacagtttacagcactcctgttaaaaggcagtcagaagaagaaacggatgcaagtgcaacccctttgtttggactacaggccacagaacagaaggaaagcacatcaaagtaaagatgcctgggaatcttggcagaaaacaattgagtaaacaagaagcttatgaggatgtagcaaaataaagtgaaaagatcaagatgcacacagtacacttaatcaatggtgccatggatgaggcatcctcaatctgatttgcttaccttttccttttctttcccatagagtgatataattgaaccagagatggctattgcatctttctaggaattctgctgactttgttaggtcgcagtccccaaaaggaactaaaaattttaaatgaatggcattgccattacaaattagatgccaattgaaatggaatattaagagctttaagtccaacttgcatggaaaaagtcaaagaatcatgttatggtttccttggaggactcttcaactttactgaaaacagaatgtcccctctataaataaagattcaccaatggcaacctagcccaagacaccaaacacccatgcacacgcaacctatcaagatgaaaagaggcctcctggtactttggtccttgttctacttcagtgttgcaaacgctgacactagaaaccaggccaagcagcctcttgagttcaatcaattgagagtatcaaggaaatatgttcaaggaaaacaagattcaactcccaagaacggaaccagtccatcagtgcatagaggctcaacaagcaatcaacgggagcaggataagatcgtatgtatgcctgggcaaacaggggtagcagagtttgaccaatatgcaggatatgtgactgtggatgccaaggctggaagggctttgttctactattttgttgaggctcctcaagatccttcaaacaaacctcttgtcctatggctgaatggagggcctggctgttcatcctttggatctggggccatggttgaacttggacctttctctgttcatagtgacaacaagacactgtacaagaaaaggcatgcatggaacagaagtaaaatccgctttaatctttactggattaatagttacttcctccgctgcaaataatagtttgttcgaactttgatcatgtttttagaaaaaatataataacatctacaagttcaaataaatgcactaccaaaacattttcatagagaatttaatggaactaatttaatactataaatgtcaatacattttttctataaatttggtaaaaaaataaagcttaggacaactaaagtaaactatattttcaaagaatggagtcaactgatattccattttccattcatgaatgcagtggccaacatgttgttcattgagatcccagctggtgttggatactcatattcaaacactacatcagattactataacactggtgaccaaagaacaacagatgatgcatatacctttcttattacttggctagagaaatttcctgaatatcaggaccgtgatttcttcataactggtgagagctatgcaggtcactatataccagaacttgcaaatctgattctctctaagaatagagccaccaatgtaactagtatcaagcttaaaggtgttgcgattggaaatgcagacttggatgataatttgactctaagagcatcatatgactactattggatgcatgctatgatttcgggaaaagcttataaagccgtcaaggataagtgcggctttaatgggacatacactgaagactgccaaaatgccatggacttagccacccaagaaaaaggaaatattgatgactatgacatctatgcaccaatatgccaagatgcctcaaacccttctaaatcaagtgactcgttagtgtttggtgatccatgcacaaaccactacgtctcctcttacctaaatcgtcctgaggtccaaagggcactccatgcaaacacaacagggttaggctacccatggatggactgtagtcagcagatatttgataattggaaagattcaccagagacaatgctgccatcaatcaagaaactcatttcaagtggcacgagaatatggctgtacagtggtgatatggatgcagtgtgctcattcatttcaacacaatatgtgctggacaatcttgggcttcctatagaagcagcttggcgtccatggcgcgtcgacaatgaggtacatagcccactgttcatcagatgaaagatggaatatcagcattcatgccaccagaatcctttggatcaagttgtatatgtgttccctaaaaagagcaaaaacagaaggatggttcatc

SEQ ID NO: 80793 - DNA, 4700 bp, Zea Mays
ctgccacaaaaaatgaaaccatttcgatacaagtatttcatcagaattgtttaggttggatattttgtagaaattgaatgattcagaacacagtgttggttctttgtaataatctcaatgtaagcaagtatactatatttcaaccaatcaaacagcagagggcaccttggtttgctcaagaaaagtataggcaggttccttcccaatctacaatctacagaagtcaaatggaccaaaaaaagaaatagttgagattgcccctattggtgttggggaatcctttttgcatggccactggaagatgatttttttttttgcagagttaaactagacatgattctatgagtttttctttattcgtagttgtaagcaatgaactcataagggaccagaatactaacagggggaaatattccttgctgcctttgtagccttgctctatttacatcttttttcctcgttcacttctctttgacaatatgtggtctgagaaggtattttgcatatgtgcgctgctagaaagtgggattcccttctaaagttgattcttcctgtcccatcacttcgtttttcaactctaagtccaaaagagtgagtccactccttgcatgaccaccaaccggaaagaaagaaacaaagaaagattgaaatgcaccaatacaatggttatatgatgcccacacggatttaagccaagagatggcctattcaaagacagcatagcagatgttatgaattttgacataaccagaaagaaaaatgtcaccaggagactatatccctttcctaaaacattttatttttcaggtttccttttcctgaagagggactattgtcaacagtcaatggcagttttctgaaaatagttgttctatgctcatagctcaagtttggaatcttccttttctgcaggaaagttccagatgaaagggcaggttgcttgacagccacaccacaagaacaaaatggaatgtgtgcacatcattggaaggttaatcaattaattctttcaaagatatatacaagaaggaagcaacatttaagttcattgaagtggaaatgacaagatgtcaactgtcgttgcttcaatacagtgaatggcactgaccagatgctatcaataagccacctctgagtagtgggtatcaagatgttgacttagcaatttgttgcaacatcattgtgattagctttacttaaaccaattgaaaacaggagtgaaaaagaattcatgaatcctaattaaattccacagctttttatcaacaaaatagagcctgaatttaatagaataacaagccaaaccacacagaaactaggaaacaacaaaagtctcttagcctcatccagctctcaggccttgcgggattatcaaatggtttttttatttaaatgtgcttttacagtttacagcactcctgttaaaaggcagtcagaagaagaaacggatgcaagtgcaacccctttgtttggactacaggccacagaacagaaggaaagcacatcaaagtaaagatgcctgggaatcttggcagaaaacaattgagtaaacaagaagcttatgaggatgtagcaaaataaagtgaaaagatcaagatgcacacagtacacttaatcaatggtgccatggatgaggcatcctcaatctgatttgcttaccttttccttttctttcccatagagtgatataattgaaccagagatggctattgcatctttctaggaattctgctgactttgttaggtcgcagtccccaaaaggaactaaaaattttaaatgaatggcattgccattacaaattagatgccaattgaaatggaatattaagagctttaagtccaacttgcatggaaaaagtcaaagaatcatgttatggtttccttggaggactcttcaactttactgaaaacagaatgtcccctctataaataaagattcaccaatggcaacctagcccaagacaccaaacacccatgcacacgcaacctatcaagatgaaaagaggcctcctggtactttggtccttgttctacttcagtgttgcaaacgctgacactagaaaccaggccaagcagcctcttgagttcaatcaattgagagtatcaaggaaatatgttcaaggaaaacaagattcaactcccaagaacggaaccagtccatcagtgcatagaggctcaacaagcaatcaacgggagcaggataagatcgtatgtatgcctgggcaaacaggggtagcagagtttgaccaatatgcaggatatgtgactgtggatgccaaggctggaagggctttgttctactattttgttgaggctcctcaagatccttcaaacaaacctcttgtcctatggctgaatggagggcctggctgttcatcctttggatctggggccatggttgaacttggacctttctctgttcatagtgacaacaagacactgtacaagaaaaggcatgcatggaacagaatggccaacatgttgttcattgagatcccagctggtgttggatactcatattcaaacactacatcagattactataacactggtcactatataccagaacttgcaaatctgattctctctaagaatagagccaccaatgtaactagtatcaagcttaaaggtgttgcgattggaaatgcagacttggatgataatttgactctaagagcatcatatgactactattggatgcatgctatgatttcgggaaaagcttataaagccgtcaaggataagtgcggctttaatgggacatacactgaagactgccaaaatgccatggacttagccacccaagaaaaaggaaatattgatgactatgacatctatgcaccaatatgccaagatgcctcaaacccttctaaatcaagtgactcgttagtgtttggtgatccatgcacaaaccactacgtctcctcttacctaaatcgtcctgaggtccaaagggcactccatgcaaacacaacagggttaggctacccatggatggactgtagtcagcagatatttgataattggaaagattcaccagagacaatgctgccatcaatcaagaaactcatttcaagtggcacgagaatatggctgtacagtggtgatatggatgcagtgtgctcattcatttcaacacaatatgtgctggacaatcttgggcttcctatagaagcagcttggcgtccatggcgcgtcgacaatgaggttgctggctacgtcattgggtataaagggctggtcttcgtgacggtcagaggagctgggcacatggtgccatactaccagcctcgcagggcattggcattattctcgtcattcctcgaaggggagctccctccacgctgatcgattaagctagcagggtttgtgaatgccatttactcatttcccacagcctatggaatcatatgtttttactatacttgtagctggcctttattttttatataaatatataaaacaaaccaagcagggagctgacgattatattaataaaaaatgagattgagaaaggggatctgatggagcagttcttttctactcattctcctatatatgacagacaggtataggttttagggaaagggactgcatttcctcagtcagtctcaaggagatgctcttagagtcttagttcaacttccctgcacaacacaagcatcgagaattatgtgattctaccctgattgtttggagtgcagcaaggagcccatctaactctggtttgtcgctagcacaagaagataagttagcactaaccctgagcacaatgttgtattatccgtacccaaaactgaacaatgtcagtgctaacgccatcacggagcctggattggcatccagatatccgcgcatcaaacgaaaaaaagagggcgggattcagaacttcgaaatagagaaaaggttcctcaaaagaagtgggggggggggggggggacagagaaggcgaagggctggggagcgatctcggagtcaggtcgcactgcgagagtgagtgaaggaggagggacagggaggagcgaacctcggagaatggatagcggcacggcacgagcccgcgacggacgacgagggatggcgaccgtggaacggcgcgtcgccgacgccgaccccgtctcgactgttgatcggtgtctggggctctgctgagtaaaatgtggagaactgcccggctggagttttggtagagtcaatgcgaagacagttcttgagaggaggaggcatgtatgcagaagatcgaccacatccacacttggtagccaaatgctgttgcacaaaagtgaacctcccttttgggaacttcaaaaacatggcatgcaagtcggttgtctgcttccattccattcacatttaacttagaaatgatactttagcagacactgttgttagttctacgtttttttttcttcttcaatttggtcgaaaaaaagttgtgcctgaacttcgtcgatcctctatatgcttgtgactagtcccttcaatctgaatagatgctggaaaacaaagggctctgagccccgcagcgatcatgggttttttttctctgaggaagaggaagctgtccttgattcgtgtttcagaaaacggcagaagcaagaattcaatctttagtctgcggtagtgacatgtacagtagactcgggaaagctaggcttccacatgtaggtgcgtcgtgctcgtgcatgtagtgcccgctt

SEQ ID NO: 80794 - DNA, 1090 bp, Zea Mays
agcagcattgttcctcatttctcgaagcgtcgccatcgactggataactctcagccaccgtcgtggttctccgcctggaaccgatgatcgagttggagaagcacacgacgagggagccggagtgagcatggagggcgcaccacaggcgactctgcgccgccaccgtgagcactgctctgtcgcctaccatcgatgtcggccatggcagtcgttgctccgcagcctaccatcgacgtcgaccatggtagtcgttgctccgccgcctaccattgacgccggccatggcagtcgttgctccgccacatcttgctgcatactcccgttgatgggaacgctcgacctcccggtgctcccgctcccgtccttggtgagcgtggagggcgcatcacccgtggctacgacaacagtaggtcaaggcaagtggaggtggaggcattggcgcggtagtcaataggttattcattttgttgagattgcctgattgcaacaaagttgcatccagttaaattggcaatgtggtacaacaacgagctttaattaagctgtgcatcctatggccatcatcaacattacatatgatttacctttttcctcctcctcttcttttttttaaaaaaaacttcaccaactcaagatccacactgtttcatgagtacagaaagtcattggcttccaggggtagcgtggtcagccccaaaagatttgtgattacaactcaaatatgagcttcaacatgctctcctgaagctcgaagcagcaaaaggcttcaacaacacagtaaaagcgggtggaatgcatttttttctttggagagagacgaactacggggattgagttcttcatgtgcgaatagattgcaattcataacagttcattgctaactggtttagcatcgtctattcagacctggcttcaagttacttagaaaccttacagtagaggagatcacagtgaccagtaattgtacaacctttttcttttttaatccctgttcgatttatttcaaacccagtttgcactatgtatttcgctgaagaatatgaagttattttcatcagagttaacaaatgatgaaaaagttgtgatcacc

SEQ ID NO: 80795 - DNA, 1149 bp, Zea Mays
agcagcattgttcctcatttctcgaagcgtcgccatcgactggataactctcagccaccgtcgtggttctccgcctggaaccgatgatcgagttggagaagcacacgacgagggagccggagtgagcatggagggcgcaccacaggcgactctgcgccgccaccgtgagcactgctctgtcgcctaccatcgatgtcggccatggcagtcgttgctccgcagcctaccatcgacgtcgaccatggtagtcgttgctccgccgcctaccattgacgccggccatggcagtcgttgctccgccacatcttgctgcatactcccgttgatgggaacgctcgacctcccggtgctcccgctcccgtccttggtgagcgtggagggcgcatcacccgtggctacgacaacagtaggtcaaggcaagtggaggtggaggcattggcgcggtagtcaataggttattcattttgttgagattgcctgattgcaacaaagttgcatccagttaaattggcaatgtggtacaacaacgagctttaattaagctgtgcatcctatggccatcatcaacattacatatgatttacctttttcctcctcctcttcttttttttaaaaaaaacttcaccaactcaagatccacactgtttcatgagtacagaaagtcattggcttccaggggtagcgtggtcagccccaaaagatttgtgattacaactcaaatatgagcttcaacatgctctcctgaagctcgaagcagcaaaaggcttcaacaacacagtaaaagcaaatttggatattatgggttgtgcaatctgttgaccctgcttggctacttttgttcagcgggtggaatgcatttttttctttggagagagacgaactacggggattgagttcttcatgtgcgaatagattgcaattcataacagttcattgctaactggtttagcatcgtctattcagacctggcttcaagttacttagaaaccttacagtagaggagatcacagtgaccagtaattgtacaacctttttcttttttaatccctgttcgatttatttcaaacccagtttgcactatgtatttcgctgaagaatatgaagttattttcatcagagttaacaaatgatgaaaaagttgtgatcacc

SEQ ID NO: 80796 - DNA, 1655 bp, Zea Mays
agcagcattgttcctcatttctcgaagcgtcgccatcgactggataactctcagccaccgtcgtggttctccgcctggaaccgatgatcgagttggagaagcacacgacgagggagccggagtgagcatggagggcgcaccacaggcgactctgcgccgccaccgtgagcactgctctgtcgcctaccatcgatgtcggccatggcagtcgttgctccgcagcctaccatcgacgtcgaccatggtagtcgttgctccgccgcctaccattgacgccggccatggcagtcgttgctccgccacatcttgctgcatactcccgttgatgggaacgctcgacctcccggtgctcccgctcccgtccttggtgagcgtggagggcgcatcacccgtggctacgacaacagtaggtcaaggcaagtggaggtggaggcattggcgcggtagtcaataggttattcattttgttgagattgcctgattgcaacaaagttgcatccagttaaattggcaatgtggtacaacaacgagctttaattaagctgtgcatcctatggccatcatcaacattacatatgatttacctttttcctcctcctcttcttttttttaaaaaaaacttcaccaactcaagatccacactgtttcatgagtacagaaagtcattggcttccaggggtagcgtggtcagccccaaaagatttgtgattacaactcaaatatgagcttcaacatgctctcctgaagctcgaagcagcaaaaggcttcaacaacacagtaaaaggtactcactccacaaatgtaagacatatttaggagggagggaaatgactgatgtccctcaatcaatcaccaagaatacaaagacgcagttatcgtcttccgttcatgcagatgccataatcgctaagtactgaaaaacctcaaacattatattgatgctaaacatgcttgccaccaaaataaaaatgcttacaaatattaacgacgagggagggttgattatgccataaatgtttacatttatggacaattttgaatgctgaagacacacatctgtggaaggaagctggagggagtagcaagatggatatatcaattattattttcaaatggttgttggattctatgtatgctcatgtatttcttcttttgccagtgcaacccgagagtgaattattgtatatatttacttgcagcaaatttggatattatgggttgtgcaatctgttgaccctgcttggctacttttgttcagcgggtggaatgcatttttttctttggagagagacgaactacggggattgagttcttcatgtgcgaatagattgcaattcataacagttcattgctaactggtttagcatcgtctattcagacctggcttcaagttacttagaaaccttacagtagaggagatcacagtgaccagtaattgtacaacctttttcttttttaatccctgttcgatttatttcaaacccagtttgcactatgtatttcgctgaagaatatgaagttattttcatcagagttaacaaatgatgaaaaagttgtgatcaccgctattccatctccttttatttgcttcaactctgtgcgcatgttcaaatcactatatgtgaacatatgtaaatatagtggcacaacccttt

SEQ ID NO: 80797 - DNA, 2207 bp, Zea Mays
gttatagttaccaaacaatttcttctttttttctcctctaaaaagatccttctggtaatttggtgctcaaggcgagacgcccatctcccctctcatcgtctctctcatctcatccagcctgtgccaaaacaaaacgagaaaaaaaagtcttgctgctgctggtggtggagcgagaaaggaaaaaaaaaaagaaggggtaatctcaggaaccatctagatacagcggcggtacgtggactggactggagcgagcaagcctgcgccggcgccgccgtcctcccgaaacagaagctgtagttggtcaagaactggggatactgagttgaatatgatctcaaatccggtggactggtatagtttcggacccggatagaattggtagggatgcaagattggagggtgcgtgagttcgaaggtaaattcactgatgagtttgcccacagcagtagcaacgaacataaaggtggagttgaggcttctggtgtcattagtagtaagaagttgaagcatgcagttgctaatgagaaaatccaaggtgtcatccccggtacaaatagctcaggttcactgaaacgtaattcagagaacatccaacatgcgaacggggtattatcccagaatataagctgcgctggtgactacaaaaatggctccattgcctttcctttgagagaagaaaatacaataactgagaccagatgtccagatgataactggaactcctgtcagtttgcactgaacaatggttcgtccattctcaataaccacagtgctccccaggatagcctcacttatggagataatgatctaaactacatcgaatggcctggcattgacaattttgaggatgtcgatacattattcaggagttctgattcaacatatggtcagcagcagctggagaatgcagatgggttatcttggattccgtcttcagatgctgtttactctaccgatgttgctttgcaacaagggcttgattcgtcttattcagattatggtattctggatgatctctccgcattccaatgtgcagaagataaatcactacccttggttgatccttcatcagctttatgtgataatcaattcaatgatacctacctgttcagtgaacaaaagaatgtgaatgcatatggtgaacagatataccaagaggatttgatggagttgttgcccactgaccagatatgcagcggacatgaaaacattgatatgttgcaggttggaaaccagtatccatctgaaaatgcaattcaaggtaccgaagataagaaattctctatagcgtcaacttcccagctgagttctcagaatttactgaatcaaagacaccacttagattccagttcaccaagcaatattacttcggagtcctatccaggaaagttcggtccatctagctgttcttctgcacaaagaaactcaaaagtgcagaagaaaactgtcaacatacaaccaagacagccagcaaatgataatgttatgaacacaagcagagcttcttacccttgtgagaactatgaaactgaaagaagaggattagggaaagaactctgggggatcctcaagttacaatgggtagttcaatggtagtggatggctcatttgtatcatctatgtcctctgataactcagtcgaagaaagcagctttcaacaactgcaggatgctgttagtcagctggatgtgcaaaccaaattgtgcatcagggatggtttataccgattggcacgaagtgcgcaacatagacaagtttttccaaatacgatgaacagcaatggtggtagcgaggacggaaaggaactggagaacgcagaaacttcgtgcaagttcatggaccctcggagcatcgagacgcagacaaacccgatcgatcggtctatagctctgctacttttccgcgagtcatctggcggccatgtccatgtggctgtagcagccgacgatgcctcgtcactgaaatcccctgctggtgtatgatttcctgcctgccacatctcagttccagggccctgctgctaacccaggatgtttctaggcatgtatgtaaaaaaaaaaacaagcgtattgtgtagccaatagtctgtactctgtagtcacattaattttgtcatgcttgtatcctattgctagacggccgatgtgctaacctagtgctgttgactcaaattttatgcgtaatctaaaaaaaattatttcttttcg

SEQ ID NO: 80798 - DNA, 2184 bp, Zea Mays
aaacaatttcttctttttttctcctctaaaaagatccttctggtaatttggtgctcaaggcgagacgcccatctcccctctcatcgtctctctcatctcatccagcctgtgccaaaacaaaacgagaaaaaaaagtcttgctgctgctggtggtggagcgagaaaggaaaaaaaaaaagaaggggtaatctcaggaaccatctagatacagcggcggtacgtggactggactggagcgagcaagcctgcgccggcgccgccgtcctcccgaaacagaagctgtagttggtcaagaactggggatactgagttgaatatgatctcaaatccggtggactggtatagtttcggacccggatagaattggtagggatgcaagattggagggtgcgtgagttcgaaggtaaattcactgatgagtttgcccacagcagtagcaacgaacataaaggtggagttgaggcttctggtgtcattagtagtaagaagttgaagcatgcagttgctaatgagaaaatccaaggtgtcatccccggtacaaatagctcaggttcactgaaacgtaattcagagaacatccaacatgcgaacggggtattatcccagaatataagctgcgctggtgactacaaaaatggctccattgcctttcctttgagagaagaaaatacaataactgagaccagatgtccagatgataactggaactcctgtcagtttgcactgaacaatggttcgtccattctcaataaccacagtgctccccaggatagcctcacttatggagataatgatctaaactacatcgaatggcctggcattgacaattttgaggatgtcgatacattattcaggagttctgattcaacatatggtcagcagcagctggagaatgcagatgggttatcttggattccgtcttcagatgctgtttactctaccgatgttgctttgcaacaagggcttgattcgtcttattcagattatggtattctggatgatctctccgcattccaatgtgcagaagataaatcactacccttggttgatccttcatcagctttatgtgataatcaattcaatgatacctacctgttcagtgaacaaaagaatgtgaatgcatatggtgaacagatataccaagaggatttgatggagttgttgcccactgaccagatatgcagcggacatgaaaacattgatatggttggaaaccagtatccatctgaaaatgcaattcaaggtaccgaagataagaaattctctatagcgtcaacttcccagctgagttctcagaatttactgaatcaaagacaccacttagattccagttcaccaagcaatattacttcggagtcctatccaggaaagttcggtccatctagctgttcttctgcacaaagaaactcaaaagaagaaaactgtcaacatacaaccaagacagccagcaaatgataatgttatgaacacaagcagagcttcttacccttgtgagaactatgaaactgaaagaagaggattagggaaagaactctgggggatcctcaagttacaatgggtagttcaatggtagtggatggctcatttgtatcatctatgtcctctgataactcagtcgaagaaagcagctttcaacaactgcaggatgctgttagtcagctggatgtgcaaaccaaattgtgcatcagggatggtttataccgattggcacgaagtgcgcaacatagacaagtttttccaaatacgatgaacagcaatggtggtagcgaggacggaaaggaactggagaacgcagaaacttcgtgcaagttcatggaccctcggagcatcgagacgcagacaaacccgatcgatcggtctatagctctgctacttttccgcgagtcatctggcggccatgtccatgtggctgtagcagccgacgatgcctcgtcactgaaatcccctgctggtgtatgatttcctgcctgccacatctcagttccagggccctgctgctaacccaggatgtttctaggcatgtatgtaaaaaaaaaaacaagcgtattgtgtagccaatagtctgtactctgtagtcacattaattttgtcatgcttgtatcctattgctagacggccgatgtgctaacctagtgctgttgactcaaattttatgcgtaatctaaaaaaaattatttcttttcg

SEQ ID NO: 80799 - DNA, 2210 bp, Zea Mays
ctttttttctcctctaaaaagatccttctggtaatttggtgctcaaggcgagacgcccatctcccctctcatcgtctctctcatctcatccagcctgtgccaaaacaaaacgagaaaaaaaagtcttgctgctgctggtggtggagcgagaaaggaaaaaaaaaaagaaggggtaatctcaggaaccatctagatacagcggcggtacgtggactggactggagcgagcaagcctgcgccggcgccgccgtcctcccgaaacagaagctgtagttggtcaagaactggggatactgagttgaatatgatctcaaatccggtggactggtatagtttcggacccggatagaattggtagggatgcaagattggagggtgcgtgagttcgaaggtaaattcactgatgagtttgcccacagcagtagcaacgaacataaaggtggagttgaggcttctggtgtcattagtagtaagaagttgaagcatgcagttgctaatgagaaaatccaaggtgtcatccccggtacaaatagctcaggttcactgaaacgtaattcagagaacatccaacatgcgaacggggtattatcccagaatataagctgcgctggtgactacaaaaatggctccattgcctttcctttgagagaagaaaatacaataactgagaccagatgtccagatgataactggaactcctgtcagtttgcactgaacaatggttcgtccattctcaataaccacagtgctccccaggatagcctcacttatggagataatgatctaaactacatcgaatggcctggcattgacaattttgaggatgtcgatacattattcagttctgattcaacatatggtcagcagcagctggagaatgcagatgggttatcttggattccgtcttcagatgctgtttactctaccgatgttgctttgcaacaagggcttgattcgtcttattcagattatggtattctggatgatctctccgcattccaatgtgcagaagataaatcactacccttggttgatccttcatcagctttatgtgataatcaattcaatgatacctacctgttcagtgaacaaaagaatgtgaatgcatatggtgaacagatataccaagaggatttgatggagttgttgcccactgaccagatatgcagcggacatgaaaacattgatatgttgcaggttggaaaccagtatccatctgaaaatgcaattcaaggtaccgaagataagaaattctctatagcgtcaacttcccagctgagttctcagaatttactgaatcaaagacaccacttagattccagttcaccaagcaatattacttcggagtcctatccaggaaagttcggtccatctagctgttcttctgcacaaagaaactcaaaagctggtgtgacacttaagtgcgcaaatgcagtgcagaagaaaactgtcaacatacaaccaagacagccagcaaatgataatgttatgaacacaagcagagcttcttacccttgtgagaactatgaaactgaaagaagaggattagggaaagaactctgggggatcctcaagttacaatgggtagttcaatggtagtggatggctcatttgtatcatctatgtcctctgataactcagtcgaagaaagcagctttcaacaactgcaggatgctgttagtcagctggatgtgcaaaccaaattgtgcatcagggatggtttataccgattggcacgaagtgcgcaacatagacaagtttttccaaatacgatgaacagcaatggtggtagcgaggacggaaaggaactggagaacgcagaaacttcgtgcaagttcatggaccctcggagcatcgagacgcagacaaacccgatcgatcggtctatagctctgctacttttccgcgagtcatctggcggccatgtccatgtggctgtagcagccgacgatgcctcgtcactgaaatcccctgctggtgtatgatttcctgcctgccacatctcagttccagggccctgctgctaacccaggatgtttctaggcatgtatgtaaaaaaaaaaacaagcgtattgtgtagccaatagtctgtactctgtagtcacattaattttgtcatgcttgtatcctattgctagacggccgatgtgctaacctagtgctgttgactcaaattttatgcgtaatctaaaaaaaattatttcttttcg

SEQ ID NO: 80800 - DNA, 2121 bp, Zea Mays
atttggtgctcaaggcgagacgcccatctcccctctcatcgtctctctcatctcatccagcctgtgccaaaacaaaacgagaaaaaaaagtcttgctgctgctggtggtggagcgagaaaggaaaaaaaaaaagaaggggtaatctcaggaaccatctagatacagcggcggtacgtggactggactggagcgagcaagcctgcgccggcgccgccgtcctcccgaaacagaagctgtagttggtcaagaactggggatactgagttgaatatgatctcaaatccggtggactggtatagtttcggacccggatagaattggtagggatgcaagattggagggtgcgtgagttcgaaggtaaattcactgatgagtttgcccacagcagtagcaacgaacataaaggtggagttgaggcttctggtgtcattagtagtaagaagttgaagcatgcagttgctaatgagaaaatccaaggtgtcatccccggtacaaatagctcaggttcactgaaacgtaattcagagaacatccaacatgcgaacggggtattatcccagaatataagctgcgctggtgactacaaaaatggctccattgcctttcctttgagagaagaaaatacaataactgagaccagatgtccagatgataactggaactcctgtcagtttgcactgaacaatggttcgtccattctcaataaccacagtgctccccaggatagcctcacttatggagataatgatctaaactacatcgaatggcctggcattgacaattttgaggatgtcgatacattattcaggagttctgattcaacatatggtcagcagcagctggagaatgcagatgggttatcttggattccgtcttcagatgctgtttactctaccgatgttgctttgcaacaagggcttgattcgtcttattcagattatggtattctggatgatctctccgcattccaatgtgcagaagataaatcactacccttggttgatccttcatcagctttatgtgataatcaattcaatgatacctacctgttcagtgaacaaaagaatgtgaatgcatatggtgaacagatataccaagaggatttgatggagttgttgcccactgaccagatatgcagcggacatgaaaacattgatatgttgcaggttggaaaccagtatccatctgaaaatgcaattcaaggtaccgaagataagaaattctctatagcgtcaacttcccagctgagttctcagaatttactgaatcaaagacaccacttagattccagttcaccaagcaatattacttcggagtcctatccaggaaagttcggtccatctagctgttcttctgcacaaagaaactcaaaagtgcagaagaaaactgtcaacatacaaccaagacagccagcaaatgataatgttatgaacacaagcagagcttcttacccttgtgagaactatgaaactgaaagaagaggattagggaaagaactctgggggatcctcaagttacaatgggtagttcaatggtagtggatggctcatttgtatcatctatgtcctctgataactcagtcgaagaaagcagctttcaacaactgcaggatgctgttagtcagggatggtttataccgattggcacgaagtgcgcaacatagacaagtttttccaaatacgatgaacagcaatggtggtagcgaggacggaaaggaactggagaacgcagaaacttcgtgcaagttcatggaccctcggagcatcgagacgcagacaaacccgatcgatcggtctatagctctgctacttttccgcgagtcatctggcggccatgtccatgtggctgtagcagccgacgatgcctcgtcactgaaatcccctgctggtgtatgatttcctgcctgccacatctcagttccagggccctgctgctaacccaggatgtttctaggcatgtatgtaaaaaaaaaaacaagcgtattgtgtagccaatagtctgtactctgtagtcacattaattttgtcatgcttgtatcctattgctagacggccgatgtgctaacctagtgctgttgactcaaattttatgcgtaatctaaaaaaaattatttcttttcg

SEQ ID NO: 80801 - DNA, 2070 bp, Zea Mays
atttggtgctcaaggcgagacgcccatctcccctctcatcgtctctctcatctcatccagcctgtgccaaaacaaaacgagaaaaaaaagtcttgctgctgctggtggtggagcgagaaaggaaaaaaaaaaagaaggggtaatctcaggaaccatctagatacagcggcggtacgtggactggactggagcgagcaagcctgcgccggcgccgccgtcctcccgaaacagaagctgtagttggtcaagaactggggatactgagttgaatatgatctcaaatccggtggactggtatagtttcggacccggatagaattggtagggatgcaagattggagggtgcgtgagttcgaaggtaaattcactgatgagtttgcccacagcagtagcaacgaacataaaggtggagttgaggcttctggtgtcattagtagtaagaagttgaagcatgcagttgctaatgagaaaatccaaggtgtcatccccggtacaaatagctcaggttcactgaaacgtaattcagagaacatccaacatgcgaacggggtattatcccagaatataagctgcgctggtgactacaaaaatggctccattgcctttcctttgagagaagaaaatacaataactgagaccagatgtccagatgataactggaactcctgtcagtttgcactgaacaatggttcgtccattctcaataaccacagtgctccccaggatagcctcacttatggagataatgatctaaactacatcgaatggcctggcattgacaattttgaggatgtcgatacattattcaggagttctgattcaacatatggtcagcagcagctggagaatgcagatgggttatcttggattccgtcttcagatgctgtttactctaccgatgttgctttgcaacaagggcttgattcgtcttattcagattatggtattctggatgatctctccgcattccaatgtgcagaagataaatcactacccttggttgatccttcatcagctttatgtgataatcaattcaatgatacctacctgttcagtgaacaaaagaatgtgaatgcatatggtgaacagatataccaagaggatttgatggagttgttgcccactgaccagatatgcagcggacatgaaaacattgatatggttggaaaccagtatccatctgaaaatgcaattcaagattccagttcaccaagcaatattacttcggagtcctatccaggaaagttcggtccatctagctgttcttctgcacaaagaaactcaaaagtgcagaagaaaactgtcaacatacaaccaagacagccagcaaatgataatgttatgaacacaagcagagcttcttacccttgtgagaactatgaaactgaaagaagaggattagggaaagaactctgggggatcctcaagttacaatgggtagttcaatggtagtggatggctcatttgtatcatctatgtcctctgataactcagtcgaagaaagcagctttcaacaactgcaggatgctgttagtcagctggatgtgcaaaccaaattgtgcatcagggatggtttataccgattggcacgaagtgcgcaacatagacaagtttttccaaatacgatgaacagcaatggtggtagcgaggacggaaaggaactggagaacgcagaaacttcgtgcaagttcatggaccctcggagcatcgagacgcagacaaacccgatcgatcggtctatagctctgctacttttccgcgagtcatctggcggccatgtccatgtggctgtagcagccgacgatgcctcgtcactgaaatcccctgctggtgtatgatttcctgcctgccacatctcagttccagggccctgctgctaacccaggatgtttctaggcatgtatgtaaaaaaaaaaacaagcgtattgtgtagccaatagtctgtactctgtagtcacattaattttgtcatgcttgtatcctattgctagacggccgatgtgctaacctagtgctgttgactcaaattttatgcgtaatctaaaaaaaattatttcttttcaaaaaaaa

SEQ ID NO: 80802 - DNA, 2137 bp, Zea Mays
ctcaaggcgagacgcccatctcccctctcatcgtctctctcatctcatccagcctgtgccaaaacaaaacgagaaaaaaaagtcttgctgctgctggtggtggagcgagaaaggaaaaaaaaaaagaaggggtaatctcaggaaccatctagatacagcggcggtacgtggactggactggagcgagcaagcctgcgccggcgccgccgtcctcccgaaacagaagctgtagttggtcaagaactggggatactgagttgaatatgatctcaaatccggtggactggtatagtttcggacccggatagaattggtagggatgcaagattggagggtgcgtgagttcgaaggtaaattcactgatgagtttgcccacagcagtagcaacgaacataaaggtggagttgaggcttctggtgtcattagtagtaagaagttgaagcatgcagttgctaatgagaaaatccaaggtgtcatccccggtacaaatagctcaggttcactgaaacgtaattcagagaacatccaacatgcgaacggggtattatcccagaatataagctgcgctggtgactacaaaaatggctccattgcctttcctttgagagaagaaaatacaataactgagaccagatgtccagatgataactggaactcctgtcagtttgcactgaacaatggttcgtccattctcaataaccacagtgctccccaggatagcctcacttatggagataatgatctaaactacatcgaatggcctggcattgacaattttgaggatgtcgatacattattcaggagttctgattcaacatatggtcagcagcagctggagaatgcagatgggttatcttggattccgtcttcagatgctgtttactctaccgatgttgctttgcaacaagggcttgattcgtcttattcagattatggtattctggatgatctctccgcattccaatgtgcagaagataaatcactacccttggttgatccttcatcagctttatgtgataatcaattcaatgatacctacctgttcagtgaacaaaagaatgtgaatgcatatggtgaacagatataccaagaggatttgatggagttgttgcccactgaccagatatgcagcggacatgaaaacattgatatgttgcaggttggaaaccagtatccatctgaaaatgcaattcaaggtaccgaagataagaaattctctatagcgtcaacttcccagctgagttctcagaatttactgaatcaaagacaccacttagattccagttcaccaagcaatattacttcggagtcctatccaggaaagttcggtccatctagctgttcttctgcacaaagaaactcaaaagaagaaaactgtcaacatacaaccaagacagccagcaaatgataatgttatgaacacaagcagagcttcttacccttgtgagaactatgaaactgaaagaagaggattagggaaagaactctgggggatcctcaagttacaatgggtagttcaatggtagtggatggctcatttgtatcatctatgtcctctgataactcagtcgaagaaagcagctttcaacaactgcaggatgctgttagtcagctggatgtgcaaaccaaattgtgcatcagggatggtttataccgattggcacgaagtgcgcaacatagacaagtttttccaaatacgatgaacagcaatggtggtagcgaggacggaaaggaactggagaacgcagaaacttcgtgcaagttcatggaccctcggagcatcgagacgcagacaaacccgatcgatcggtctatagctctgctacttttccgcgagtcatctggcggccatgtccatgtggctgtagcagccgacgatgcctcgtcactgaaatcccctgctggtgtatgatttcctgcctgccacatctcagttccagggccctgctgctaacccaggatgtttctaggcatgtatgtaaaaaaaaaaacaagcgtattgtgtagccaatagtctgtactctgtagtcacattaattttgtcatgcttgtatcctattgctagacggccgatgtgctaacctagtgctgttgactcaaattttatgcgtaatctaaaaaaaattatttcttttcg

SEQ ID NO: 80803 - DNA, 2163 bp, Zea Mays
ctcaaggcgagacgcccatctcccctctcatcgtctctctcatctcatccagcctgtgccaaaacaaaacgagaaaaaaaagtcttgctgctgctggtggtggagcgagaaaggaaaaaaaaaaagaaggggtaatctcaggaaccatctagatacagcggcggtacgtggactggactggagcgagcaagcctgcgccggcgccgccgtcctcccgaaacagaagctgttggtcaagaactggggatactgagttgaatatgatctcaaatccggtggactggtatagtttcggacccggatagaattggtagggatgcaagattggagggtgcgtgagttcgaaggtaaattcactgatgagtttgcccacagcagtagcaacgaacataaaggtggagttgaggcttctggtgtcattagtagtaagaagttgaagcatgcagttgctaatgagaaaatccaaggtgtcatccccggtacaaatagctcaggttcactgaaacgtaattcagagaacatccaacatgcgaacggggtattatcccagaatataagctgcgctggtgactacaaaaatggctccattgcctttcctttgagagaagaaaatacaataactgagaccagatgtccagatgataactggaactcctgtcagtttgcactgaacaatggttcgtccattctcaataaccacagtgctccccaggatagcctcacttatggagataatgatctaaactacatcgaatggcctggcattgacaattttgaggatgtcgatacattattcaggagttctgattcaacatatggtcagcagcagctggagaatgcagatgggttatcttggattccgtcttcagatgctgtttactctaccgatgttgctttgcaacaagggcttgattcgtcttattcagattatggtattctggatgatctctccgcattccaatgtgcagaagataaatcactacccttggttgatccttcatcagctttatgtgataatcaattcaatgatacctacctgttcagtgaacaaaagaatgtgaatgcatatggtgaacagatataccaagaggatttgatggagttgttgcccactgaccagatatgcagcggacatgaaaacattgatatggttggaaaccagtatccatctgaaaatgcaattcaaggtaccgaagataagaaattctctatagcgtcaacttcccagctgagttctcagaatttactgaatcaaagacaccacttagattccagttcaccaagcaatattacttcggagtcctatccaggaaagttcggtccatctagctgttcttctgcacaaagaaactcaaaagctggtgtgacacttaagtgcgcaaatgcagtgcagaagaaaactgtcaacatacaaccaagacagccagcaaatgataatgttatgaacacaagcagagcttcttacccttgtgagaactatgaaactgaaagaagaggattagggaaagaactctgggggatcctcaagttacaatgggtagttcaatggtagtggatggctcatttgtatcatctatgtcctctgataactcagtcgaagaaagcagctttcaacaactgcaggatgctgttagtcagctggatgtgcaaaccaaattgtgcatcagggatggtttataccgattggcacgaagtgcgcaacatagacaagtttttccaaatacgatgaacagcaatggtggtagcgaggacggaaaggaactggagaacgcagaaacttcgtgcaagttcatggaccctcggagcatcgagacgcagacaaacccgatcgatcggtctatagctctgctacttttccgcgagtcatctggcggccatgtccatgtggctgtagcagccgacgatgcctcgtcactgaaatcccctgctggtgtatgatttcctgcctgccacatctcagttccagggccctgctgctaacccaggatgtttctaggcatgtatgtaaaaaaaaaaacaagcgtattgtgtagccaatagtctgtactctgtagtcacattaattttgtcatgcttgtatcctattgctagacggccgatgtgctaacctagtgctgttgactcaaattttatgcgtaatctaaaaaaaattatttcttttcg

SEQ ID NO: 80804 - DNA, 2134 bp, Zea Mays
aaggcgagacgcccatctcccctctcatcgtctctctcatctcatccagcctgtgccaaaacaaaacgagaaaaaaaagtcttgctgctgctggtggtggagcgagaaaggaaaaaaaaaaagaaggggtaatctcaggaaccatctagatacagcggcggtacgtggactggactggagcgagcaagcctgcgccggcgccgccgtcctcccgaaacagaagctgtagttggtcaagaactggggatactgagttgaatatgatctcaaatccggtggactggtatagtttcggacccggatagaattggtagggatgcaagattggagggtgcgtgagttcgaaggtaaattcactgatgagtttgcccacagcagtagcaacgaacataaaggtggagttgaggcttctggtgtcattagtagtaagaagttgaagcatgcagttgctaatgagaaaatccaaggtgtcatccccggtacaaatagctcaggttcactgaaacgtaattcagagaacatccaacatgcgaacggggtattatcccagaatataagctgcgctggtgactacaaaaatggctccattgcctttcctttgagagaagaaaatacaataactgagaccagatgtccagatgataactggaactcctgtcagtttgcactgaacaatggttcgtccattctcaataaccacagtgctccccaggatagcctcacttatggagataatgatctaaactacatcgaatggcctggcattgacaattttgaggatgtcgatacattattcaggagttctgattcaacatatggtcagcagcagctggagaatgcagatgggttatcttggattccgtcttcagatgctgtttactctaccgatgttgctttgcaacaagggcttgattcgtcttattcagattatggtattctggatgatctctccgcattccaatgtgcagaagataaatcactacccttggttgatccttcatcagctttatgtgataatcaattcaatgatacctacctgttcagtgaacaaaagaatgtgaatgcatatggtgaacagatataccaagaggatttgatggagttgttgcccactgaccagatatgcagcggacatgaaaacattgatatggttggaaaccagtatccatctgaaaatgcaattcaaggtaccgaagataagaaattctctatagcgtcaacttcccagctgagttctcagaatttactgaatcaaagacaccacttagattccagttcaccaagcaatattacttcggagtcctatccaggaaagttcggtccatctagctgttcttctgcacaaagaaactcaaaagctggtgtgacacttaagtgcgcaaatgcagtgcagaagaaaactgtcaacatacaaccaagacagccagcaaatgataatgttatgaacacaagcagagcttcttacccttgtgagaactatgaaactgaaagaagaggattagggaaagaactctgggggatcctcaagttacaatgggtagttcaatggtagtggatggctcatttgtatcatctatgtcctctgataactcagtcgaagaaagcagctttcaacaactgcaggatgctgttagtcagggatggtttataccgattggcacgaagtgcgcaacatagacaagtttttccaaatacgatgaacagcaatggtggtagcgaggacggaaaggaactggagaacgcagaaacttcgtgcaagttcatggaccctcggagcatcgagacgcagacaaacccgatcgatcggtctatagctctgctacttttccgcgagtcatctggcggccatgtccatgtggctgtagcagccgacgatgcctcgtcactgaaatcccctgctggtgtatgatttcctgcctgccacatctcagttccagggccctgctgctaacccaggatgtttctaggcatgtatgtaaaaaaaaaaacaagcgtattgtgtagccaatagtctgtactctgtagtcacattaattttgtcatgcttgtatcctattgctagacggccgatgtgctaacctagtgctgttgactcaaattttatgcgtaatctaaaaaaaattatttcttttcg

SEQ ID NO: 80805 - DNA, 2123 bp, Zea Mays
cgcccatctcccctctcatcgtctctctcatctcatccagcctgtgccaaaacaaaacgagaaaaaaaagtcttgctgctgctggtggtggagcgagaaaggaaaaaaaaaaagaaggggtaatctcaggaaccatctagatacagcggcggtacgtggactggactggagcgagcaagcctgcgccggcgccgccgtcctcccgaaacagaagctgttggtcaagaactggggatactgagttgaatatgatctcaaatccggtggactggtatagtttcggacccggatagaattggtagggatgcaagattggagggtgcgtgagttcgaaggtaaattcactgatgagtttgcccacagcagtagcaacgaacataaaggtggagttgaggcttctggtgtcattagtagtaagaagttgaagcatgcagttgctaatgagaaaatccaaggtgtcatccccggtacaaatagctcaggttcactgaaacgtaattcagagaacatccaacatgcgaacggggtattatcccagaatataagctgcgctggtgactacaaaaatggctccattgcctttcctttgagagaagaaaatacaataactgagaccagatgtccagatgataactggaactcctgtcagtttgcactgaacaatggttcgtccattctcaataaccacagtgctccccaggatagcctcacttatggagataatgatctaaactacatcgaatggcctggcattgacaattttgaggatgtcgatacattattcagcagctggagaatgcagatgggttatcttggattccgtcttcagatgctgtttactctaccgatgttgctttgcaacaagggcttgattcgtcttattcagattatggtattctggatgatctctccgcattccaatgtgcagaagataaatcactacccttggttgatccttcatcagctttatgtgataatcaattcaatgatacctacctgttcagtgaacaaaagaatgtgaatgcatatggtgaacagatataccaagaggatttgatggagttgttgcccactgaccagatatgcagcggacatgaaaacattgatatggttggaaaccagtatccatctgaaaatgcaattcaaggtaccgaagataagaaattctctatagcgtcaacttcccagctgagttctcagaatttactgaatcaaagacaccacttagattccagttcaccaagcaatattacttcggagtcctatccaggaaagttcggtccatctagctgttcttctgcacaaagaaactcaaaagctggtgtgacacttaagtgcgcaaatgcagtgcagaagaaaactgtcaacatacaaccaagacagccagcaaatgataatgttatgaacacaagcagagcttcttacccttgtgagaactatgaaactgaaagaagaggattagggaaagaactctgggggatcctcaagttacaatgggtagttcaatggtagtggatggctcatttgtatcatctatgtcctctgataactcagtcgaagaaagcagctttcaacaactgcaggatgctgttagtcagctggatgtgcaaaccaaattgtgcatcagggatggtttataccgattggcacgaagtgcgcaacatagacaagtttttccaaatacgatgaacagcaatggtggtagcgaggacggaaaggaactggagaacgcagaaacttcgtgcaagttcatggaccctcggagcatcgagacgcagacaaacccgatcgatcggtctatagctctgctacttttccgcgagtcatctggcggccatgtccatgtggctgtagcagccgacgatgcctcgtcactgaaatcccctgctggtgtatgatttcctgcctgccacatctcagttccagggccctgctgctaacccaggatgtttctaggcatgtatgtaaaaaaaaaaacaagcgtattgtgtagccaatagtctgtactctgtagtcacattaattttgtcatgcttgtatcctattgctagacggccgatgtgctaacctagtgctgttgactcaaattttatgcgtaatctaaaaaaaattatttcttttcg

SEQ ID NO: 80806 - DNA, 2051 bp, Zea Mays
cttgcctcctttgcggggctgggaaccttgagttcctcctatctgttcttgggttaagaggcgtttttacccccccttcgtttctggcgactggtttctggtggtcgttagttggtcaagaactggggatactgagttgaatatgatctcaaatccggtggactggtatagtttcggacccggatagaattggtagggatgcaagattggagggtgcgtgagttcgaaggtaaattcactgatgagtttgcccacagcagtagcaacgaacataaaggtggagttgaggcttctggtgtcattagtagtaagaagttgaagcatgcagttgctaatgagaaaatccaaggtgtcatccccggtacaaatagctcaggttcactgaaacgtaattcagagaacatccaacatgcgaacggggtattatcccagaatataagctgcgctggtgactacaaaaatggctccattgcctttcctttgagagaagaaaatacaataactgagaccagatgtccagatgataactggaactcctgtcagtttgcactgaacaatggttcgtccattctcaataaccacagtgctccccaggatagcctcacttatggagataatgatctaaactacatcgaatggcctggcattgacaattttgaggatgtcgatacattattcaggagttctgattcaacatatggtcagcagcagctggagaatgcagatgggttatcttggattccgtcttcagatgctgtttactctaccgatgttgctttgcaacaagggcttgattcgtcttattcagattatggtattctggatgatctctccgcattccaatgtgcagaagataaatcactacccttggttgatccttcatcagctttatgtgataatcaattcaatgatacctacctgttcagtgaacaaaagaatgtgaatgcatatggtgaacagatataccaagaggatttgatggagttgttgcccactgaccagatatgcagcggacatgaaaacattgatatgttgcaggttggaaaccagtatccatctgaaaatgcaattcaaggtaccgaagataagaaattctctatagcgtcaacttcccagctgagttctcagaatttactgaatcaaagacaccacttagattccagttcaccaagcaatattacttcggagtcctatccaggaaagttcggtccatctagctgttcttctgcacaaagaaactcaaaagctggtgtgacacttaagtgcgcaaatgcagtgcagaagaaaactgtcaacatacaaccaagacagccagcaaatgataatgttatgaacacaagcagagcttcttacccttgtgagaactatgaaactgaaagaagaggattagggaaagaactctgggggatcctcaagttacaatgggtagttcaatggtagtggatggctcatttgtatcatctatgtcctctgataactcagtcgaagaaagcagctttcaacaactgcaggatgctgttagtcagctggatgtgcaaaccaaattgtgcatcagggatggtttataccgattggcacgaagtgcgcaacatagacaagtttttccaaatacgatgaacagcaatggtggtagcgaggacggaaaggaactggagaacgcagaaacttcgtgcaagttcatggaccctcggagcatcgagacgcagacaaacccgatcgatcggtctatagctctgctacttttccgcgagtcatctggcggccatgtccatgtggctgtagcagccgacgatgcctcgtcactgaaatcccctgctggtgtatgatttcctgcctgccacatctcagttccagggccctgctgctaacccaggatgtttctaggcatgtatgtaaaaaaaaaaacaagcgtattgtgtagccaatagtctgtactctgtagtcacattaattttgtcatgcttgtatcctattgctagacggccgatgtgctaacctagtgctgttgactcaaattttatgcgtaatctaaaaaaaattatttcttttcg

SEQ ID NO: 80807 - DNA, 2042 bp, Zea Mays
gcctcctttgcggggctgggaaccttgagttcctcctatctgttcttgggttaagaggcgtttttacccccccttcgtttctggcgactggtttctggtggtcgttagttggtcaagaactggggatactgagttgaatatgatctcaaatccggtggactggtatagtttcggacccggatagaattggtagggatgcaagattggagggtgcgtgagttcgaaggtaaattcactgatgagtttgcccacagcagtagcaacgaacataaaggtggagttgaggcttctggtgtcattagtagtaagaagttgaagcatgcagttgctaatgagaaaatccaaggtgtcatccccggtacaaatagctcaggttcactgaaacgtaattcagagaacatccaacatgcgaacggggtattatcccagaatataagctgcgctggtgactacaaaaatggctccattgcctttcctttgagagaagaaaatacaataactgagaccagatgtccagatgataactggaactcctgtcagtttgcactgaacaatggttcgtccattctcaataaccacagtgctccccaggatagcctcacttatggagataatgatctaaactacatcgaatggcctggcattgacaattttgaggatgtcgatacattattcaggagttctgattcaacatatggtcagcagcagctggagaatgcagatgggttatcttggattccgtcttcagatgctgtttactctaccgatgttgctttgcaacaagggcttgattcgtcttattcagattatggtattctggatgatctctccgcattccaatgtgcagaagataaatcactacccttggttgatccttcatcagctttatgtgataatcaattcaatgatacctacctgttcagtgaacaaaagaatgtgaatgcatatggtgaacagatataccaagaggatttgatggagttgttgcccactgaccagatatgcagcggacatgaaaacattgatatggttggaaaccagtatccatctgaaaatgcaattcaaggtaccgaagataagaaattctctatagcgtcaacttcccagctgagttctcagaatttactgaatcaaagacaccacttagattccagttcaccaagcaatattacttcggagtcctatccaggaaagttcggtccatctagctgttcttctgcacaaagaaactcaaaagctggtgtgacacttaagtgcgcaaatgcagtgcagaagaaaactgtcaacatacaaccaagacagccagcaaatgataatgttatgaacacaagcagagcttcttacccttgtgagaactatgaaactgaaagaagaggattagggaaagaactctgggggatcctcaagttacaatgggtagttcaatggtagtggatggctcatttgtatcatctatgtcctctgataactcagtcgaagaaagcagctttcaacaactgcaggatgctgttagtcagctggatgtgcaaaccaaattgtgcatcagggatggtttataccgattggcacgaagtgcgcaacatagacaagtttttccaaatacgatgaacagcaatggtggtagcgaggacggaaaggaactggagaacgcagaaacttcgtgcaagttcatggaccctcggagcatcgagacgcagacaaacccgatcgatcggtctatagctctgctacttttccgcgagtcatctggcggccatgtccatgtggctgtagcagccgacgatgcctcgtcactgaaatcccctgctggtgtatgatttcctgcctgccacatctcagttccagggccctgctgctaacccaggatgtttctaggcatgtatgtaaaaaaaaaaacaagcgtattgtgtagccaatagtctgtactctgtagtcacattaattttgtcatgcttgtatcctattgctagacggccgatgtgctaacctagtgctgttgactcaaattttatgcgtaatctaaaaaaaattatttcttttcg

SEQ ID NO: 80808 - DNA, 1958 bp, Zea Mays
cacagctcttgattccggaagtagttggtcaagaactggggatactgagttgaatatgatctcaaatccggtggactggtatagtttcggacccggatagaattggtagggatgcaagattggagggtgcgtgagttcgaaggtaaattcactgatgagtttgcccacagcagtagcaacgaacataaaggtggagttgaggcttctggtgtcattagtagtaagaagttgaagcatgcagttgctaatgagaaaatccaaggtgtcatccccggtacaaatagctcaggttcactgaaacgtaattcagagaacatccaacatgcgaacggggtattatcccagaatataagctgcgctggtgactacaaaaatggctccattgcctttcctttgagagaagaaaatacaataactgagaccagatgtccagatgataactggaactcctgtcagtttgcactgaacaatggttcgtccattctcaataaccacagtgctccccaggatagcctcacttatggagataatgatctaaactacatcgaatggcctggcattgacaattttgaggatgtcgatacattattcaggagttctgattcaacatatggtcagcagcagctggagaatgcagatgggttatcttggattccgtcttcagatgctgtttactctaccgatgttgctttgcaacaagggcttgattcgtcttattcagattatggtattctggatgatctctccgcattccaatgtgcagaagataaatcactacccttggttgatccttcatcagctttatgtgataatcaattcaatgatacctacctgttcagtgaacaaaagaatgtgaatgcatatggtgaacagatataccaagaggatttgatggagttgttgcccactgaccagatatgcagcggacatgaaaacattgatatggttggaaaccagtatccatctgaaaatgcaattcaaggtaccgaagataagaaattctctatagcgtcaacttcccagctgagttctcagaatttactgaatcaaagacaccacttagattccagttcaccaagcaatattacttcggagtcctatccaggaaagttcggtccatctagctgttcttctgcacaaagaaactcaaaagctggtgtgacacttaagtgcgcaaatgcagtgcagaagaaaactgtcaacatacaaccaagacagccagcaaatgataatgttatgaacacaagcagagcttcttacccttgtgagaactatgaaactgaaagaagaggattagggaaagaactctgggggatcctcaagttacaatgggtagttcaatggtagtggatggctcatttgtatcatctatgtcctctgataactcagtcgaagaaagcagctttcaacaactgcaggatgctgttagtcagctggatgtgcaaaccaaattgtgcatcagggatggtttataccgattggcacgaagtgcgcaacatagacaagtttttccaaatacgatgaacagcaatggtggtagcgaggacggaaaggaactggagaacgcagaaacttcgtgcaagttcatggaccctcggagcatcgagacgcagacaaacccgatcgatcggtctatagctctgctacttttccgcgagtcatctggcggccatgtccatgtggctgtagcagccgacgatgcctcgtcactgaaatcccctgctggtgtatgatttcctgcctgccacatctcagttccagggccctgctgctaacccaggatgtttctaggcatgtatgtaaaaaaaaaaacaagcgtattgtgtagccaatagtctgtactctgtagtcacattaattttgtcatgcttgtatcctattgctagacggccgatgtgctaacctagtgctgttgactcaaattttatgcgtaatctaaaaaaaattatttcttttcg

SEQ ID NO: 80809 - DNA, 1957 bp, Zea Mays
cttgattccggaagtagttggtcaagaactggggatactgagttgaatatgatctcaaatccggtggactggtatagtttcggacccggatagaattggtagggatgcaagattggagggtgcgtgagttcgaaggtaaattcactgatgagtttgcccacagcagtagcaacgaacataaaggtggagttgaggcttctggtgtcattagtagtaagaagttgaagcatgcagttgctaatgagaaaatccaaggtgtcatccccggtacaaatagctcaggttcactgaaacgtaattcagagaacatccaacatgcgaacggggtattatcccagaatataagctgcgctggtgactacaaaaatggctccattgcctttcctttgagagaagaaaatacaataactgagaccagatgtccagatgataactggaactcctgtcagtttgcactgaacaatggttcgtccattctcaataaccacagtgctccccaggatagcctcacttatggagataatgatctaaactacatcgaatggcctggcattgacaattttgaggatgtcgatacattattcaggagttctgattcaacatatggtcagcagcagctggagaatgcagatgggttatcttggattccgtcttcagatgctgtttactctaccgatgttgctttgcaacaagggcttgattcgtcttattcagattatggtattctggatgatctctccgcattccaatgtgcagaagataaatcactacccttggttgatccttcatcagctttatgtgataatcaattcaatgatacctacctgttcagtgaacaaaagaatgtgaatgcatatggtgaacagatataccaagaggatttgatggagttgttgcccactgaccagatatgcagcggacatgaaaacattgatatgttgcaggttggaaaccagtatccatctgaaaatgcaattcaaggtaccgaagataagaaattctctatagcgtcaacttcccagctgagttctcagaatttactgaatcaaagacaccacttagattccagttcaccaagcaatattacttcggagtcctatccaggaaagttcggtccatctagctgttcttctgcacaaagaaactcaaaagctggtgtgacacttaagtgcgcaaatgcagtgcagaagaaaactgtcaacatacaaccaagacagccagcaaatgataatgttatgaacacaagcagagcttcttacccttgtgagaactatgaaactgaaagaagaggattagggaaagaactctgggggatcctcaagttacaatgggtagttcaatggtagtggatggctcatttgtatcatctatgtcctctgataactcagtcgaagaaagcagctttcaacaactgcaggatgctgttagtcagctggatgtgcaaaccaaattgtgcatcagggatggtttataccgattggcacgaagtgcgcaacatagacaagtttttccaaatacgatgaacagcaatggtggtagcgaggacggaaaggaactggagaacgcagaaacttcgtgcaagttcatggaccctcggagcatcgagacgcagacaaacccgatcgatcggtctatagctctgctacttttccgcgagtcatctggcggccatgtccatgtggctgtagcagccgacgatgcctcgtcactgaaatcccctgctggtgtatgatttcctgcctgccacatctcagttccagggccctgctgctaacccaggatgtttctaggcatgtatgtaaaaaaaaaaacaagcgtattgtgtagccaatagtctgtactctgtagtcacattaattttgtcatgcttgtatcctattgctagacggccgatgtgctaacctagtgctgttgactcaaattttatgcgtaatctaaaaaaaattatttcttttcg

SEQ ID NO: 80810 - DNA, 1973 bp, Zea Mays
gtgagatgtatgcgtcacaagctttccgtgttttccagcgctgtttgatctgagcccaagtagttggtcaagaactggggatactgagttgaatatgatctcaaatccggtggactggtatagtttcggacccggatagaattggtagggatgcaagattggagggtgcgtgagttcgaaggtaaattcactgatgagtttgcccacagcagtagcaacgaacataaaggtggagttgaggcttctggtgtcattagtagtaagaagttgaagcatgcagttgctaatgagaaaatccaaggtgtcatccccggtacaaatagctcaggttcactgaaacgtaattcagagaacatccaacatgcgaacggggtattatcccagaatataagctgcgctggtgactacaaaaatggctccattgcctttcctttgagagaagaaaatacaataactgagaccagatgtccagatgataactggaactcctgtcagtttgcactgaacaatggttcgtccattctcaataaccacagtgctccccaggatagcctcacttatggagataatgatctaaactacatcgaatggcctggcattgacaattttgaggatgtcgatacattattcaggagttctgattcaacatatggtcagcagcagctggagaatgcagatgggttatcttggattccgtcttcagatgctgtttactctaccgatgttgctttgcaacaagggcttgattcgtcttattcagattatggtattctggatgatctctccgcattccaatgtgcagaagataaatcactacccttggttgatccttcatcagctttatgtgataatcaattcaatgatacctacctgttcagtgaacaaaagaatgtgaatgcatatggtgaacagatataccaagaggatttgatggagttgttgcccactgaccagatatgcagcggacatgaaaacattgatatgttgcaggttggaaaccagtatccatctgaaaatgcaattcaaggtaccgaagataagaaattctctatagcgtcaacttcccagctgagttctcagaatttactgaatcaaagacaccacttagattccagttcaccaagcaatattacttcggagtcctatccaggaaagttcggtccatctagctgttcttctgcacaaagaaactcaaaagtgcagaagaaaactgtcaacatacaaccaagacagccagcaaatgataatgttatgaacacaagcagagcttcttacccttgtgagaactatgaaactgaaagaagaggattagggaaagaactctgggggatcctcaagttacaatgggtagttcaatggtagtggatggctcatttgtatcatctatgtcctctgataactcagtcgaagaaagcagctttcaacaactgcaggatgctgttagtcagctggatgtgcaaaccaaattgtgcatcagggatggtttataccgattggcacgaagtgcgcaacatagacaagtttttccaaatacgatgaacagcaatggtggtagcgaggacggaaaggaactggagaacgcagaaacttcgtgcaagttcatggaccctcggagcatcgagacgcagacaaacccgatcgatcggtctatagctctgctacttttccgcgagtcatctggcggccatgtccatgtggctgtagcagccgacgatgcctcgtcactgaaatcccctgctggtgtatgatttcctgcctgccacatctcagttccagggccctgctgctaacccaggatgtttctaggcatgtatgtaaaaaaaaaaacaagcgtattgtgtagccaatagtctgtactctgtagtcacattaattttgtcatgcttgtatcctattgctagacggccgatgtgctaacctagtgctgttgactcaaattttatgcgtaatctaaaaaaaattatttcttttcg

SEQ ID NO: 80811 - DNA, 1949 bp, Zea Mays
aagctttccgtgttttccagcgctgtttgatctgagcccaagtagttggtcaagaactggggatactgagttgaatatgatctcaaatccggtggactggtatagtttcggacccggatagaattggtagggatgcaagattggagggtgcgtgagttcgaaggtaaattcactgatgagtttgcccacagcagtagcaacgaacataaaggtggagttgaggcttctggtgtcattagtagtaagaagttgaagcatgcagttgctaatgagaaaatccaaggtgtcatccccggtacaaatagctcaggttcactgaaacgtaattcagagaacatccaacatgcgaacggggtattatcccagaatataagctgcgctggtgactacaaaaatggctccattgcctttcctttgagagaagaaaatacaataactgagaccagatgtccagatgataactggaactcctgtcagtttgcactgaacaatggttcgtccattctcaataaccacagtgctccccaggatagcctcacttatggagataatgatctaaactacatcgaatggcctggcattgacaattttgaggatgtcgatacattattcaggagttctgattcaacatatggtcagcagcagctggagaatgcagatgggttatcttggattccgtcttcagatgctgtttactctaccgatgttgctttgcaacaagggcttgattcgtcttattcagattatggtattctggatgatctctccgcattccaatgtgcagaagataaatcactacccttggttgatccttcatcagctttatgtgataatcaattcaatgatacctacctgttcagtgaacaaaagaatgtgaatgcatatggtgaacagatataccaagaggatttgatggagttgttgcccactgaccagatatgcagcggacatgaaaacattgatatggttggaaaccagtatccatctgaaaatgcaattcaaggtaccgaagataagaaattctctatagcgtcaacttcccagctgagttctcagaatttactgaatcaaagacaccacttagattccagttcaccaagcaatattacttcggagtcctatccaggaaagttcggtccatctagctgttcttctgcacaaagaaactcaaaagtgcagaagaaaactgtcaacatacaaccaagacagccagcaaatgataatgttatgaacacaagcagagcttcttacccttgtgagaactatgaaactgaaagaagaggattagggaaagaactctgggggatcctcaagttacaatgggtagttcaatggtagtggatggctcatttgtatcatctatgtcctctgataactcagtcgaagaaagcagctttcaacaactgcaggatgctgttagtcagctggatgtgcaaaccaaattgtgcatcagggatggtttataccgattggcacgaagtgcgcaacatagacaagtttttccaaatacgatgaacagcaatggtggtagcgaggacggaaaggaactggagaacgcagaaacttcgtgcaagttcatggaccctcggagcatcgagacgcagacaaacccgatcgatcggtctatagctctgctacttttccgcgagtcatctggcggccatgtccatgtggctgtagcagccgacgatgcctcgtcactgaaatcccctgctggtgtatgatttcctgcctgccacatctcagttccagggccctgctgctaacccaggatgtttctaggcatgtatgtaaaaaaaaaaacaagcgtattgtgtagccaatagtctgtactctgtagtcacattaattttgtcatgcttgtatcctattgctagacggccgatgtgctaacctagtgctgttgactcaaattttatgcgtaatctaaaaaaaattatttcttttcg

SEQ ID NO: 80812 - DNA, 1981 bp, Zea Mays
cgtgttttccagcgctgtttgatctgagcccaagttggtcaagaactggggatactgagttgaatatgatctcaaatccggtggactggtatagtttcggacccggatagaattggtagggatgcaagattggagggtgcgtgagttcgaaggtaaattcactgatgagtttgcccacagcagtagcaacgaacataaaggtggagttgaggcttctggtgtcattagtagtaagaagttgaagcatgcagttgctaatgagaaaatccaaggtgtcatccccggtacaaatagctcaggttcactgaaacgtaattcagagaacatccaacatgcgaacggggtattatcccagaatataagctgcgctggtgactacaaaaatggctccattgcctttcctttgagagaagaaaatacaataactgagaccagatgtccagatgataactggaactcctgtcagtttgcactgaacaatggttcgtccattctcaataaccacagtgctccccaggatagcctcacttatggagataatgatctaaactacatcgaatggcctggcattgacaattttgaggatgtcgatacattattcaggagttctgattcaacatatggtcagcagcagctggagaatgcagatgggttatcttggattccgtcttcagatgctgtttactctaccgatgttgctttgcaacaagggcttgattcgtcttattcagattatggtattctggatgatctctccgcattccaatgtgcagaagataaatcactacccttggttgatccttcatcagctttatgtgataatcaattcaatgatacctacctgttcagtgaacaaaagaatgtgaatgcatatggtgaacagatataccaagaggatttgatggagttgttgcccactgaccagatatgcagcggacatgaaaacattgatatgttgcaggttggaaaccagtatccatctgaaaatgcaattcaaggtaccgaagataagaaattctctatagcgtcaacttcccagctgagttctcagaatttactgaatcaaagacaccacttagattccagttcaccaagcaatattacttcggagtcctatccaggaaagttcggtccatctagctgttcttctgcacaaagaaactcaaaagctggtgtgacacttaagtgcgcaaatgcagtgcagaagaaaactgtcaacatacaaccaagacagccagcaaatgataatgttatgaacacaagcagagcttcttacccttgtgagaactatgaaactgaaagaagaggattagggaaagaactctgggggatcctcaagttacaatgggtagttcaatggtagtggatggctcatttgtatcatctatgtcctctgataactcagtcgaagaaagcagctttcaacaactgcaggatgctgttagtcagctggatgtgcaaaccaaattgtgcatcagggatggtttataccgattggcacgaagtgcgcaacatagacaagtttttccaaatacgatgaacagcaatggtggtagcgaggacggaaaggaactggagaacgcagaaacttcgtgcaagttcatggaccctcggagcatcgagacgcagacaaacccgatcgatcggtctatagctctgctacttttccgcgagtcatctggcggccatgtccatgtggctgtagcagccgacgatgcctcgtcactgaaatcccctgctggtgtatgatttcctgcctgccacatctcagttccagggccctgctgctaacccaggatgtttctaggcatgtatgtaaaaaaaaaaacaagcgtattgtgtagccaatagtctgtactctgtagtcacattaattttgtcatgcttgtatcctattgctagacggccgatgtgctaacctagtgctgttgactcaaattttatgcgtaatctaaaaaaaattatttcttttcaaaaaaaa

SEQ ID NO: 80813 - DNA, 2922 bp, Zea Mays
cagatgttgctatcttgtgctgggagcactgacgtcctccgctgtgcctgttgcgtgtcaggtccaactcccgaaagccacaagaagtccgcaaggcgacatcattttattttttattttattttatctgtttcgtgatgggctgatggcgggtcaaggttgaagccatcaaggcaacgtacgcctaggagtggagacgacgagagtggaggagggctgctgatgggcggaggagacgaccggagagcggcggcgctccagcgatcctcgtcgccatggagcgtgggcgagcggtggcgggcgcacgccgggatggtcctcgtcatgctcgcctacagcggttaccacgtcctcgccaagtccgtcctcaacgtgggcatgaaccaggtcgtcttctgcgtctaccgcgacctcctcgcgctcctcgtcgtcgcccccgtcgccttcctccgcgagagaagggttaggcctcccgtgacgcctcagctcctcgcttccttcgctctgcttggcttcactgggctgtatgggaacccgctcctctgcctcgtcggcctccgctacacaaacgcctcctacgccgcggctttccagccctccataccagtgctcacgtttctcttggctgccattgtcggtgttgaagcgatcagcgtcttcaccaaggacggcatcctcaaagtcaccggcacggccgtgtgcgtctccggcgccattctgatggccctgtaccgaggcccatccttgatcgcccttcttagaagcatgcccaccgcatggacgagcgctccctaccaccctgctacccccgactggttcacaccagccgtgcccgtgctcgagcagggtgtagaagcatggcagcttggcgtcctgtgcctcataggaaactgcctcttggtggctgtctatctagtcgtgcaggctccagtgatgataaagtatcctgcgagcttatccgtgacagcttactcctattttttcgccacaacctttatggtgctaactggagtatgcgcgactagtggcttacacgagtgggcactgacaaaagccgaggtcatagctgttctgtatgctggaattgtcgcatcctgtctgagctactcgatcatgacatgggcgaacaaagttcttggaccttctctggtcgccctctacaatccactgcaaccagccttttccaccgccctctcaactgttttccttggcgacccagtttacctcggaagcgttattgggggagtctctataattgctggtctctatctggtcatctgggctcgctacaatcaagggcagcgggcgcctacggatggttgtttggaccctcttattattgtggataatccaagaatccacaagacacaagaaagtcccttcgtgtagatcctgaaaaaaatgtgtggattatccacacatttgtataggtggtcttaaaagacagtatacttctatttgttaaacttcacatatgcattcaaataaacaagtggtcaaagattgtagtgaacctaggctctaattagaattgtatgttttgtagaacatttttataggctattcacctatctctagccatctagatcctatcagtcaccctgtaaaaatccatatagtccttcaatcgttggaaacagataaggatccattttgacataaggaagatgctgaggaaactttgcaggagcgcacgactgccacgggcccacggcaactctggtctgcaaaaggccagcgagcaaatcgaatccgttggacttggacataacgcaacgcccgccgcgaaaagcactaccggcctgtgctgctgtggtagttagtttcaagcagcaatggaagccgtggtggccacgacgacaacgagggtgtccttccctctgctgcccaccgcggggaggcccctgctcccgccggtcctggcgcggccccgccgcggcttcgcctccgtctccgccacctccacatccggcgcaggcggcggcggggggcgctcatctgcaggcggctgcggcggcgacggtggaggggacgactccggtgccggcgcagccgcggccgccgcggctgtggcggctctgggtgagtccgagcagcaggaggacggcgactctgacgcaatcgtgctccatgtcgggggaatgacgtgcggcggatgtgcggacaaggtgaagcgaattctggagagccagcctgaggttgctgcagctacagttgatgtcgaaaaggccaccgctattgtgtggacgacacctgaagcgaaggctaccaaagactggcaaaaacaattggccgagaaacttgccaaccatctcacctcttgcgggttccagtctcatctgcaagacgaaggcgaggctgaacaaactgatgcttaacctcagcagtgcattacgtatgtatgactatgagtggccaggaagttttagcatggagggtccttgcatgaagcaatgtctcccacttcagaagttgttacatgcgggtctacgatgtacttcttttatttatttgtcgcagtttagttcaaaaatgaactcgcaggaagtttttatgccgttatattgttgttaaggacttgtggttgaacttcgaaacagctgaactgttgagtatcgaaggcgaactagcgataaaataaaatgatgaagtatcgtacaagcttactcctacagaaacgtttggaaagattttgagggcctgtttggtaaatgtttcttaaaaccatgattttacaatactacacttgcaattgcaattgtcatgacaatattatagttttagtcagctacaaaactaatagctattatttagatacaacattgtagtttatggtatttagataaaagctaggcatactattcaaactttaagttggagccgagtcttcaatactccaaagatactatggtatctaaaata

SEQ ID NO: 80814 - DNA, 2586 bp, Zea Mays
cagatgttgctatcttgtgctgggagcactgacgtcctccgctgtgcctgttgcgtgtcaggtccaactcccgaaagccacaagaagtccgcaaggcgacatcattttattttttattttattttatctgtttcgtgatgggctgatggcgggtcaaggttgaagccatcaaggcaacgtacgcctaggagtggagacgacgagagtggaggagggctgctgatgggcggaggagacgaccggagagcggcggcgctccagcgatcctcgtcgccatggagcgtgggcgagcggtggcgggcgcacgccgggatggtcctcgtcatgctcgcctacagcggttaccacgtcctcgccaagtccgtcctcaacgtgggcatgaaccaggtcgtcttctgcgtctaccgcgacctcctcgcgctcctcgtcgtcgcccccgtcgccttcctccgcgagagaagggttaggcctcccgtgacgcctcagctcctcgcttccttcgctctgcttggcttcactgggctgtatgggaacccgctcctctgcctcgtcggcctccgctacacaaacgcctcctacgccgcggctttccagccctccataccagtgctcacgtttctcttggctgccattgtcggtgttgaagcgatcagcgtcttcaccaaggacggcatcctcaaagtcaccggcacggccgtgtgcgtctccggcgccattctgatggccctgtaccgaggcccatccttgatcgcccttcttagaagcatgcccaccgcatggacgagcgctccctaccaccctgctacccccgactggttcacaccagccgtgcccgtgctcgagcagggtgtagaagcatggcagcttggcgtcctgtgcctcataggaaactgcctcttggtggctgtctatctagtcgtgcaggctccagtgatgataaagtatcctgcgagcttatccgtgacagcttactcctattttttcgccacaacctttatggtgctaactggagtatgcgcgactagtggcttacacgagtgggcactgacaaaagccgaggtcatagctgttctgtatgctgtgagtgactactccctctattatatgcttaattagactacaccatttgcatagcagtgatgctaagacgatctcccctctccattgtatacatatctatctatctatctatctgtcagggaattgtcgcatcctgtctgagctactcgatcatgacatgggcgaacaaagttcttggaccttctctggtcgccctctacaatccactgcaaccagccttttccaccgccctctcaactgttttccttggcgacccagtttacctcggaaggagcgcacgactgccacgggcccacggcaactctggtctgcaaaaggccagcgagcaaatcgaatccgttggacttggacataacgcaacgcccgccgcgaaaagcactaccggcctgtgctgctgtggtagttagtttcaagcagcaatggaagccgtggtggccacgacgacaacgagggtgtccttccctctgctgcccaccgcggggaggcccctgctcccgccggtcctggcgcggccccgccgcggcttcgcctccgtctccgccacctccacatccggcgcaggcggcggcggggggcgctcatctgcaggcggctgcggcggcgacggtggaggggacgactccggtgccggcgcagccgcggccgccgcggctgtggcggctctgggtgagtccgagcagcaggaggacggcgactctgacgcaatcgtgctccatgtcgggggaatgacgtgcggcggatgtgcggacaaggtgaagcgaattctggagagccagcctgaggttgctgcagctacagttgatgtcgaaaaggccaccgctattgtgtggacgacacctgaagcgaaggctaccaaagactggcaaaaacaattggccgagaaacttgccaaccatctcacctcttgcgggttccagtctcatctgcaagacgaaggcgaggctgaacaaactgatgcttaacctcagcagtgcattacgtatgtatgactatgagtggccaggaagttttagcatggagggtccttgcatgaagcaatgtctcccacttcagaagttgttacatgcgggtctacgatgtacttcttttatttatttgtcgcagtttagttcaaaaatgaactcgcaggaagtttttatgccgttatattgttgttaaggacttgtggttgaacttcgaaacagctgaactgttgagtatcgaaggcgaactagcgataaaataaaatgatgaagtatcgtacaagcttactcctacagaaacgtttggaaagattttgagggcctgtttggtaaatgtttcttaaaaccatgattttacaatactacacttgcaattgcaattgtcatgacaatattatagttttagtcagctacaaaactaatagctattatttagatacaacattgtagtttatggtatttagataaaagctaggcatactattcaaactttaagttggagccgagtcttcaatactccaaagatactatggtatctaaaata

SEQ ID NO: 80815 - DNA, 766 bp, Zea Mays
gatggcgggtcaaggttgaagccatcaaggcaacgtacgcctaggagtggagacgacgagagtggaggagggctgctgatgggcggaggagacgaccggagagcggcggcgctccagcgatcctcgtcgccatggagcgtgggcgagcggtggcgggcgcacgccgggatggtcctcgtcatgctcgcctacagcggttaccacgtcctcgccaagtccgtcctcaacgtgggcatgaaccaggtcgtcttctgcgtctaccgcgacctcctcgcgctcctcgtcgtcgcccccgtcgccttcctccgcgagagcgttattgggggagtctctataattgctggtctctatctggtcatctgggctcgctacaatcaagggcagcgggcgcctacggatggttgtttggaccctcttattattgtggataatccaagaatccacaagacacaagaaagtcccttcgtgtagatcctgaaaaaaatgtgtggattatccacacatttgtataggtggtcttaaaagacagtatacttctatttgttaaacttcacatatgcattcaaataaacaagtggtcaaagattgtagtgaacctaggctctaattagaattgtatgttttgtagaacatttttataggctattcacctatctctagccatctagatcctatcagtcaccctgtaaaaatccatatagtccttcaatcgttggaaacagataaggatccattttgacataaggaagatgctgaggaaactttg

SEQ ID NO: 80816 - DNA, 1388 bp, Zea Mays
gatggcgggtcaaggttgaagccatcaaggcaacgtacgcctaggagtggagacgacgagagtggaggagggctgctgatgggcggaggagacgaccggagagcggcggcgctccagcgatcctcgtcgccatggagcgtgggcgagcggtggcgggcgcacgccgggatggtcctcgtcatgctcgcctacagcggttaccacgtcctcgccaagtccgtcctcaacgtgggcatgaaccaggtcgtcttctgcgtctaccgcgacctcctcgcgctcctcgtcgtcgcccccgtcgccttcctccgcgagagaagggttaggcctcccgtgacgcctcagctcctcgcttccttcgctctgcttggcttcactgggctgtatgggaacccgctcctctgcctcgtcggcctccgctacacaaacgcctcctacgccgcggctttccagccctccataccagtgctcacgtttctcttggctgccattgtcggtgttgaagcgatcagcgtcttcaccaaggacggcatcctcaaagtcaccggcacggccgtgtgcgtctccggcgccattctgatggccctgtaccgaggcccatccttgatcgcccttcttagaagcatgcccaccgcatggacgagcgctccctaccaccctgctacccccgactggttcacaccagccgtgcccgtgctcgagcagggtgtagaagcatggcagcttggcgtcctgtgcctcataggaaactgcctcttggtggctgtctatctagtcgtgcaggctccagtgatgataaagtatcctgcgagcttatccgtgacagcttactcctattttttcgccacaacctttatggtgctaactggagtatgcgcgactagtggcttacacgagtgggcactgacaaaagccgaggtcatagctgttctgtatgctcgttattgggggagtctctataattgctggtctctatctggtcatctgggctcgctacaatcaagggcagcgggcgcctacggatggttgtttggaccctcttattattgtggataatccaagaatccacaagacacaagaaagtcccttcgtgtagatcctgaaaaaaatgtgtggattatccacacatttgtataggtggtcttaaaagacagtatacttctatttgttaaacttcacatatgcattcaaataaacaagtggtcaaagattgtagtgaacctaggctctaattagaattgtatgttttgtagaacatttttataggctattcacctatctctagccatctagatcctatcagtcaccctgtaaaaatccatatagtccttcaatcgttggaaacagataaggatccattttgacataaggaagatgctgaggaaactttg

SEQ ID NO: 80817 - DNA, 1172 bp, Zea Mays
acttggacataacgcaacgcccgccgcgaaaagcactaccggcctgtgctgctgtggtagttagtttcaagcagcaatggaagccgtggtggccacgacgacaacgagggtgtccttccctctgctgcccaccgcggggaggcccctgctcccgccggtcctggcgcggccccgccgcggcttcgcctccgtctccgccacctccacatccggcgcaggcggcggcggggggcgctcatctgcaggcggctgcggcggcgacggtggaggggacgactccggtgccggcgcagccgcggccgccgcggctgtggcggctctgggtgagtccgagcagcaggaggacggcgactctgacgcaatcgtgctccatgtcgggggaatgacgtgcggcggatgtgcggacaaggtgaagcgaattctggagagccagcctgaggttgctgcagctacagttgatgtcgaaaaggccaccgctattgtgtggacgacacctgaagcgaaggctaccaaagactggcaaaaacaattggccgagaaacttgccaaccatctcacctcttgcgggttccagtctcatctgcaaggtgtgaaggacgaaggcgaggctgaacaaactgatgcttaacctcagcagtgcattacgtatgtatgactatgagtggccaggaagttttagcatggagggtccttgcatgaagcaatgtctcccacttcagaagttgttacatgcgggtctacgatgtacttcttttatttatttgtcgcagtttagttcaaaaatgaactcgcaggaagtttttatgccgttatattgttgttaaggacttgtggttgaacttcgaaacagctgaactgttgagtatcgaaggcgaactagcgataaaataaaatgatgaagtatcgtacaagcttactcctacagaaacgtttggaaagattttgagggcctgtttggtaaatgtttcttaaaaccatgattttacaatactacacttgcaattgcaattgtcatgacaatattatagttttagtcagctacaaaactaatagctattatttagatacaacattgtagtttatggtatttagataaaagctaggcatactattcaaactttaagttggagccgagtcttcaatactccaaagatactatggtatctaaaata

SEQ ID NO: 80818 - DNA, 3683 bp, Zea Mays
cactgactcaccgccgcgctcgcccgccctctcgcctcgtcgtcacgtcagactcagacatcacccccacccccaccctctctctccctccgtcccgccaataaattttcccagcgcgacggcgccccgctctcccgctccgttcctcctcccttccccgaagcttcggcgccccctcgctccctccgccccgttttaagcgcgcccgcctccgaccgaccggccgccacgcgagcgaccgcttcggcaaacggggaggaggaggagtgtttgcttctctgtcttgatcggggaggcgccatggcggacacccgcaaattcgtgctgcccggccaacccccagacatctcgcagatactgcaggaggctcagaaccggtggctgcggcccaccgagatctgcgagatactgtccaactacaagctcttctccatcgccgccgagccgcccaacatgccgaggatactgaggtacttcagaaaggatggacacaactggagaaagaaaaaagatggcaagactgtcaaagaagctcatgagaaactgaaagctggcagcattgatgtactccattgctactatgcccatggagaggagaacgaaaactttcaaaggcgaacatattggctgttggaagaggatttcactcatattgttcttgtacattacctagaagtcaagggatgcaagcaaagtttcaatcgtgtgaaagaagaacttatgcagctatcgaatgtcgacagtccttcatgttcaaattccatcactagtcagaatcagatgggcccacaaaacatggaggctgctgaaagcccaataagcggacagatttcagaatatgaagacactgaatcagtgtatctaaagcgaaattcggtgcagcagataattgccgagcaagctccagataccaccctctcgctgagatgcagcagcttgtggatggagtcataacggaaaacatgttatacccttccgcatcaactgttggtagtagacaaggttatcatggtgaaatgttgccaataacagataacttagataaccgttcattttctaaccatgacatagctagaatgctcgacggcgccaacattgggctaagcgatgtttccagcactctgtttgattcagtgccattcaatgagcccttcaccaattattcagctgggttcacagagccaacactccattcttcatttgcctgcttagaggctaacgatttggacgatagctcttgtttgcagacatttacatctgaggctctatacactaaccacctcaaccagaaggaagctgatgcactgggtttcactggcatattagcatcagaggtgaacagagatagatataatgatggtagcatcaaacattcactcttgaagcagtcatcattggatctattgacgattgaggctcctggtttgaagaaaaatgacagcttttcaagatggatgagtaaagaacttgaagagctggatgcttatgtagtgaacccttcactttctcaagaccaactattcagcattctcgatgtttcaccaagttgtgcatatattggtacaaatacaaaggtttcagttactggtacattcttggtgaataaaaaacatgtggaaagtcacaggtggtcatgtatgtttggggatgttgaagtaccagctgaggttttgaccgatggcaccctacgctgctatgcaccagcacaccaatcaggaagagttccattttatgtgacctgttcaaacagggtggcttgtagtgaagtgcgagaatttgagtatcgtgattctgaagctcattacatggagacttctcgttcccaagccaatggtgtaaatgaaatgcatctacacattcgtcttgagaagctactcactttggggccagatgaccatcaaatgcttgttataagcagtggtaatgagaaatatgagataatgaatgctataaattccttaatgcttgatgggaaatggtcaaatcaagaatcttctgtcaaggaagtagtttccactgctagggtccaaagtttaaagaaactggtgaaagagaagctgcatcaatggctcatctgcaaagtaaacgatgatggaaagggtcccaatgttctgtgcaaggaaggacagggtgtgattcatttagtagcagcactgggttatgattgggctataagaccgataatgattgctggtgtcaatgtgaacttccgggatgctcatggatggactgcactccactgggctgcatctttgggaagagagcggacagttagtgtcctcatagcaaatggagctgcagcaggagcactaaccgatccaacttctgagttcccttctggaagaagtccagctgatttagcttcagtaaatggacacaaggggattgctggttttctcgcagaatctgctttgacaagccatctgtcagcacttactattagggaatcaaatgatagcactgtagaagcgtgtgggctaccatttgctgaagatctcactggcatcgattctgtccatctcgctggagagggtcctgatgctgaatcacttgaaggttctttaagtgccgtgcggaaatccactcaagctgcagctcgtatatttcaagccttcagggtggagtcattccacagaaagaaagtcgtggaatacggagatgacacctgtggattatctgatgaatgcacactttcacttgtttctcttaaaaatgtcaaaccaggacaacatgatacacatctgcattctgctgctgttcgcatacagaacaagtttcgcggatggaagggaagaaaggaatttatgatcattcgccagagaattgtcaagctacaggctcatgtacgaggacatcaagtgaggaagaactatcggaaggtagtctggtcagtcggtatcgtcgagaaggtcatactgagatggaggagaaagaggcctgggttacgcgggtttcggcccgagaaacaactagaaggtccatcgcaaatccaacctgcaaaggctgaagatgaatacgatttcttgcacgacggcagaaggcaggccgaagccaggctacagagagcacttgcccgggtgcactctatgtcacagtacccagaagcgagagagcagtaccacaggcttacaacctgcgttgctgaaatgaaacagtccaggatgatgcaggatgagatgctaagccaggcggctggtggtgcggacgatttcatggctggactggaggacttgatctgcatagatgatgccccgccccgatgtctgccattcggtgaagctgagcctttttacatcagataggcagggaggcggtttccttgctccccttttgtcagactagccctgtaaatattcttcagctagttgttcaccccgactgtttactcgctttctgctagtgtacaactataacatagtttcaatgcactgattatcggtagaataatcgcctcttatttgatatatagtttatattaattcaacgtattttatggttttatctgtaattctgcattcgtatcgagccataacagtgtgaatttgcgacatccgccatgacccaataatacaagcaccatggcggcggatctgtttgaatgcactatagccaaaccaactaagacttagtttcatagtttgagtactctagtattgaccataatctatatgtattgagttgga

SEQ ID NO: 80819 - DNA, 3651 bp, Zea Mays
ccgccctctcgcctcgtcgtcacgtcagactcagacatcacccccacccccaccctctctctccctccgtcccgccaataaattttcccagcgcgacggcgccccgctctcccgctccgttcctcctcccttccccgaagcttcggcgccccctcgctccctccgccccgttttaagcgcgcccgcctccgaccgaccggccgccacgcgagcgaccgcttcggcaaacggggaggaggaggagtgtttgcttctctgtcttgatcggggaggcgccatggcggacacccgcaaattcgtgctgcccggccaacccccagacatctcgcagatactgcaggaggctcagaaccggtggctgcggcccaccgagatctgcgagatactgtccaactacaagctcttctccatcgccgccgagccgcccaacatgccgaggagtggctctctttttctatttgatcgcaaagtactgaggtacttcagaaaggatggacacaactggagaaagaaaaaagatggcaagactgtcaaagaagctcatgagaaactgaaagctggcagcattgatgtactccattgctactatgcccatggagaggagaacgaaaactttcaaaggcgaacatattggctgttggaagaggatttcactcatattgttcttgtacattacctagaagtcaagggatgcaagcaaagtttcaatcgtgtgaaagaagaacttatgcagctatcgaatgtcgacagtccttcatgttcaaattccatcactagtcagaatcagatgggcccacaaaacatggaggctgctgaaagcccaataagcggacagatttcagaatatgaagacactgaatcagtgtatctaaagcgaaattcggtgcagcagataattgccgagcaagctccagataccaccctctcgctgagatgcagcagcttgtggatggagtcataacggaaaacatgttatacccttccgcatcaactgttggtagtagacaaggttatcatggtgaaatgttgccaataacagataacttagataaccgttcattttctaaccatgacatagctagaatgctcgacggcgccaacattgggctaagcgatgtttccagcactctgtttgattcagtgccattcaatgagcccttcaccaattattcagctgggttcacagagccaacactccattcttcatttgcctgcttagaggctaacgatttggacgatagctcttgtttgcagacatttacatctgaggctctatacactaaccacctcaaccagaaggaagctgatgcactgggtttcactggcatattagcatcagaggtgaacagagatagatataatgatggtagcatcaaacattcactcttgaagcagtcatcattggatctattgacgattgaggctcctggtttgaagaaaaatgacagcttttcaagatggatgagtaaagaacttgaagagctggatgcttatgtagtgaacccttcactttctcaagaccaactattcagcattctcgatgtttcaccaagttgtgcatatattggtacaaatacaaaggtttcagttactggtacattcttggtgaataaaaaacatgtggaaagtcacaggtggtcatgtatgtttggggatgttgaagtaccagctgaggttttgaccgatggcaccctacgctgctatgcaccagcacaccaatcaggaagagttccattttatgtgacctgttcaaacagggtggcttgtagtgaagtgcgagaatttgagtatcgtgattctgaagctcattacatggagacttctcgttcccaagccaatggtgtaaatgaaatgcatctacacattcgtcttgagaagctactcactttggggccagatgaccatcaaatgcttgctataaattccttaatgcttgatgggaaatggtcaaatcaagaatcttctgtcaaggaagtagtttccactgctagggtccaaagtttaaagaaactggtgaaagagaagctgcatcaatggctcatctgcaaagtaaacgatgatggaaagggtcccaatgttctgtgcaaggaaggacagggtgtgattcatttagtagcagcactgggttatgattgggctataagaccgataatgattgctggtgtcaatgtgaacttccgggatgctcatggatggactgcactccactgggctgcatctttgggaagagagcggacagttagtgtcctcatagcaaatggagctgcagcaggagcactaaccgatccaacttctgagttcccttctggaagaagtccagctgatttagcttcagtaaatggacacaaggggattgctggttttctcgcagaatctgctttgacaagccatctgtcagcacttactattagggaatcaaatgatagcactgtagaagcgtgtgggctaccatttgctgaagatctcactggcatcgattctgtccatctcgctggagagggtcctgatgctgaatcacttgaaggttctttaagtgccgtgcggaaatccactcaagctgcagctcgtatatttcaagccttcagggtggagtcattccacagaaagaaagtcgtggaatacggagatgacacctgtggattatctgatgaatgcacactttcacttgtttctcttaaaaatgtcaaaccaggacaacatgatacacatctgcattctgctgctgttcgcatacagaacaagtttcgcggatggaagggaagaaaggaatttatgatcattcgccagagaattgtcaagctacaggctcatgtacgaggacatcaagtgaggaagaactatcggaaggtagtctggtcagtcggtatcgtcgagaaggtcatactgagatggaggagaaagaggcctgggttacgcgggtttcggcccgagaaacaactagaaggtccatcgcaaatccaacctgcaaaggctgaagatgaatacgatttcttgcacgacggcagaaggcaggccgaagccaggctacagagagcacttgcccgggtgcactctatgtcacagtacccagaagcgagagagcagtaccacaggcttacaacctgcgttgctgaaatgaaacagtccaggatgatgcaggatgagatgctaagccaggcggctggtggtgcggacgatttcatggctggactggaggacttgatctgcatagatgatgccccgccccgatgtctgccattcggtgaagctgagcctttttacatcagataggcagggaggcggtttccttgctccccttttgtcagactagccctgtaaatattcttcagctagttgttcaccccgactgtttactcgctttctgctagtgtacaactataacatagtttcaatgcactgattatcggtagaataatcgcctcttatttgatatatagtttatattaattcaacgtattttatggttttatctgtaattctgcattcgtatcgagccataacagtgtgaatttgcgacatccgccatgacccaataatacaagcaccatggcggcggatctgtttgaatgcactatagccaaaccaactaagacttagtttcatagtttgagtactctagtattgaccataatctatatgtattgagttgga

SEQ ID NO: 80820 - DNA, 3703 bp, Zea Mays
ccgccctctcgcctcgtcgtcacgtcagactcagacatcacccccacccccaccctctctctccctccgtcccgccaataaattttcccagcgcgacggcgccccgctctcccgctccgttcctcctcccttccccgaagcttcggcgccccctcgctccctccgccccgttttaagcgcgcccgcctccgaccgaccggccgccacgcgagcgaccgcttcggcaaacggggaggaggaggagtgtttgcttctctgtcttgatcggggaggcgccatggcggacacccgcaaattcgtgctgcccggccaacccccagacatctcgcagatactgcaggaggctcagaaccggtggctgcggcccaccgagatctgcgagatactgtccaactacaagctcttctccatcgccgccgagccgcccaacatgccgaggagtggctctctttttctatttgatcgcaaagtactgaggtacttcagaaaggatggacacaactggagaaagaaaaaagatggcaagactgtcaaagaagctcatgagaaactgaaagctggcagcattgatgtactccattgctactatgcccatggagaggagaacgaaaactttcaaaggcgaacatattggctgttggaagaggatttcactcatattgttcttgtacattacctagaagtcaagggatgcaagcaaagtttcaatcgtgtgaaagaagaacttatgcagctatcgaatgtcgacagtccttcatgttcaaattccatcactagtcagaatcagatgggcccacaaaacatggaggctgctgaaagcccaataagcggacagatttcagaatatgaagacactgaatcagtgtatctaaagcgaaattcggtgcagcagataattgccgagcaagctccagataccaccctctcgctgagatgcagcagcttgtggatggagtcataacggaaaacatgttatacccttccgcatcaactgttggtagtagacaaggttatcatggtgaaatgttgccaataacagataacttagataaccgttcattttctaaccatgacatagctagaatgctcgacggcgccaacattgggctaagcgatgtttccagcactctgtttgattcagtgccattcaatgagcccttcaccaattattcagctgggttcacagagccaacactccattcttcatttgcctgcttagaggctaacgatttggacgatagctcttgtttgcagacatttacatctgaggctctatacactaaccacctcaaccagaaggaagctgatgcactgggtttcactggcatattagcatcagaggtgaacagagatagatataatgatggtagcatcaaacattcactcttgaagcagtcatcattggatctattgacgattgaggctcctggtttgaagaaaaatgacagcttttcaagatggatgagtaaagaacttgaagaggttgttgatttggctggatgcttatgtagtgaacccttcactttctcaagaccaactattcagcattctcgatgtttcaccaagttgtgcatatattggtacaaatacaaaggtttcagttactggtacattcttggtgaataaaaaacatgtggaaagtcacaggtggtcatgtatgtttggggatgttgaagtaccagctgaggttttgaccgatggcaccctacgctgctatgcaccagcacaccaatcaggaagagttccattttatgtgacctgttcaaacagggtggcttgtagtgaagtgcgagaatttgagtatcgtgattctgaagctcattacatggagacttctcgttcccaagccaatggtgtaaatgaaatgcatctacacattcgtcttgagaagctactcactttggggccagatgaccatcaaatgcttgttataagcagtggtaatgagaaatatgagataatgaatgctataaattccttaatgcttgatgggaaatggtcaaatcaagaatcttctgtcaaggaagtagtttccactgctagggtccaaagtttaaagaaactggtgaaagagaagctgcatcaatggctcatctgcaaagtaaacgatgatggaaagggtcccaatgttctgtgcaaggaaggacagggtgtgattcatttagtagcagcactgggttatgattgggctataagaccgataatgattgctggtgtcaatgtgaacttccgggatgctcatggatggactgcactccactgggctgcatctttgggaagagagcggacagttagtgtcctcatagcaaatggagctgcagcaggagcactaaccgatccaacttctgagttcccttctggaagaagtccagctgatttagcttcagtaaatggacacaaggggattgctggttttctcgcagaatctgctttgacaagccatctgtcagcacttactattagggaatcaaatgatagcactgtagaagcgtgtgggctaccatttgctgaagatctcactggcatcgattctgtccatctcgctggagagggtcctgatgctgaatcacttgaaggttctttaagtgccgtgcggaaatccactcaagctgcagctcgtatatttcaagccttcagggtggagtcattccacagaaagaaagtcgtggaatacggagatgacacctgtggattatctgatgaatgcacactttcacttgtttctcttaaaaatgtcaaaccaggacaacatgatacacatctgcattctgctgctgttcgcatacagaacaagtttcgcggatggaagggaagaaaggaatttatgatcattcgccagagaattgtcaagctacaggctcatgtacgaggacatcaagtgaggaagaactatcggaaggtagtctggtcagtcggtatcgtcgagaaggtcatactgagatggaggagaaagaggcctgggttacgcgggtttcggcccgagaaacaactagaaggtccatcgcaaatccaacctgcaaaggctgaagatgaatacgatttcttgcacgacggcagaaggcaggccgaagccaggctacagagagcacttgcccgggtgcactctatgtcacagtacccagaagcgagagagcagtaccacaggcttacaacctgcgttgctgaaatgaaacagtccaggatgatgcaggatgagatgctaagccaggcggctggtggtgcggacgatttcatggctggactggaggacttgatctgcatagatgatgccccgccccgatgtctgccattcggtgaagctgagcctttttacatcagataggcagggaggcggtttccttgctccccttttgtcagactagccctgtaaatattcttcagctagttgttcaccccgactgtttactcgctttctgctagtgtacaactataacatagtttcaatgcactgattatcggtagaataatcgcctcttatttgatatatagtttatattaattcaacgtattttatggttttatctgtaattctgcattcgtatcgagccataacagtgtgaatttgcgacatccgccatgacccaataatacaagcaccatggcggcggatctgtttgaatgcactatagccaaaccaactaagacttagtttcatagtttgagtactctagtattgaccataatctatatgtattgagttgga

SEQ ID NO: 80821 - DNA, 3682 bp, Zea Mays
ccgccctctcgcctcgtcgtcacgtcagactcagacatcacccccacccccaccctctctctccctccgtcccgccaataaattttcccagcgcgacggcgccccgctctcccgctccgttcctcctcccttccccgaagcttcggcgccccctcgctccctccgccccgttttaagcgcgcccgcctccgaccgaccggccgccacgcgagcgaccgcttcggcaaacggggaggaggaggagtgtttgcttctctgtcttgatcggggaggcgccatggcggacacccgcaaattcgtgctgcccggccaacccccagacatctcgcagatactgcaggaggctcagaaccggtggctgcggcccaccgagatctgcgagatactgtccaactacaagctcttctccatcgccgccgagccgcccaacatgccgaggagtggctctctttttctatttgatcgcaaagtactgaggtacttcagaaaggatggacacaactggagaaagaaaaaagatggcaagactgtcaaagaagctcatgagaaactgaaagctggcagcattgatgtactccattgctactatgcccatggagaggagaacgaaaactttcaaaggcgaacatattggctgttggaagaggatttcactcatattgttcttgtacattacctagaagtcaagggatgcaagcaaagtttcaatcgtgtgaaagaagaacttatgcagctatcgaatgtcgacagtccttcatgttcaaattccatcactagtcagaatcagatgggcccacaaaacatggaggctgctgaaagcccaataagcggacagatttcagaatatgaagacactgaatcagtgtatctaaagcgaaattcggtgcagcagataattgccgagcaagctccagataccaccctctcgctgagatgcagcagcttgtggatggagtcataacggaaaacatgttatacccttccgcatcaactgttggtagtagacaaggttatcatggtgaaatgttgccaataacagataacttagataaccgttcattttctaaccatgacatagctagaatgctcgacggcgccaacattgggctaagcgatgtttccagcactctgtttgattcagtgccattcaatgagcccttcaccaattattcagctgggttcacagagccaacactccattcttcatttgcctgcttagaggctaacgatttggacgatagctcttgtttgcagacatttacatctgaggctctatacactaaccacctcaaccagaaggaagctgatgcactgggtttcactggcatattagcatcagagagatagatataatgatggtagcatcaaacattcactcttgaagcagtcatcattggatctattgacgattgaggctcctggtttgaagaaaaatgacagcttttcaagatggatgagtaaagaacttgaagagctggatgcttatgtagtgaacccttcactttctcaagaccaactattcagcattctcgatgtttcaccaagttgtgcatatattggtacaaatacaaaggtttcagttactggtacattcttggtgaataaaaaacatgtggaaagtcacaggtggtcatgtatgtttggggatgttgaagtaccagctgaggttttgaccgatggcaccctacgctgctatgcaccagcacaccaatcaggaagagttccattttatgtgacctgttcaaacagggtggcttgtagtgaagtgcgagaatttgagtatcgtgattctgaagctcattacatggagacttctcgttcccaagccaatggtgtaaatgaaatgcatctacacattcgtcttgagaagctactcactttggggccagatgaccatcaaatgcttgttataagcagtggtaatgagaaatatgagataatgaatgctataaattccttaatgcttgatgggaaatggtcaaatcaagaatcttctgtcaaggaagtagtttccactgctagggtccaaagtttaaagaaactggtgaaagagaagctgcatcaatggctcatctgcaaagtaaacgatgatggaaagggtcccaatgttctgtgcaaggaaggacagggtgtgattcatttagtagcagcactgggttatgattgggctataagaccgataatgattgctggtgtcaatgtgaacttccgggatgctcatggatggactgcactccactgggctgcatctttgggaagagagcggacagttagtgtcctcatagcaaatggagctgcagcaggagcactaaccgatccaacttctgagttcccttctggaagaagtccagctgatttagcttcagtaaatggacacaaggggattgctggttttctcgcagaatctgctttgacaagccatctgtcagcacttactattagggaatcaaatgatagcactgtagaagcgtgtgggctaccatttgctgaagatctcactggcatcgattctgtccatctcgctggagagggtcctgatgctgaatcacttgaaggttctttaagtgccgtgcggaaatccactcaagctgcagctcgtatatttcaagccttcagggtggagtcattccacagaaagaaagtcgtggaatacggagatgacacctgtggattatctgatgaatgcacactttcacttgtttctcttaaaaatgtcaaaccaggacaacatgatacacatctgcattctgctgctgttcgcatacagaacaagtttcgcggatggaagggaagaaaggaatttatgatcattcgccagagaattgtcaagctacaggctcatgtacgaggacatcaagtgaggaagaactatcggaaggtagtctggtcagtcggtatcgtcgagaaggtcatactgagatggaggagaaagaggcctgggttacgcgggtttcggcccgagaaacaactagaaggtccatcgcaaatccaacctgcaaaggctgaagatgaatacgatttcttgcacgacggcagaaggcaggccgaagccaggctacagagagcacttgcccgggtgcactctatgtcacagtacccagaagcgagagagcagtaccacaggcttacaacctgcgttgctgaaatgaaacagtccaggatgatgcaggatgagatgctaagccaggcggctggtggtgcggacgatttcatggctggactggaggacttgatctgcatagatgatgccccgccccgatgtctgccattcggtgaagctgagcctttttacatcagataggcagggaggcggtttccttgctccccttttgtcagactagccctgtaaatattcttcagctagttgttcaccccgactgtttactcgctttctgctagtgtacaactataacatagtttcaatgcactgattatcggtagaataatcgcctcttatttgatatatagtttatattaattcaacgtattttatggttttatctgtaattctgcattcgtatcgagccataacagtgtgaatttgcgacatccgccatgacccaataatacaagcaccatggcggcggatctgtttgaatgcactatagccaaaccaactaagacttagtttcatagtttgagtactctagtattgaccataatctatatgtattgagttgga

SEQ ID NO: 80822 - DNA, 3622 bp, Zea Mays
ccgccctctcgcctcgtcgtcacgtcagactcagacatcacccccacccccaccctctctctccctccgtcccgccaataaattttcccagcgcgacggcgccccgctctcccgctccgttcctcctcccttccccgaagcttcggcgccccctcgctccctccgccccgttttaagcgcgcccgcctccgaccgaccggccgccacgcgagcgaccgcttcggcaaacggggaggaggaggagtgtttgcttctctgtcttgatcggggaggcgccatggcggacacccgcaaattcgtgctgcccggccaacccccagacatctcgcagatactgcaggaggctcagaaccggtggctgcggcccaccgagatctgcgagatactgtccaactacaagctcttctccatcgccgccgagccgcccaacatgccgaggagtggctctctttttctatttgatcgcaaagtactgaggtacttcagaaaggatggacacaactggagaaagaaaaaagatggcaagactgtcaaagaagctcatgagaaactgaaagctggcagcattgatgtactccattgctactatgcccatggagaggagaacgaaaactttcaaaggcgaacatattggctgttggaagaggatttcactcatattgttcttgtacattacctagaagtcaagggatgcaagcaaagtttcaatcgtgtgaaagaagaacttatgcagctatcgaatgtcgacagtccttcatgttcaaattccatcactagtcagaatcagatgggcccacaaaacatggaggctgctgaaagcccaataagcggacagatttcagaatatgaagacactgaatcagataattgccgagcaagctccagataccaccctctcgctgagatgcagcagcttgtggatggagtcataacggaaaacatgttatacccttccgcatcaactgttggtagtagacaaggttatcatggtgaaatgttgccaataacagataacttagataaccgttcattttctaaccatgacatagctagaatgctcgacggcgccaacattgggctaagcgatgtttccagcactctgtttgattcagtgccattcaatgagcccttcaccaattattcagctgggttcacagagccaacactccattcttcatttgcctgcttagaggctaacgatttggacgatagctcttgtttgcagacatttacatctgaggctctatacactaaccacctcaaccagaaggaagctgatgcactgggtttcactggcatattagcatcagaggtgaacagagatagatataatgatggtagcatcaaacattcactcttgaagcagtcatcattggatctattgacgattgaggctcctggtttgaagaaaaatgacagcttttcaagatggatgagtaaagaacttgaagagctggatgcttatgtagtgaacccttcactttctcaagaccaactattcagcattctcgatgtttcaccaagttgtgcatatattggtacaaatacaaaggtttcagttactggtacattcttggtgaataaaaaacatgtggaaagtcacaggtggtcatgtatgtttggggatgttgaagtaccagctgaggttttgaccgatggcaccctacgctgctatgcaccagcacaccaatcaggaagagttccattttatgtgacctgttcaaacagggtggcttgtagtgaagtgcgagaatttgagtatcgtgattctgaagctcattacatggagacttctcgttcccaagccaatggtgtaaatgaaatgcatctacacattcgtcttgagaagctactcactttggggccagatgaccatcaaatgcttgctataaattccttaatgcttgatgggaaatggtcaaatcaagaatcttctgtcaaggaagtagtttccactgctagggtccaaagtttaaagaaactggtgaaagagaagctgcatcaatggctcatctgcaaagtaaacgatgatggaaagggtcccaatgttctgtgcaaggaaggacagggtgtgattcatttagtagcagcactgggttatgattgggctataagaccgataatgattgctggtgtcaatgtgaacttccgggatgctcatggatggactgcactccactgggctgcatctttgggaagagagcggacagttagtgtcctcatagcaaatggagctgcagcaggagcactaaccgatccaacttctgagttcccttctggaagaagtccagctgatttagcttcagtaaatggacacaaggggattgctggttttctcgcagaatctgctttgacaagccatctgtcagcacttactattagggaatcaaatgatagcactgtagaagcgtgtgggctaccatttgctgaagatctcactggcatcgattctgtccatctcgctggagagggtcctgatgctgaatcacttgaaggttctttaagtgccgtgcggaaatccactcaagctgcagctcgtatatttcaagccttcagggtggagtcattccacagaaagaaagtcgtggaatacggagatgacacctgtggattatctgatgaatgcacactttcacttgtttctcttaaaaatgtcaaaccaggacaacatgatacacatctgcattctgctgctgttcgcatacagaacaagtttcgcggatggaagggaagaaaggaatttatgatcattcgccagagaattgtcaagctacaggctcatgtacgaggacatcaagtgaggaagaactatcggaaggtagtctggtcagtcggtatcgtcgagaaggtcatactgagatggaggagaaagaggcctgggttacgcgggtttcggcccgagaaacaactagaaggtccatcgcaaatccaacctgcaaaggctgaagatgaatacgatttcttgcacgacggcagaaggcaggccgaagccaggctacagagagcacttgcccgggtgcactctatgtcacagtacccagaagcgagagagcagtaccacaggcttacaacctgcgttgctgaaatgaaacagtccaggatgatgcaggatgagatgctaagccaggcggctggtggtgcggacgatttcatggctggactggaggacttgatctgcatagatgatgccccgccccgatgtctgccattcggtgaagctgagcctttttacatcagataggcagggaggcggtttccttgctccccttttgtcagactagccctgtaaatattcttcagctagttgttcaccccgactgtttactcgctttctgctagtgtacaactataacatagtttcaatgcactgattatcggtagaataatcgcctcttatttgatatatagtttatattaattcaacgtattttatggttttatctgtaattctgcattcgtatcgagccataacagtgtgaatttgcgacatccgccatgacccaataatacaagcaccatggcggcggatctgtttgaatgcactatagccaaaccaactaagacttagtttcatagtttgagtactctagtattgaccataatctatatgtattgagttgga

SEQ ID NO: 80823 - DNA, 3625 bp, Zea Mays
ccgccctctcgcctcgtcgtcacgtcagactcagacatcacccccacccccaccctctctctccctccgtcccgccaataaattttcccagcgcgacggcgccccgctctcccgctccgttcctcctcccttccccgaagcttcggcgccccctcgctccctccgccccgttttaagcgcgcccgcctccgaccgaccggccgccacgcgagcgaccgcttcggcaaacggggaggaggaggagtgtttgcttctctgtcttgatcggggaggcgccatggcggacacccgcaaattcgtgctgcccggccaacccccagacatctcgcagatactgcaggaggctcagaaccggtggctgcggcccaccgagatctgcgagatactgtccaactacaagctcttctccatcgccgccgagccgcccaacatgccgaggagtggctctctttttctatttgatcgcaaagtactgaggtacttcagaaaggatggacacaactggagaaagaaaaaagatggcaagactgtcaaagaagctcatgagaaactgaaagctggcagcattgatgtactccattgctactatgcccatggagaggagaacgaaaactttcaaaggcgaacatattggctgttggaagaggatttcactcatattgttcttgtacattacctagaagtcaagggatgcaagcaaagtttcaatcgtgtgaaagaagaacttatgcagctatcgaatgtcgacagtccttcatgttcaaattccatcactagtcagaatcagatgggcccacaaaacatggaggctgctgaaagcccaataagcggacagatttcagaatatgaagacactgaatcagcagataattgccgagcaagctccagataccaccctctcgctgagatgcagcagcttgtggatggagtcataacggaaaacatgttatacccttccgcatcaactgttggtagtagacaaggttatcatggtgaaatgttgccaataacagataacttagataaccgttcattttctaaccatgacatagctagaatgctcgacggcgccaacattgggctaagcgatgtttccagcactctgtttgattcagtgccattcaatgagcccttcaccaattattcagctgggttcacagagccaacactccattcttcatttgcctgcttagaggctaacgatttggacgatagctcttgtttgcagacatttacatctgaggctctatacactaaccacctcaaccagaaggaagctgatgcactgggtttcactggcatattagcatcagaggtgaacagagatagatataatgatggtagcatcaaacattcactcttgaagcagtcatcattggatctattgacgattgaggctcctggtttgaagaaaaatgacagcttttcaagatggatgagtaaagaacttgaagagctggatgcttatgtagtgaacccttcactttctcaagaccaactattcagcattctcgatgtttcaccaagttgtgcatatattggtacaaatacaaaggtttcagttactggtacattcttggtgaataaaaaacatgtggaaagtcacaggtggtcatgtatgtttggggatgttgaagtaccagctgaggttttgaccgatggcaccctacgctgctatgcaccagcacaccaatcaggaagagttccattttatgtgacctgttcaaacagggtggcttgtagtgaagtgcgagaatttgagtatcgtgattctgaagctcattacatggagacttctcgttcccaagccaatggtgtaaatgaaatgcatctacacattcgtcttgagaagctactcactttggggccagatgaccatcaaatgcttgctataaattccttaatgcttgatgggaaatggtcaaatcaagaatcttctgtcaaggaagtagtttccactgctagggtccaaagtttaaagaaactggtgaaagagaagctgcatcaatggctcatctgcaaagtaaacgatgatggaaagggtcccaatgttctgtgcaaggaaggacagggtgtgattcatttagtagcagcactgggttatgattgggctataagaccgataatgattgctggtgtcaatgtgaacttccgggatgctcatggatggactgcactccactgggctgcatctttgggaagagagcggacagttagtgtcctcatagcaaatggagctgcagcaggagcactaaccgatccaacttctgagttcccttctggaagaagtccagctgatttagcttcagtaaatggacacaaggggattgctggttttctcgcagaatctgctttgacaagccatctgtcagcacttactattagggaatcaaatgatagcactgtagaagcgtgtgggctaccatttgctgaagatctcactggcatcgattctgtccatctcgctggagagggtcctgatgctgaatcacttgaaggttctttaagtgccgtgcggaaatccactcaagctgcagctcgtatatttcaagccttcagggtggagtcattccacagaaagaaagtcgtggaatacggagatgacacctgtggattatctgatgaatgcacactttcacttgtttctcttaaaaatgtcaaaccaggacaacatgatacacatctgcattctgctgctgttcgcatacagaacaagtttcgcggatggaagggaagaaaggaatttatgatcattcgccagagaattgtcaagctacaggctcatgtacgaggacatcaagtgaggaagaactatcggaaggtagtctggtcagtcggtatcgtcgagaaggtcatactgagatggaggagaaagaggcctgggttacgcgggtttcggcccgagaaacaactagaaggtccatcgcaaatccaacctgcaaaggctgaagatgaatacgatttcttgcacgacggcagaaggcaggccgaagccaggctacagagagcacttgcccgggtgcactctatgtcacagtacccagaagcgagagagcagtaccacaggcttacaacctgcgttgctgaaatgaaacagtccaggatgatgcaggatgagatgctaagccaggcggctggtggtgcggacgatttcatggctggactggaggacttgatctgcatagatgatgccccgccccgatgtctgccattcggtgaagctgagcctttttacatcagataggcagggaggcggtttccttgctccccttttgtcagactagccctgtaaatattcttcagctagttgttcaccccgactgtttactcgctttctgctagtgtacaactataacatagtttcaatgcactgattatcggtagaataatcgcctcttatttgatatatagtttatattaattcaacgtattttatggttttatctgtaattctgcattcgtatcgagccataacagtgtgaatttgcgacatccgccatgacccaataatacaagcaccatggcggcggatctgtttgaatgcactatagccaaaccaactaagacttagtttcatagtttgagtactctagtattgaccataatctatatgtattgagttgga

SEQ ID NO: 80824 - DNA, 3253 bp, Zea Mays
gctgtgtatatttctttggagtagctagtgatacagcttatggtggctctctttttctatttgatcgcaaagtactgaggtacttcagaaaggatggacacaactggagaaagaaaaaagatggcaagactgtcaaagaagctcatgagaaactgaaagctggcagcattgatgtactccattgctactatgcccatggagaggagaacgaaaactttcaaaggcgaacatattggctgttggaagaggatttcactcatattgttcttgtacattacctagaagtcaagggatgcaagcaaagtttcaatcgtgtgaaagaagaacttatgcagctatcgaatgtcgacagtccttcatgttcaaattccatcactagtcagaatcagatgggcccacaaaacatggaggctgctgaaagcccaataagcggacagatttcagaatatgaagacactgaatcagtgtatctaaagcgaaattcggtgcagcagataattgccgagcaagctccagataccaccctctcgctgagatgcagcagcttgtggatggagtcataacggaaaacatgttatacccttccgcatcaactgttggtagtagacaaggttatcatggtgaaatgttgccaataacagataacttagataaccgttcattttctaaccatgacatagctagaatgctcgacggcgccaacattgggctaagcgatgtttccagcactctgtttgattcagtgccattcaatgagcccttcaccaattattcagctgggttcacagagccaacactccattcttcatttgcctgcttagaggctaacgatttggacgatagctcttgtttgcagacatttacatctgaggctctatacactaaccacctcaaccagaaggaagctgatgcactgggtttcactggcatattagcatcagaggtgaacagagatagatataatgatggtagcatcaaacattcactcttgaagcagtcatcattggatctattgacgattgaggctcctggtttgaagaaaaatgacagcttttcaagatggatgagtaaagaacttgaagagctggatgcttatgtagtgaacccttcactttctcaagaccaactattcagcattctcgatgtttcaccaagttgtgcatatattggtacaaatacaaaggtttcagttactggtacattcttggtgaataaaaaacatgtggaaagtcacaggtggtcatgtatgtttggggatgttgaagtaccagctgaggttttgaccgatggcaccctacgctgctatgcaccagcacaccaatcaggaagagttccattttatgtgacctgttcaaacagggtggcttgtagtgaagtgcgagaatttgagtatcgtgattctgaagctcattacatggagacttctcgttcccaagccaatggtgtaaatgaaatgcatctacacattcgtcttgagaagctactcactttggggccagatgaccatcaaatgcttgctataaattccttaatgcttgatgggaaatggtcaaatcaagaatcttctgtcaaggaagtagtttccactgctagggtccaaagtttaaagaaactggtgaaagagaagctgcatcaatggctcatctgcaaagtaaacgatgatggaaagggtcccaatgttctgtgcaaggaaggacagggtgtgattcatttagtagcagcactgggttatgattgggctataagaccgataatgattgctggtgtcaatgtgaacttccgggatgctcatggatggactgcactccactgggctgcatctttgggaagagagcggacagttagtgtcctcatagcaaatggagctgcagcaggagcactaaccgatccaacttctgagttcccttctggaagaagtccagctgatttagcttcagtaaatggacacaaggggattgctggttttctcgcagaatctgctttgacaagccatctgtcagcacttactattagggaatcaaatgatagcactgtagaagcgtgtgggctaccatttgctgaagatctcactggcatcgattctgtccatctcgctggagagggtcctgatgctgaatcacttgaaggttctttaagtgccgtgcggaaatccactcaagctgcagctcgtatatttcaagccttcagggtggagtcattccacagaaagaaagtcgtggaatacggagatgacacctgtggattatctgatgaatgcacactttcacttgtttctcttaaaaatgtcaaaccaggacaacatgatacacatctgcattctgctgctgttcgcatacagaacaagtttcgcggatggaagggaagaaaggaatttatgatcattcgccagagaattgtcaagctacaggctcatgtacgaggacatcaagtgaggaagaactatcggaaggtagtctggtcagtcggtatcgtcgagaaggtcatactgagatggaggagaaagaggcctgggttacgcgggtttcggcccgagaaacaactagaaggtccatcgcaaatccaacctgcaaaggctgaagatgaatacgatttcttgcacgacggcagaaggcaggccgaagccaggctacagagagcacttgcccgggtgcactctatgtcacagtacccagaagcgagagagcagtaccacaggcttacaacctgcgttgctgaaatgaaacagtccaggatgatgcaggatgagatgctaagccaggcggctggtggtgcggacgatttcatggctggactggaggacttgatctgcatagatgatgccccgccccgatgtctgccattcggtgaagctgagcctttttacatcagataggcagggaggcggtttccttgctccccttttgtcagactagccctgtaaatattcttcagctagttgttcaccccgactgtttactcgctttctgctagtgtacaactataacatagtttcaatgcactgattatcggtagaataatcgcctcttatttgatatatagtttatattaattcaacgtattttatggttttatctgtaattctgcattcgtatcgagccataacagtgtgaatttgcgacatccgccatgacccaataatacaagcaccatggcggcggatctgtttgaatgcactatagccaaaccaactaagacttagtttcatagtttgagtactctagtattgaccataatctatatgtattgagttgga

SEQ ID NO: 80825 - DNA, 938 bp, Zea Mays
ccggcgctgccctctccgtccagcagtctggcgctgaagtccccaacctcctctctgctgaagccctccgctcgccgagctccgtacacgcgcgccccatctctgctggcgccctgatcttcagtcatcccccttggccggcgtcctccccatttttttacagaggacaagagttgagttgatcccaacatgaagatgatgaatgaacctgaagcttggatgatctggtcaagcaccagaatggaagatcctcatcaagtggtcgtcaattaacaacactaacatagtgtttatcccaggcaagccccggtgcatttgccacctccttgctgtttttaaacttttatcacttatctgctgcactaggtggtaggagttgaatgattaaacctttgttgcataacttctttgaactattgaataccatccttgatacctgttttaaaaagctagatgtgcttagtatgctcatagactaagaacaaaatattttgatctatgaatcatgtttttacaaagaaaagaggctggagtgatgaaggtatcaaaggccttgatgacttcatcatttcagtagggtacctctgacaggtaccaggttttcagaaataacttaatatgagaccagacgttgagcaggaaaggtcgcccgtctgtgtcgcttaaggaccgttccgattgttggcctgctgatctaggaccctttaactggccacatgcctcgtcatgggtaagcttagcctcggttggaccaataccagaaaggccggcccgcaatgggagtggagagatggcgagagtatcgtgtatccacctggcaagaggctggatggtggggtattgagctctcggttggcggggacccgttctggtattgagaaacccgtgggcgagttgacatatgcaagggttaagtgctacatatgtcgtgtggttgg

SEQ ID NO: 80826 - DNA, 958 bp, Zea Mays
ctgccctctccgtccagcagtctggcgctgaagtccccaacctcctctctgctgaagccctccgctcgccgagctccgtacacgcgcgccccatctctgctggcgccctgatcttcagtcatcccccttggccggcgtcctccccatttttttacaggttcgttaattgatcacgtgatgcagaggacaagagttgagttgatcccaacatgaagatgatgaatgaacctgaagcttggatgatctggtcaagcaccagaatggaagatcctcatcaagtggtcgtcaattaacaacactaacatagtgtttatcccaggcaagccccggtgcatttgccacctccttgctgtttttaaacttttatcacttatctgctgcactaggtggtaggagttgaatgattaaacctttgttgcataacttctttgaactattgaataccatccttgatacctgttttaaaaagctagatgtgcttagtatgctcatagactaagaacaaaatattttgatctatgaatcatgtttttacaaagaaaagaggctggagtgatgaaggtatcaaaggccttgatgacttcatcatttcagtagggtacctctgacaggtaccaggttttcagaaataacttaatatgagaccagacgttgagcaggaaaggtcgcccgtctgtgtcgcttaaggaccgttccgattgttggcctgctgatctaggaccctttaactggccacatgcctcgtcatgggtaagcttagcctcggttggaccaataccagaaaggccggcccgcaatgggagtggagagatggcgagagtatcgtgtatccacctggcaagaggctggatggtggggtattgagctctcggttggcggggacccgttctggtattgagaaacccgtgggcgagttgacatatgcaagggttaagtgctacatatgtcgtgtggttgg

SEQ ID NO: 80827 - DNA, 902 bp, Zea Mays
cagcagtctggcgctgaagtccccaacctcctctctgctgaagccctccgctcgccgagctccgtacacgcgcgccccatctctgctggcgccctgatcttcagtcatcccccttggccggcgtcctccccatttttttacagattggagctgtgatcggagaagcggatgaggttcttgtgcgacgcttcctaggtgtttgatgaaatgggcaaatcgatgtttgttgtggttgctgtgaagttttgggtcgaataaaagttttggtgagccaacttcttgattatattagacatggtcaaaaggtcttctcgcttgtgcaatgtttgtgaaatggtgtatgatgttcggatagtgcataacggagttagtaatatgttaggcacatgtaaaaatgtcttgattactatggtaaatatgcatatttagtagtaattggatgcagtcgatgtttgtgccgtgataaattttatgaccaaagtgggtatcttgtgcttatgtatggtgaagtaagtcatgatactagttatgcgaggtgtatgtgtagattactagttattgttgaaatgacttgtttcatgcactaatgtaattgtatacttgagtatgacgtagactactcaatatatgtggttatataggtgggttagctctatttaatcataaggtgttagagtgttctgaatgtcaaaagcatgataagtgtagaagccaaataggagttaaattgaatgtattgctgtttagggctgcaggtacagttttcgttatgcagctagttcaatgaagcaaaccatgttttctgtagagatgatatacatataagttgtagctaacttctttatcttggttgtgtaaaaatttcatgaccataggtttagtagtttaggagttacgatttt

SEQ ID NO: 80828 - DNA, 3521 bp, Zea Mays
aattaataaaataatgttgagtatctccttcgcccctccccacctggctcctgctctacacaagcagtcaagggccataaagcgcagcaggatctccctctgcccaaaaccaaacctgcctccgcacctaccatttcctcccccaaaccaccatggacttctccgccggagggagtgggagcggcggaggaggcggaggcgccggcgacggccgggcgcaggcggagcgctggctggagatcgccgagaagctcctcgcggcgagcgacctcgtcggctgcaagcgcttcgcggagcgggcgttggaggcggacccgctcctccctggcgccgacgagatcctcgccgtcgccgacgtcctcctcgcctcccagtccatgggcccctcgggccaccaggacccgctcgccatcctccagctgccgcctggggtcaaccccgaccaggcctccgtctcccgcgcattccgccgcctcgcgctactcctcgggccccgcaacccgcaccatggcgccgagatggcgctccgcctcgtcaacgacgcctacgccttcctctccgatccgtctcgccgcccccctccgcccgccaatcccgccactggtaccccttcctcctcccactatgcggccgctcccgcccccgatccccgggagttctggacggcgtgccccttctgctgctacgtgcaccagtacccgcgtgacctggtcgggcgcgccctcaagtgccccaacgagggctgccgccgcggattcgtggcttctgagatcccgaccccacccaccgttgtgccaggcactgatatgtaccactgcgcctgggggttcttccccctcggatttcccaacgcggccgacctgggcgccaactggaagccattctacaaggcgttcccttggaacacggctcccagtggtcaaggtgctgatggtaggagccatggcaaccgtggtggcaggcaggcacagaatgacagtgctcgtggtggctcctctagaggtaggatcaagaagactaccgcccgcaagaaggtcggggcagggttgaggaggcgttctcttggtggtggtgtggagagtggcattgattcttcgatgctcgggcaggaaggctgggctggggatgaggacggtggagatggaaggaccgaggaggtgaggggaattaacataaatgaggcggcgcaagctacagacggcactggtagggttaatgttagcggtgctggtggagttgaagatatgggcaacttccatatcgatgttgatgcaaccgaggatatattggggaatttgcacaacctgcccttcctgagggtggacaatcttgggcggatgatttaactgttcttatggtttgctgtggctagaaaagtattgtatgattagccaggccgaaacagatgtctcagggactggcccttgctgttcaactgttcgttttattttaactgttccatctcctgttatgccatgttgtagttgtagacttgttgtctaccttgtacctgtagttacttagcatcagacatgggaaatttgtatctccattagatggagatcatgccctttgccttagcaaacaaacttgcggagttttatggtgatggaaataatgcttcaaagaggtgtggctggtgcttaccatgccacttttggtttcttcctggcatggtgacacaaatgttgctgagatcaagtaagtgaattatgttctgctttctgagttcgaaaactttcttggctacaaaagaactagtcttagttatgataacctgttgatttggtaatgatcattacattgttctgctgtgtgaattgatacttgatacctctgattttttttatagcctgcttagaattccatatgttacctaatgagatatattccattttccattgtttctgttaacaccaatcctaccacttttgtcattatatatttatttgattattgtgtagagatccattatcagatacacatgagttctcaaattgtttcttgatatgtcacagtataagttttctcctacagaagataggattcaatgatgacatgccacaaaaaatagttgtgattttgtccatcctactgcactgtatgttagtaccatttcaacagtatatttaaccataagaaataggttaatcccacagcagactttaatactatatgctaaataaagtgttatctttctggatcatctagtctttgaaacacatgcagagcttggtctaaatattctttgcggtagcatgtaatagaaatcattgacttgggtgtttgacatagcaagcacttgatggttttaagttactaatgttcaatttttctgagtatccatattaatgcagaaggccatagttcatttccttgtcgttatttttcactgagaaagaacaaaacattgacttcttgggggagtagacttattaccaacgttggtgtcctgttatctagtttaacctgaacctgttcttgaaaactgtgtcagaaagtcggtttgttctataatatattgtctgtgctatgagctacaataagcaagagtattttaaattagaaagcagttttctaaatgatgcaaaggcagattggtttgagattgcacatggaattcttttagtgaacatcttatcttagtcaagcagtagttaagattaactgttttacttattacccccaagaactctttgaaactcgactaactattctgtggtttctttcaggtagatgactgttttggccacccgcagtgggttgtccataccatgtcctgaaggaagcaaagtgcggttggcccagcttagtggggatatcagcagccctcccctgaagggcgaattccttttgctgttttaacccatgtttgttaggccttttattccagaaacctatgcaaaactctgctataagtttgccaagaaatgctaactgcagttgttatgttttcagcaatttcagggtaagaagatgttaacaagcaaagcaacctctctgcatttgcagggaattgcaggggaagccttctctcagtttatccctttcttagggcctctttgcatttgcagggagggcttatctcggtttatttcttcttcatactctacctgagtgggaacttttgatgctgagtttgtcttatgcctatttattttaagtcgaatgaaatatgaaggccaaatcttgactgattactagtgactatttagctcgcttactttctgaatggggccattgcattttttgatagtatgggtccgtttgaatccttggagctaacaattagttgctggctgttaaaaattagctaagatcctatttgaataccagttaatattctggctagtgtcttaccagccatctgtcacctgatcccttcgtttaaaattctaaaacgattttattttgaatatatttatttaattacatatctagacatagtgtaatatatctgttggggacttgttctcaaatgatataaattaagaacaaggcaacacaaaaagaggttaaat

SEQ ID NO: 80829 - DNA, 3015 bp, Zea Mays
gggccgcccataagagtccacacgcttgcgctgccctgccccgccctcccccgcagccgccccgcccttggcctcgcctttccttgcttccttctcgagcagagcaacagagcaggtaactctggtgggggacaatcaagaactgaacactcgacactggcacagagctctggcagcatgcggtggctcggtctatctgtcgatgtgttccgcagggggatctccttgaacctttactgccgtgtgattctgtaaatcgtctccgtggctaccggcttttccttcgcacgcctcctgattcatgagaggcttgtgaaggcactttacatcttccccacccagtcattaattggcgtcgctgttaggctgttgtggttgtttggccaaggcttttgaggagaacgggctggagtactgatggtgtggaaagcagccgctcagacgagattccgcgtgtttaagcatgagaacggaatcacagtgagggctattgcttgcttccagccgctgcaaaattgccaggccgagtacttccgccatctcctcaagcccgtgacgtagctcccctctgctctccacctgctgctgaataaacttacagccttagttttttctccatagcaactgaagtgggagaacatcccagtcgttcatcgggactttctgctggtagttctgtccggtggttgttttaatttattcatcatgggggacaagcatcgtcgattgctgagagacctcttccaatgggcccgagacacgtcacgacattggcaccaagtttcgaatcgcctgcaccgtgtccctcgcgtaagagaccttcagtcctctaccagaaggaaactcatggtcccaccgcagctcctttgcggaggagcaaggggccactggatcctgtgccggagctccaaggtagcaacgagaccaacgtaaccgacgttggagcagaagaaaccgagggtgttcacgagaacacagacgagatcgatgccctcctggactcctccgactcggacgaagggccgcacgaactcgacagggccaggaggcagcctgctgcagagaacgagacctcgagcgtcgagtcggtggccagtgccgcaggttctgcgccgccggccaagaagaggaggctcagctcttgcacggacaggtccgtcgtcgacaccgccagttcggcgaggccggaccattccgtcgagcagaagcctctcgcgagcgactgcgacgcgcagtcgtgctgcgtcggcgaggtggtggaaagcggccgccttaggttctctccgggggagggggagggggaggtggaggcagcagaaggcgacagccccgacgaccagaggcggaggagagagaggatccaagagaccgtggctgcgctgagaaacatcgtcccggggggcaccgccaaggacgccacggccgttctcgacgaagccatctgctacctgcagtatctgaagctgaaggtcaagacgctgggagctgcctccctctagcctcctggacagggagtcatctggctttctgctgttctacataagtatggagtgcaggcaggcattgggtaataaggtgaaagatgccggagaccatatcagaatttggcggtgcttcaggacacgcaccacaccaggggtgaaaacaacggggagaagggggaaaaaaaggtccaatggtgcttgctttgctgcttccccgcccgtgtaccacccccaccacaaggctctcgaacgatgctgtgggcaacgactggcgtgcagcattgcgaagagcgtcttcaaccgaagcgaggcgggtatgttttccgtcgtccatttgtggcggagcaacatggaggccaaaagatccatccaccagtcaccaccacctaatatgctgctctccagtgacagtgagctgctagtgtaagcaccatctttctgtctgggagcatggatcttccaccctaagagctgtcggtgcctgcctgtatcactcgccgtcctcaaaaaggccctcacggcacgggttggtgcaacgtatgcgctatgcaaagctagaagacatcttttgctgaccgtgatccaaagcaaagagcggcactgaccaccaaaggcaaggaaagggggggagatgggctggagcctggagtccaacaaagtgctgtgtgcctgacgtggatgagctcaaactctgagccacaccaattgcgcgggcgggcgcctttcatcatctcacgctgctttgctttctctcaaatcccgctgcatgtgccaccacactagcgtacatacgtatgtatgcttgtgtaatcgctttgacacgcctttgtacgcggtgtaatcatgtatagtcctagctttaggacggtttctctgctggatccggatgaatgagccttgctcgtcaagtgtgcgtgcgtgcgtgcgtctatagtcctgttctgttggcaatgattgtttggaggctgcatcgtcgtcgtcccgttgttgcccctcgactagaaggggattaaatcctcttctggattggtataaccgaagccgaagagtgctgctgcggcgctgccactgccggattgggaaccgctttggtccctgtagggaacggatggcgggagggattccgagtgggggcacgcgtggggagcggagcgtgcagcgaccgtcgcggcggaatgagtggcgaggcagatggagtggagccgtcgaggccgcctgctttccttcggttcgttgcgccgaggtgaggtggggccggccccaatgccaaagcggaagatggagaggactgcactgcacaggcatcatcgcactcgcatgcgcatgcgacggaacggagtgcgggccgtagtatccgccccccctcaactccctgtagcaaagcctttatagacgtgcaaaccaggtcacctggcggtggtcatacattgaaggagtcttcgaaaccattgctttacttctgtaacaccctgttttaaaggaacaaagctgggtgcatctcatacatgcgccaagaagacaacatatataa

SEQ ID NO: 80830 - DNA, 3176 bp, Zea Mays
gggccgcccataagagtccacacgcttgcgctgccctgccccgccctcccccgcagccgccccgcccttggcctcgcctttccttgcttccttctcgagcagagcaacagagcaggtgaggcagtcagcacgctcagccacacccacagagacgcggcacgcctccactcctcctccgactccgaggccagcacgccgcacgctccgcctcgcagtcgcagcccctagcctctcgcgcgtgcttcttcttcctcctcgctccgggggctcgatctggtaactctggtgggggacaatcaagaactgaacactcgacactggcacagagctctggcagcatgcggtggctcggtctatctgtcgatgtgttccgcagggggatctccttgaacctttactgccgtgtgattctgtaaatcgtctccgtggctaccggcttttccttcgcacgcctcctgattcatgagaggcttgtgaaggcactttacatcttccccacccagtcattaattggcgtcgctgttaggctgttgtggttgtttggccaaggcttttgaggagaacgggctggagtactgatggtgtggaaagcagccgctcagacgagattccgcgtgtttaagcatgagaacggaatcacagtgagggctattgcttgcttccagccgctgcaaaattgccaggccgagtacttccgccatctcctcaagcccgtgacgtagctcccctctgctctccacctgctgctgaataaacttacagccttagttttttctccatagcaactgaagtgggagaacatcccagtcgttcatcgggactttctgctggtagttctgtccggtggttgttttaatttattcatcatgggggacaagcatcgtcgattgctgagagacctcttccaatgggcccgagacacgtcacgacattggcaccaagtttcgaatcgcctgcaccgtgtccctcgcgtaagagaccttcagtcctctaccagaaggaaactcatggtcccaccgcagctcctttgcggaggagcaaggggccactggatcctgtgccggagctccaaggtagcaacgagaccaacgtaaccgacgttggagcagaagaaaccgagggtgttcacgagaacacagacgagatcgatgccctcctggactcctccgactcggacgaagggccgcacgaactcgacagggccaggaggcagcctgctgcagagaacgagacctcgagcgtcgagtcggtggccagtgccgcaggttctgcgccgccggccaagaagaggaggctcagctcttgcacggacaggtccgtcgtcgacaccgccagttcggcgaggccggaccattccgtcgagcagaagcctctcgcgagcgactgcgacgcgcagtcgtgctgcgtcggcgaggtggtggaaagcggccgccttaggttctctccgggggagggggagggggaggtggaggcagcagaaggcgacagccccgacgaccagaggcggaggagagagaggatccaagagaccgtggctgcgctgagaaacatcgtcccggggggcaccgccaaggacgccacggccgttctcgacgaagccatctgctacctgcagtatctgaagctgaaggtcaagacgctgggagctgcctccctctagcctcctggacagggagtcatctggctttctgctgttctacataagtatggagtgcaggcaggcattgggtaataaggtgaaagatgccggagaccatatcagaatttggcggtgcttcaggacacgcaccacaccaggggtgaaaacaacggggagaagggggaaaaaaaggtccaatggtgcttgctttgctgcttccccgcccgtgtaccacccccaccacaaggctctcgaacgatgctgtgggcaacgactggcgtgcagcattgcgaagagcgtcttcaaccgaagcgaggcgggtatgttttccgtcgtccatttgtggcggagcaacatggaggccaaaagatccatccaccagtcaccaccacctaatatgctgctctccagtgacagtgagctgctagtgtaagcaccatctttctgtctgggagcatggatcttccaccctaagagctgtcggtgcctgcctgtatcactcgccgtcctcaaaaaggccctcacggcacgggttggtgcaacgtatgcgctatgcaaagctagaagacatcttttgctgaccgtgatccaaagcaaagagcggcactgaccaccaaaggcaaggaaagggggggagatgggctggagcctggagtccaacaaagtgctgtgtgcctgacgtggatgagctcaaactctgagccacaccaattgcgcgggcgggcgcctttcatcatctcacgctgctttgctttctctcaaatcccgctgcatgtgccaccacactagcgtacatacgtatgtatgcttgtgtaatcgctttgacacgcctttgtacgcggtgtaatcatgtatagtcctagctttaggacggtttctctgctggatccggatgaatgagccttgctcgtcaagtgtgcgtgcgtgcgtgcgtctatagtcctgttctgttggcaatgattgtttggaggctgcatcgtcgtcgtcccgttgttgcccctcgactagaaggggattaaatcctcttctggattggtataaccgaagccgaagagtgctgctgcggcgctgccactgccggattgggaaccgctttggtccctgtagggaacggatggcgggagggattccgagtgggggcacgcgtggggagcggagcgtgcagcgaccgtcgcggcggaatgagtggcgaggcagatggagtggagccgtcgaggccgcctgctttccttcggttcgttgcgccgaggtgaggtggggccggccccaatgccaaagcggaagatggagaggactgcactgcacaggcatcatcgcactcgcatgcgcatgcgacggaacggagtgcgggccgtagtatccgccccccctcaactccctgtagcaaagcctttatagacgtgcaaaccaggtcacctggcggtggtcatacattgaaggagtcttcgaaaccattgctttacttctgtaacaccctgttttaaaggaacaaagctgggtgcatctcatacatgcgccaagaagacaacatatataa

SEQ ID NO: 80831 - DNA, 1584 bp, Zea Mays
aactcagaattgcgtgcaagctcagccttctctgcatggtttagttatgctttaatttatataagaaattatatgcacattttcaaaaacttctggagaatttgagttgcttttcatgcttacaatagattgatggagccatccacatttgatgattctatggattaccaaatccttgcgtgccttgtaactaataagacgttggcaaaagatcgctcttcatgggatcctactgatgatgaggtgcagcgtgttgttctgtctttgttggaaggttccaaggatattgatgccaataaactaaaacaatatattgccgaatttgagatgatagtcaaaaacaattgggaatgttctgaacgaattgtggcaaataaggagatgatgcttgatgtgttcgactatgtcgttgctgactttgtccccaatttttatcaggagccaacccttcgtttgccttctatttctcctagaagtaatggttgttggaccaaagagcagctgttcaagaaattgacgggccctataagtatgaaccattgtaccgaaaaacttaagaaatgtggtttttcaaaacagcaactttgggatgctatcgatatattgaaggctgatttagaattgcgtcgggtattcatcagattagaagattctgaggcaagagggtatatgattcatgccctgcgtaacagcaatgtttagctgtctgtaataaatttatcactcttatgaggtttgggatgtgaggaagaccatttcgcctgtaagggaatttgttggccattcagaaagtttcatttctctcactgctctttgtgttttccccatctaatgcttatctatatgtattcataatatatttaactccatataaaaacacagcccaaagcaagatttttttgacccaaaacagcctgctttctgttcttgtgcgtacgcaccccgcccgcgctgcagttctgactcgagtcccgttggttcctatccccgtaaggccagaacagaaataacttagagcaacttagagctcagaacagaaataactgagagccagataggaataactgaggtacgtagaacacaataactgagttgtcacaacagaataactgagtatgcacagcagaaataactgagatcctgtaggaatcacagagtagcgagaacaaaaataactgagtagggagaacagaataactgatgaataactgattagtcagcagagaataactaagtcccgagaacaaaaacaacggagcaggtataacttgaattccttctttttcgatttcccatccttctcctgctgcttcctcttccccttgcttgcgttgtgcaaaccaaacccccagttctattcattcatttggccgcctcatttttaaaacaagatgcacctctctcgcatgtactacgtatttaatctgatttgatttatcataatgtattttaagcatagacttaatttttttcagattttgccggcataggagtacatattttcaaagctaaatattaggtgcttgttggcgatagacggacccatcggtctgctcatcggcggccccgaccatcgcatcaaat

SEQ ID NO: 80832 - DNA, 1528 bp, Zea Mays
gttggacgggtgacccaccggctcgggaacggcaacccaggacggcaggcgcggcgacacatggtcggggtacagggcctggccgtggccgcctcctgctcttcgatctcacgctgcgatggagcggtacgaggtgatcagggacatcggctcgggcaacttcggggtgacaaagctcgtccgggacgtcaggaccaaggagctcttcgccgtcaagttcatcgagagagggcaaaagattgatgagcatgttcagagggagattatgaaccaccggtccctgaagcacccaaacataattagattcaaggaggtaatttctcagacatcttggaaaggaaatgttctggtacgaatttgaagttggatgattggtagctacacacgtcgtgctaactcccacgcatttggcaatagttatggaatatgctgctgggggtgagctatttgaaaggatctgcagtgcggggagatttagtgaggatgaggcaaggttcttcttccagcaactgatttcgggagtgagctattgccattccatgcaagtatgccatagagatctgaaactagaaaacactctcctagatggtagtgtcgcaccccggctcaagatctgtgatttcggttactccaagtcttctgtgctgcactctcaaccgaaatcaactgttggcacacctgcatacattgctccagaggtcctctctagaaaagagtacgatggaaaggttgctgatgtctggtcttgtggagtaacactatatgtgatgctcgtcggcgcgtatcctttcgaagaccctgatgacccgaagaacttccgcaagacgatcacgagaatactcagtgtacagtactcaattccagactacgttcgcgttacaatggagtgcggacatctgctgtctcggatatttgttggaaatcctgagcagagaataaccattcctgagatcaagaagcacccgtggttcctcaagaatctgcccatcgagatgaccgacgagtaccagcagagcatgcagttggcagacatgaacaccccggggcaaagcctggaggaggtgatggcgatcatccaggaggcgcggaagccaggggacgccatgaaccttgccgggcagctgccctgcctggggagcgtggaccttgacgacattgattttgacgatattgacgacatcgacactgagaacagcggcgacttcgtttgtgcagtgtgactgtgtgaggctcagcagggcaggagctagcttcctttggtcgttggtgtctgtagatccttgttgtgctatgcttccattcgttcctggatcagatatgttgttgtgtaaccgagaaaattggcgttgctgtggacaatagaaacagacccataaacttatgcggaaatctaccccccaaaaaagaaaaaaaatcctctgtgatctgttgaattagaacatcttggcaatggtacagcttgtattgctttagcgatctaacagtccatttaaaaaaagaatcatttgaaggatgaattttgttgtcg

SEQ ID NO: 80833 - DNA, 1848 bp, Zea Mays
gttggacgggtgacccaccggctcgggaacggcaacccaggacggcaggcgcggcgacacatggtcggggtacagggcctggccgtggccgcctcctgctcttcgatctcacgctgcgatggagcggtacgaggtgatcagggacatcggctcgggcaacttcggggtgacaaagctcgtccgggacgtcaggaccaaggagctcttcgccgtcaagttcatcgagagagggcaaaagattgatgagcatgttcagagggagattatgaaccaccggtccctgaagcacccaaacataattagattcaaggaggtaatttctcagacatcttggaaaggaaatgttctggtacgaatttgaagttggatgattggtagctacacacgtaagtgtcttcaaactgttacttttgatgcttttaaagaagaaaaatacagactttttatattctttgcctgttgaacgagatgtttgagccacacttgtgaacattgtgctggtgactgcacgttcttagaaccccattcatttaccactaatacgtatctctcattttttttaataaaggagttgtctttgtcttgtacttatctctatgacattctttccattcatcattggacacctgctttagactgattgtcaaggtctaatcatcacaaaccatttctaggttgaaaattaaagtagtacttagtttttcaggtcgtgctaactcccacgcatttggcaatagttatggaatatgctgctgggggtgagctatttgaaaggatctgcagtgcggggagatttagtgaggatgaggcaaggttcttcttccagcaactgatttcgggagtgagctattgccattccatgcaagtatgccatagagatctgaaactagaaaacactctcctagatggtagtgtcgcaccccggctcaagatctgtgatttcggttactccaagtcttctgtgctgcactctcaaccgaaatcaactgttggcacacctgcatacattgctccagaggtcctctctagaaaagagtacgatggaaaggttgctgatgtctggtcttgtggagtaacactatatgtgatgctcgtcggcgcgtatcctttcgaagaccctgatgacccgaagaacttccgcaagacgatcacgagaatactcagtgtacagtactcaattccagactacgttcgcgttacaatggagtgcggacatctgctgtctcggatatttgttggaaatcctgagcagagaataaccattcctgagatcaagaagcacccgtggttcctcaagaatctgcccatcgagatgaccgacgagtaccagcagagcatgcagttggcagacatgaacaccccggggcaaagcctggaggaggtgatggcgatcatccaggaggcgcggaagccaggggacgccatgaaccttgccgggcagctgccctgcctggggagcgtggaccttgacgacattgattttgacgatattgacgacatcgacactgagaacagcggcgacttcgtttgtgcagtgtgactgtgtgaggctcagcagggcaggagctagcttcctttggtcgttggtgtctgtagatccttgttgtgctatgcttccattcgttcctggatcagatatgttgttgtgtaaccgagaaaattggcgttgctgtggacaatagaaacagacccataaacttatgcggaaatctaccccccaaaaaagaaaaaaaatcctctgtgatctgttgaattagaacatcttggcaatggtacagcttgtattgctttagcgatctaacagtccatttaaaaaaagaatcatttgaaggatgaattttgttgtcg

SEQ ID NO: 80834 - DNA, 1263 bp, Zea Mays
gttggacgggtgacccaccggctcgggaacggcaacccaggacggcaggcgcggcgacacatggtcggggtacagggattgatgagcatgttcagagggagattatgaaccaccggtccctgaagcacccaaacataattagattcaaggagttatggaatatgctgctgggggtgagctatttgaaaggatctgcagtgcggggagatttagtgaggatgaggcaaggttcttcttccagcaactgatttcgggagtgagctattgccattccatgcaagtatgccatagagatctgaaactagaaaacactctcctagatggtagtgtcgcaccccggctcaagatctgtgatttcggttactccaagtcttctgtgctgcactctcaaccgaaatcaactgttggcacacctgcatacattgctccagaggtcctctctagaaaagagtacgatggaaaggttgctgatgtctggtcttgtggagtaacactatatgtgatgctcgtcggcgcgtatcctttcgaagaccctgatgacccgaagaacttccgcaagacgatcacgagaatactcagtgtacagtactcaattccagactacgttcgcgttacaatggagtgcggacatctgctgtctcggatatttgttggaaatcctgagcagagaataaccattcctgagatcaagaagcacccgtggttcctcaagaatctgcccatcgagatgaccgacgagtaccagcagagcatgcagttggcagacatgaacaccccggggcaaagcctggaggaggtgatggcgatcatccaggaggcgcggaagccaggggacgccatgaaccttgccgggcagctgccctgcctggggagcgtggaccttgacgacattgattttgacgatattgacgacatcgacactgagaacagcggcgacttcgtttgtgcagtgtgactgtgtgaggctcagcagggcaggagctagcttcctttggtcgttggtgtctgtagatccttgttgtgctatgcttccattcgttcctggatcagatatgttgttgtgtaaccgagaaaattggcgttgctgtggacaatagaaacagacccataaacttatgcggaaatctaccccccaaaaaagaaaaaaaatcctctgtgatctgttgaattagaacatcttggcaatggtacagcttgtattgctttagcgatctaacagtccatttaaaaaaagaatcatttgaaggatgaattttgttgtcg

SEQ ID NO: 80835 - DNA, 830 bp, Zea Mays
gttttctggcactgctgtctcgcgttctggtgattcttctctaccgcggtccatcagccacactcgctccttcgtgtattcctcctcattcacgtccccagtcacgacgccgtacgcgtagactcgacagctcacgccgtattgccctcttgatgctcgacatcgccaagtccagcgctcgcctctctagctcgactcatcggacctgccctttctcagcttgctgtctcccagccgtgtgccatgcctctgctcgacatcgactagcgtcgctagccatcgcgcccacctgctggtcgccgagtttgccgacgctcgtcagtgtcgcatccaacctcgcagagctcgacaccaccaagatcacgttactggtggatcaatcgcttggtgaaacaatttcctgaaggctggtcatcaccctgaagacttgtgaaattttatttcctcagtcttcggctcttctctgcaacaaagggtttcaaggaaggcaatcgagttcaaggaaggatataattggaccgaattaaacggatttcggcttcggtattttaatctgcatttagttaacgtaaacatggagacaaatctaatttttaaggtttaaaagaggcacagatgtgttggatgaaaacaatatcaggtatataatttaggccgaatttgatttggtgaacaatcgcaggaccagataaatttctaccagttgttaatattcgatcatttggatttgttcaggcaggatgtaaacagatcgaattaaaaccacatttgggttacgcatattattttcttgactttgaaatagtaaactaaatcggctaacaattatt

SEQ ID NO: 80836 - DNA, 798 bp, Zea Mays
gttttctggcactgctgtctcgcgttctggtgattcttctctaccgcggtccatcagccacactcgctccttcgtgtattcctcctcattcacgtccccagtcacgacgccgtacgcgtagactcgacagctcacgccgtattgccctcttgatgctcgacatcgccaagtccagcgctcgcctctctagctcgactcatcggacctgccctttctcagcttgctgtctcccagccgtgtgccatgcctctgctcgacatcgactagcgtcgctagccatcgcgcccacctgctggtcgccgagtttgccgacgctcgtcagtgtcgcatccaacctcgcagagctcgacaccaccaagatcacgttactggtggatcaatcgcttggtgaaacaatttcctgaaggctggtcatcaccctgaagacttgtgaaattttatttcctcagtcttcggctcttctctgcaacaaaggatataattggaccgaattaaacggatttcggcttcggtattttaatctgcatttagttaacgtaaacatggagacaaatctaatttttaaggtttaaaagaggcacagatgtgttggatgaaaacaatatcaggtatataatttaggccgaatttgatttggtgaacaatcgcaggaccagataaatttctaccagttgttaatattcgatcatttggatttgttcaggcaggatgtaaacagatcgaattaaaaccacatttgggttacgcatattattttcttgactttgaaatagtaaactaaatcggctaacaattatt

SEQ ID NO: 80837 - DNA, 2701 bp, Zea Mays
cggcttttaactatttcctcctctcctcccgatccagctagcctggcctcccacctcccctcccctctcttgaactgaatcccccactccgtcctccagttcgatcgcgttcgcggccccccactccgtgttccggaataagtagccggcggtttcctcaccccaggttttgcagttgctggggagtgggaaattcgtccggctccggtttggccaatgctcctgcggtttcttggagaggccgctgaagcagcagcccttgcctgagggattctccttttctcgggcggagagttcggttgcggcggaaaaaaaaaagaattctttcgtcggattggcccaagttcttggttgatccgttacaaagcccccactgtacgctgtgttagcctttttccacgcgtttctttccttactctagatccgtgtccccgcccgattatttgggggaataggcagcccatcgatcgggggaagagggatttggaggcctgacctccgatggaggtgcacgccgacgtcgatgggtccggtgtgcccctggccgtgctcctcaagcgggagctgtgcaaccagaaggtggagaggccggacattctgttcggggaggccaacaagagcaagaaaggggaggacttcacgctcctcttgcccaggtgccaccgcaccacaggcgaaggcggcggcagtggcggcggcgagaatgcaggcggcggcgacgacgacgacaccatttccgtgtttgcgatttttgatggacacaatggctctttagctgccatatacacacgggagaatctaataaacaatgtgctggctgctattcctccaaatctcacaagtgaggagtggacagctgcgttgccaagggcactagttgctggttttgtaaaaacggataaagacttccaaacaaaagctgcacgttcagggaccactgtgacttttgttataatagatggatgggttgtcactgtagcatcagttggcgattcacgatgtattctagaatctgctgaaggttcagtatattttttatcagcagatcatcgcctggatgctaatgaagaggaggtggagcgtgttacagcaagtggtggtgaagttgggagaataaatattgctgggggtgctgggattggtccgctcagatgctggccaggcggattgtgtctatcaaggtcaataggtgacattgacgtcggggaatttatagttcctgtcccacatgtgaagcaagtaaagttgtccaatgctggtgggcggcttgtcattgccagtgatggtgtgtgggatgcgctgtgttttcaagaggctctgaactacatcaggggtctaccagccgaagctgctgctaatcgaattgttaaggaagctgtcacttcaaagggattaagagatgatactacttgcatagtagttgacatactacctccagaaaagttaagccccccactaaagcgacctggaaaaggagtcatcaaaactctgttccgtcggaggccctcggatgaaatgtctgaagatcagatggacagaggatgtttagaacctgatgtcgtggaggaaatatacgaggagggctctgcaatgcttgctcgaaggttgaatataaattacccatcgggaaatatgttcaagctgcatgattgtgctgtctgccaattggagatgaaacctggtgagggcacctctgttcacggtaacatgcccaagcattcaagagttgacccctggggtggtccttttctctgttcctcctgtcaattgaaaaaggaggccatggaagggaagctacattcaagaagtatggatgtctttacccagaagctataacccgtttttattttgcactggaccataactataaccctcttttttcagattcccaatttgatgttcgacctatgcctaacagagtgacactgcgcgccctcttgcatatcgaatttaagctatggcagccattgttttctgctgcaaggatgagttcattacttttttggccaaggcagcaagattctcaatacgggagtcatttgtatagacgttcctaatttcctactcatctttcccatgaaagagcccatacagatacagtcttccaccacgatttgaagccagttgcagtacatgtgggttgctttttactaagatgcatgaagtttagaataatgtacgtagatgctaatgcatagacatggcatggtattcttagcatcattttgctaaggggtgttttgaatgcagagtaaatacttagagcatatccaagaggcactttatttttgtctctctgtttaactctctatttaatttttcataatgattacactctatatgtagcatttcacttcaacatactatctatttagttttgctagtcagatgactagccaaatttagctagtgggagagctaatttagagagtcggatagtttggcgagtcaaatagctaatctgttagaaagttattttgctgttgaatagccaaaatttagcttggcgagtcatttagctagtctcttggagatgctcttagttgactaaaaattgctagtggagttagctagctaatttgctaatggctcaactattagctagactgtttagatgtctttagctaattttaacagctaattattagctatagtgtattcaaatatcccctaaatatgacaaccatttcagaagttttct

SEQ ID NO: 80838 - DNA, 2897 bp, Zea Mays
cggcttttaactatttcctcctctcctcccgatccagctagcctggcctcccacctcccctcccctctcttgaactgaatcccccactccgtcctccagttcgatcgcgttcgcggccccccactccgtgttccggaataagtagccggcggtttcctcaccccaggttttgcagttgctggggagtgggaaattcgtccggctccggtttggccaatgctcctgcggtttcttggagaggccgctgaagcagcagcccttgcctgagggattctccttttctcgggcggagagttcggttgcggcggaaaaaaaaaagaattctttcgtcggattggcccaagttcttggttgatccgttacaaagcccccactgtacgctgtgttagcctttttccacgcgtttctttccttactctagatccgtgtccccgcccgattatttgggggaataggcagcccatcgatcgggggaagagggatttggaggcctgacctccgatggaggtgcacgccgacgtcgatgggtccggtgtgcccctggccgtgctcctcaagcgggagctgtgcaaccagaaggtggagaggccggacattctgttcggggaggccaacaagagcaagaaaggggaggacttcacgctcctcttgcccaggtgccaccgcaccacaggcgaaggcggcggcagtggcggcggcgagaatgcaggcggcggcgacgacgacgacaccatttccgtgtttgcgatttttgatggacacaatggctctttagctgccatatacacacgggagaatctaataaacaatgtgctggctgctattcctccaaatctcacaagtgaggagtggacagctgcgttgccaagggcactagttgctggttttgtaaaaacggataaagacttccaaacaaaaggagcatacagcatttgctgtttaccatggatagaggatgattttagcctcctatatatcatggagtcctcagactgtttcactgtgatgtaaactgactataatgttttcagctgcacgttcagggaccactgtgacttttgttataatagatggatgggttgtcactgtagcatcagttggcgattcacgatgtattctagaatctgctgaaggttcagtatattttttatcagcagatcatcgcctggatgctaatgaagaggaggtggagcgtgttacagcaagtggtggtgaagttgggagaataaatattgctgggggtgctgggattggtccgctcagatgctggccaggcggattgtgtctatcaaggtcaataggtgacattgacgtcggggaatttatagttcctgtcccacatgtgaagcaagtaaagttgtccaatgctggtgggcggcttgtcattgccagtgatggtgtgtgggatgcgctgtgttttcaagaggctctgaactacatcaggggtctaccagccgaagctgctgctaatcgaattgttaaggaagctgtcacttcaaagggattaagagatgatactacttgcatagtagttgacatactacctccagaaaagttaagccccccactaaagcgacctggaaaaggagtcatcaaaactctgttccgtcggaggccctcggatgaaatgtctgaagatcagatggacagaggatgtttagaacctgatgtcgtggaggaaatatacgaggagggctctgcaatgcttgctcgaaggttgaatataaattacccatcgggaaatatgttcaagctgcatgattgtgctgtctgccaattggagatgaaacctggtgagggcacctctgttcacggtaacatgcccaagcattcaagagttgacccctggggtggtccttttctctgttcctcctgtcaattgaaaaaggaggccatggaagggaagctacattcaagaaattcccaatttgatgttcgacctatgcctaagtaggcattccctggcggtttctatacattggttcatacacacaaactaccactaacaacatcattatcaaataaagtagactcgacaatatcatcttattcatcaatcaatgtctgacagaatcaggaattttcacctactacattcttatcaaatggtgcagagtgacactgcgcgccctcttgcatatcgaatttaagctatggcagccattgttttctgctgcaaggatgagttcattacttttttggccaaggcagcaagattctcaatacgggagtcatttgtatagacgttcctaatttcctactcatctttcccatgaaagagcccatacagatacagtcttccaccacgatttgaagccagttgcagtacatgtgggttgctttttactaagatgcatgaagtttagaataatgtacgtagatgctaatgcatagacatggcatggtattcttagcatcattttgctaaggggtgttttgaatgcagagtaaatacttagagcatatccaagaggcactttatttttgtctctctgtttaactctctatttaatttttcataatgattacactctatatgtagcatttcacttcaacatactatctatttagttttgctagtcagatgactagccaaatttagctagtgggagagctaatttagagagtcggatagtttggcgagtcaaatagctaatctgttagaaagttattttgctgttgaatagccaaaatttagcttggcgagtcatttagctagtctcttggagatgctcttagttgactaaaaattgctagtggagttagctagctaatttgctaatggctcaactattagctagactgtttagatgtctttagctaattttaacagctaattattagctatagtgtattcaaatatcccctaaatatgacaaccatttcagaagttttct

SEQ ID NO: 80839 - DNA, 2333 bp, Zea Mays
gttccatttggcgctagacacattcgagcgccctggaggcctggatctggttgatcacacgtggacggcggtacggagtggagcctcaactcgactcgggtccggcgctgagccgctgaccgtcgacccgaccttgccctggctcgcctcctccgctgcggcggtctggaagggatcactggatcgtagatcccactcggcaaacccaaacggccaaacctttgcttgcattcagcacccccggcgagacgccactccaactgccgggatccagccgctgcacgcggcggccaccccgccctgccggccgaccaggggggttgagagcgggcgaggcggagatgcagagcgccacgcggctgacgctgctactgtgcgcggcgtgggcggccgcgctgctgtacggcgagatgggcgcctactgggtctcctacctcgcatgctcgtggccctcgtcgtcctcctcgccgccgaataaccatgtcaaggttgctgttgttgctgacccacagcttatggatagcacctcccttggtcttccatcaagctcagttgctctccaagctgctgagttttacacggatttgaacatgagaaggtccttccagtccaccatactgccattcaaacctgatgtggtcttatttcttggtgatcactttgatggaggcccttacatgcccgatgaagagtggcaggaatcattgtttcgatttaaacatatattcggcctgaatgatcaaagaacaaagcaacagatccctatctactaccttccaggaaatcatgatattggttactcagcatttcattcagtccatcctgaggtgctcagtcggtatgaaaaagaatttggatcaagaaattatcaattttctgctgggaaggtggacttcgttgttgttgatgcccaaacacttgatggagctaaacaaagcaaagaaaggtcctcctcttgggagttcattaaaactctatctccaggtaacacatcaaacccaaaggttctgctaacacatattccactataccgacctgataactctccttgtggcccgcatcgttcttcacctgttataaatcagagggtatcttatgccgccttagaccaaggaatcacctaccaaaattatctaactaaagagacttctgaccttttgctaagcttgttgaagccgatccttgtgctctcaggccatgatcatgaccaatgcacagttgtccactccactccttttgggccagttacagagcataccctggggacaataagttggcagcaaggaaatctctatccatcttttatgctgctatctgctggacccaagttatcacaaaattcaactgatctggaacatgaggttgcaatgaacctttgctttttgcctaaacaaacccatatttatatctggtatatctgccagtttgtagtgaccatccttctcctagtcttttggccaacaaatggtctcggttctcttccttgcatgaacacattcatgagcttcatgaggtcggtgggcgccgaactgctttcaaggaccaaggaaaaagatgacgaggacgatggtgattatgatatggtttttgatgcggaaggatccatgcacctcgttaaaaaggcagtggcaaagaccccaagtgctagctcagactccagacctactggacgcggaagtgttgttgcaagggcaacagcaggaagacaccgattggagcctgattcatcgattcgtgtcgacatgggttctgagatgacatcagaagatgggggaaagttggcccgcgctggcaaatcgggagcaaggaaggtgctccaacggctgttccgtgtcattcagtctgttcttgtcattgccgctctgaatgcccccttgtacatgatgcttctcttcaaggattggattgatcgttgaaggtaatgatgataaggatctctggatttgcttcacatgaatcattccctggagatcaaaaatggtgcaataggggtccgtttgggagggcttcggctcctctgaaaatggctatggctctagctcttgtaaaggagcagtttcctcagtaattcctctgcaggagccagtgtgttttgtttttgcaagcaaaacggctccgcagttgctgctacttgttgaagccactacttgctgctaaacatggagatctgcattcaacctgctacttgctgtctgaaattgctaactgaaacctgctacttgttactatagaaactgaactgctacttgctactttgtgcaagtgcaatgcagcaaccaggtcccaacctcctaggctagctgtctatcaaggcaatgttgctgactgttgta

SEQ ID NO: 80840 - DNA, 1987 bp, Zea Mays
gttccatttggcgctagacacattcgagcgccctggaggcctggatctggttgatcacacgtggacggcggtacggagtggagcctcaactcgactcgggtccggcgctgagccgctgaccgtcgacccgaccttgccctggctcgcctcctccgctgcggcggtctggaagggatcactggatcgtagatcccactcggcaaacccaaacggccaaacctttgcttgcattcagcacccccggcgagacgccactccaactgccgggatccagccgctgcacgcggcggccaccccgccctgccggccgaccaggggggttgagagcgggcgaggcggagatgcagagcgccacgcggctgacgctgctactgtgcgcggcgtgggcggccgcgctgctgtacggcgagatgggcgcctactgggtctcctacctcgcatgctcgtggccctcgtcgtcctcctcgccgccgaataaccatgtcaaggttgctgttgttgctgacccacagcttatggatagcacctcccttggtcttccatcaagctcagttgctctccaagctgctgagttttacacggatttgaacatgagaaggtccttccagtccaccatactgccattcaaacctgatgtggtcttatttcttggtgatcactttgatggaggcccttacatgcccgatgaagagtggcaggaatcattgtttcgatttaaacatatattcggcctgaatgatcaaagaacaaagcaacagatccctatctactaccttccaggaaatcatgatattggttactcagcatttcattcagtccatcctgaggtgctcagtcggtatgaaaaagaatttggatcaagaaattatcaattttctgctgggaaggtggacttcgttgttgttgatgcccaaacacttgatggagctaaacaaagcaaagaaaggtcctcctcttgggagttcattaaaactctatctccaggtaacacatcaaacccaaaggttctgctaacacatattccactataccgacctgataactctccttgtggcccgcatcgttcttcacctgttataaatcagagggtatcttatgccgccttagaccaaggaatcacctaccaaaattatctaactaaagagacttctgaccttttgctaagcttgttgaagccgatccttgtgctctcaggccatgatcatgaccaatgcacagttgtccactccactccttttgggccagttacagagcataccctggggacaataagttggcagcaaggaaatctctatccatcttttatgctgctatctgctggacccaagttatcacaaaattcaactgatctggaacatgaggttgcaatgaacctttgctttttgcctaaacaaacccatatttatatctggtatatctgccagtttgtagtgaccatccttctcctagtcttttggccaacaaatggtctcggttctcttccttgcatgaacacattcatgagcttcatgaggtcggtgggcgccgaactgctttcaaggaccaaggaaaaagatgacgaggacgatggtgattatgatatggtttttgatgcggaaggatccatgcacctcgttaaaaaggcagtggcaaagaccccaagtgctagctcagactccagacctactggacgcggaagtgttgttgcaagggcaacagcaggaagacaccgattggagcctgattcatcgattcgtgtcgacatgggttctgagatgacatcagaagatgggggaaagttggcccgcgctggcaaatcgggagcaaggaaggtgctccaacggctgttccgtgtcattcagtctgttcttgtcattgccgctctgaatgcccccttgtacatgatgcttctcttcaaggattggattgatcgttgaagtagccagtcattcacgcttgaaatttgctgccaattgaaacttgctgctactatgcccacatgtcgagc

SEQ ID NO: 80841 - DNA, 2298 bp, Zea Mays
ctggatctggttgatcacacgtggacggcggtacggagtggagcctcaactcgactcgggtccggcgctgagccgctgaccgtcgacccgaccttgccctggctcgcctcctccgctgcggcggtctggaagggatcactggatcgtagatcccactcggcaaacccaaacggccaaacctttgcttgcattcagcacccccggcgagacgccactccaactgccgggatccagccgctgcacgcggcggccaccccgccctgccggccgaccaggggggttgagagcgggcgaggcggagatgcagagcgccacgcggctgacgctgctactgtgcgcggcgtgggcggccgcgctgctgtacggcgagatgggcgcctactgggtctcctacctcgcatgctcgtggccctcgtcgtcctcctcgccgccgaataaccatgtcaaggttgctgttgttgctgacccacagcttatggatagcacctcccttggtcttccatcaagctcagttgctctccaagctgctgagttttacacggatttgaacatgagaaggtccttccagtccaccatactgccattcaaacctgatgtggtcttatttcttggtgatcactttgatggaggcccttacatgcccgatgaagagtaaggtggcaggaatcattgtttcgatttaaacatatattcggcctgaatgatcaaagaacaaagcaacagatccctatctactaccttccaggaaatcatgatattggttactcagcatttcattcagtccatcctgaggtgctcagtcggtatgaaaaagaatttggatcaagaaattatcaattttctgctgggaaggtggacttcgttgttgttgatgcccaaacacttgatggagctaaacaaagcaaagaaaggtcctcctcttgggagttcattaaaactctatctccaggtaacacatcaaacccaaaggttctgctaacacatattccactataccgacctgataactctccttgtggcccgcatcgttcttcacctgttataaatcagagggtatcttatgccgccttagaccaaggaatcacctaccaaaattatctaactaaagagacttctgaccttttgctaagcttgttgaagccgatccttgtgctctcaggccatgatcatgaccaatgcacagttgtccactccactccttttgggccagttacagagcataccctggggacaataagttggcagcaaggaaatctctatccatcttttatgctgctatctgctggacccaagttatcacaaaattcaactgatctggaacatgaggttgcaatgaacctttgctttttgcctaaacaaacccatatttatatctggtatatctgccagtttgtagtgaccatccttctcctagtcttttggccaacaaatggtctcggttctcttccttgcatgaacacattcatgagcttcatgaggtcggtgggcgccgaactgctttcaaggaccaaggaaaaagatgacgaggacgatggtgattatgatatggtttttgatgcggaaggatccatgcacctcgttaaaaaggcagtggcaaagaccccaagtgctagctcagactccagacctactggacgcggaagtgttgttgcaagggcaacagcaggaagacaccgattggagcctgattcatcgattcgtgtcgacatgggttctgagatgacatcagaagatgggggaaagttggcccgcgctggcaaatcgggagcaaggaaggtgctccaacggctgttccgtgtcattcagtctgttcttgtcattgccgctctgaatgcccccttgtacatgatgcttctcttcaaggattggattgatcgttgaaggtaatgatgataaggatctctggatttgcttcacatgaatcattccctggagatcaaaaatggtgcaataggggtccgtttgggagggcttcggctcctctgaaaatggctatggctctagctcttgtaaaggagcagtttcctcagtaattcctctgcaggagccagtgtgttttgtttttgcaagcaaaacggctccgcagttgctgctacttgttgaagccactacttgctgctaaacatggagatctgcattcaacctgctacttgctgtctgaaattgctaactgaaacctgctacttgttactatagaaactgaactgctacttgctactttgtgcaagtgcaatgcagcaaccaggtcccaacctcctaggctagctgtctatcaaggcaatgttgctgactgttgta

SEQ ID NO: 80842 - DNA, 1133 bp, Zea Mays
aactcgactcgggtccggcgctgagccgctgaccgtcgacccgaccttgccctggctcgcctcctccgctgcggcggtctggaagggatcactggatcgtagatcccactcggcaaacccaaacggccaaacctttgcttgcattcagcacccccggcgagacgccactccaactgccgggatccagccgctgcacgcggcggccaccccgccctgccggccgaccaggggggttgagagcgggcgaggcggagatgcagagcgccacgcggctgacgctgctactgtgcgcggcgtgggcggccgcgctgctgtacggcgagatgggcgcctactgggtctcctacctcgcatgctcgtggccctcgtcgtcctcctcgccgccgaataaccatgtcaaggttgctgttgttgctgacccacagcttatggatagcacctcccttggtcttccatcaagctcagttgctctccaagctgctgagttttacacggatttgaacatgagaaggtccttccagtccaccatactgccattcaaacctgatgtggtcttatttcttggtgatcactttgatggaggcccttacatgcccgatgaagagtggcaggaatcattgtttcgatttaaacatatattcggcctgaatgatcaaagaacaaagcaacagatccctatctactaccttccaggaaatcatgatattggttactcagcatttcattcagtccatcctgaggtgctcagtcggtatgaaaaagaatttggatcaagaaattatcaattttctgctgggaaggtggacttcgttgttgttgatgcccaaacacttgatggagctaaacaaagcaaagaaaggtcctcctcttgggagttcattaaaactctatctccaggtaacacatcaaacccaaaggttctgctaacacatattccactataccgacctgataactctccttgtggcccgcatcgttcttcacctgttataaatcagagggtatcttatgccgccttagaccaaggaatcacctaccaaaattatctaactaaagagacttctgaccttttgctaagcttgttgaagccggccatgatcatgaccaatgcacagttgtccactccactcctt

SEQ ID NO: 80843 - DNA, 1929 bp, Zea Mays
aactcgactcgggtccggcgctgagccgctgaccgtcgacccgaccttgccctggctcgcctcctccgctgcggcggtctggaagggatcactggatcgtagatcccactcggcaaacccaaacggccaaacctttgcttgcattcagcacccccggcgagacgccactccaactgccgggatccagccgctgcacgcggcggccaccccgccctgccggccgaccaggggggttgagagcgggcgaggcggagatgcagagcgccacgcggctgacgctgctactgtgcgcggcgtgggcggccgcgctgctgtacggcgagatgggcgcctactgggtctcctacctcgcatgctcgtggccctcgtcgtcctcctcgccgccgaataaccatgtcaaggttgctgttgttgctgacccacagcttatggatagcacctcccttggtcttccatcaagctcagttgctctccaagctgctgagttttacacggatttgaacatgagaaggtccttccagtccaccatactgccattcaaacctgatgtggtcttatttcttggtgatcactttgatggaggcccttacatgcccgatgaagagtggcaggaatcattgtttcgatttaaacatatattcggcctgaatgatcaaagaacaaagcaacagatccctatctactaccttccaggaaatcatgatattggttactcagcatttcattcagtccatcctgagtcggtatgaaaaagaatttggatcaagaaattatcaattttctgctgggaaggtggacttcgttgttgttgatgcccaaacacttgatggagctaaacaaagcaaagaaaggtcctcctcttgggagttcattaaaactctatctccaggtaacacatcaaacccaaaggttctgctaacacatattccactataccgacctgataactctccttgtggcccgcatcgttcttcacctgttataaatcagagggtatcttatgccgccttagaccaaggaatcacctaccaaaattatctaactaaagagacttctgaccttttgctaagcttgttgaagccggtaagcttctgtttgaagagatttagattaacttatgtgcacattttaattcagctaagccttctgtagatccttgtgctctcaggccatgatcatgaccaatgcacagttgtccactccactccttttgggccagttacagagcataccctggggacaataagttggcagcaaggaaatctctatccatcttttatgctgctatctgctggacccaagttatcacaaaattcaactgatctggaacatgaggttgcaatgaacctttgctttttgcctaaacaaacccatatttatatctggtatatctgccagtttgtagtgaccatccttctcctagtcttttggccaacaaatggtctcggttctcttccttgcatgaacacattcatgagcttcatgaggtcggtgggcgccgaactgctttcaaggaccaaggaaaaagatgacgaggacgatggtgattatgatatggtttttgatgcggaaggatccatgcacctcgttaaaaaggcagtggcaaagaccccaagtgctagctcagactccagacctactggacgcggaagtgttgttgcaagggcaacagcaggaagacaccgattggagcctgattcatcgattcgtgtcgacatgggttctgagatgacatcagaagatgggggaaagttggcccgcgctggcaaatcgggagcaaggaaggtgctccaacggctgttccgtgtcattcagtctgttcttgtcattgccgctctgaatgcccccttgtacatgatgcttctcttcaaggattggattgatcgttgaagtatgtgagaatctattgtttttcagtaactcagtaga

SEQ ID NO: 80844 - DNA, 2194 bp, Zea Mays
ctcgaagcacccaggcagcttcgtgctcgtgctcgtgccgtacccgacgcatcggcgtctcctcgcgcatttcttctccccccaccccccttcctcgccgagcgcatttctccgtgagcggaagatccgatcaccacttcggcgccgcgcgtccgaaccccaacccaaccgcgctgtctatcctcctcctccctttccgcacttggtccggcgatcctgatcgaattggaaccgccttcacccccacccagtgcagtgctcgcgtgctccgctctgcgccggcagcccgcccggaccggaccaggccgtctctgcatttgcgcggatccgccggcgcggtccctgattcgggccgcgctctcgcagatgatggtggcggagaagcccgcgctggggttccaggcgcacggggacggggacgacgagctggagctggagctagcgtcgccggcgccgccgccccggaagatgcactcgctggaattcgagcacatcggctcgctcgccgccgtggccgagtcgctcgcgcccgggagcaggtggcagagggcgctcaccagcgtgcgcgtcgtcatcttccaggccaagatcaacgtgctcctccccttcggcccgctcgccatcatgctccactacctctccggaacgcaccaaggatgggtttttcttttcagcttaatcggcattaccccgttggccgagagattgggatacgcaactgagcaacttgcttgctacactggcccaacagttggggggctactgaatgctacatttggaaatgcaacggaaatgattatatcaatatacgcactgaaaaatgggatgattcgggtcgtccagcagtcactactaggctcaatattgtcaaatatgctgctggttcttgggtgtgctttctttgctggtggtcttgtccattctgacagggaccaggtcttcaacaaggcatcagctgttgtaaactcaggactactgttgatggctgtcttaggccttatgttcccagcagtgcttcatttcacacattcagaagcgcagtatggaaaatctgaagtagctctttcaaggtttagcagctgcatcatgcttgtggcctatgctagctatctattttttcaactaaagagccaccgcagtatgtacagcccaattggtgatgtaagtagcttaccactagatctttgcaaacattggaaactggaaaacaaataatgcatgcataaggatatgaaaattcattggttgcacaaaaagacctgggatcacttctatttgtaacaaaatgattatattttacggggactatgctttgttagaattttggatcaggttgatgtagataagctgtaaatcagggcaaaagataaatgtaatgcagttaacagggaaacatagcaagatattggttctcctgatttttcctttactatgggcacaactatttaaaacaggaagaagccgccgctgaggaggaggatgaaaaggagattacacaaggggaagccatctgctggcttttcatattgactatttggatttcagtactctcagggtacctggttgatgccattcagggtgcgtctgattcattaaacttgccagtggcctttattagtgttattctgcttcctattgtggggaatgctgctgaacatgcaagcgccatcatgtttgccatgaaaaacaaattggacattacattgggagttgcgatagggtcatcaacacagatctccatgtttgtgattccattctgcgtggtaattggctggatgatgggacaagaaatggacttgaattttcaactgttcgagacagcgactctctttataactgtactagtggtggcattcatgctacaggaaggcacatcaaactattttaaaggtcttatgctcatcttatgctacctcatagttgctgcaagcttttttgtccatgtcgaccctgatgcaaaacacaaactcaacagactgaactaagacaaaccttcaattgcaatttgtggattgcttagaaaacaaaatgtttaatttcaaggtgtcttatctccagacaaggacctgcaagagtcctgaatttggaagcaacttgtgggcagaatctcggaccgagggtttaacttggggctcaagattacaaggagctgatgcagcttttttaggatagcaacagcatcgcccgttgagga

SEQ ID NO: 80845 - DNA, 1769 bp, Zea Mays
atttctccgtgagcggaagatccgatcaccacttcggcgccgcgcgtccgaaccccaacccaaccgcgctgtctatcctcctcctccctttccgcacttggtccggcgatcctgatcgaattggaaccgccttcacccccacccagtgcagtgctcgcgtgctccgctctgcgccggcagcccgcccggaccggaccaggccgtctctgcatttgcgcggatccgccggcgcggtccctgattcgggccgcgctctcgcagatgatggtggcggagaagcccgcgctggggttccaggcgcacggggacggggacgacgagctggagctggagctagcgtcgccggcgccgccgccccggaagatgcactcgctggaattcgagcacatcggctcgctcgccgccgtggccgagtcgctcgcgcccgggagcaggtggcagagggcgctcaccagcgtgcgcgtcgtcatcttccaggccaagatcaacgtgctcctccccttcggcccgctcgccatcatgctccactacctctccggaacgcaccaaggatgggtttttcttttcagcttaatcggcattaccccgttggccgagagattgggatacgcaactgagcaacttgcttgctacactggcccaacagttggggggctactgaatgctacatttggaaatgcaacggaaatgattatatcaatatacgcactgaaaaatgggatgattcgggtcgtccagcagtcactactaggctcaatattgtcaaatatgctgctggttcttgggtgtgctttctttgctggtggtcttgtccattctgacagggaccaggtcttcaacaaggcatcagctgttgtaaactcaggactactgttgatggctgtcttaggccttatgttcccagcagtgcttcatttcacacattcagaagcgcagtatggaaaatctgaagtagctctttcaaggtttagcagctgcatcatgcttgtggcctatgctagctatctattttttcaactaaagagccaccgcagtatgtacagcccaattggtgatgaagaagccgccgctgaggaggaggatgaaaaggagattacacaaggggaagccatctgctggcttttcatattgactatttggatttcagtactctcagggtacctggttgatgccattcagtggcctttattagtgttattctgcttcctattgtggggaatgctgctgaacatgcaagcgccatcatgtttgccatgaaaaacaaattggacattacattgggagttgcgatagggtcatcaacacagatctccatgtttgtgattccattctgcgtggtaattggctggatgatgggacaagaaatggacttgaattttcaactgttcgagacagcgactctctttataactgtactagtggtggcattcatgctacaggaaggcacatcaaactattttaaaggtcttatgctcatcttatgctacctcatagttgctgcaagcttttttgtccatgtcgaccctgatgcaagtgataactaagtgacaaatctgcttacagcatacctgtgaactgaatggagaggctacgacctaactgcagagttagccaatagcattgccctgcgtagacaaggacctgcaagagtcctgaatttggaagcaacttgtgggcagaatctcggaccgagggtttaacttggggctcaagattacaaggagctgatgcagcttttttaggatagcaacagcatcgcccgttgagga

SEQ ID NO: 80846 - DNA, 2054 bp, Zea Mays
atttctccgtgagcggaagatccgatcaccacttcggcgccgcgcgtccgaaccccaacccaaccgcgctgtctatcctcctcctccctttccgcacttggtccggcgatcctgatcgaattggaaccgccttcacccccacccagtgcagtgctcgcgtgctccgctctgcgccggcagcccgcccggaccggaccaggccgtctctgcatttgcgcggatccgccggcgcggtccctgattcgggccgcgctctcgcagatgatggtggcggagaagcccgcgctggggttccaggcgcacggggacggggacgacgagctggagctggagctagcgtcgccggcgccgccgccccggaagatgcactcgctggaattcgagcacatcggctcgctcgccgccgtggccgagtcgctcgcgcccgggagcaggtggcagagggcgctcaccagcgtgcgcgtcgtcatcttccaggccaagatcaacgtgctcctccccttcggcccgctcgccatcatgctccactacctctccggaacgcaccaaggatgggtttttcttttcagcttaatcggcattaccccgttggccgagagattgggatacgcaactgagcaacttgcttgctacactggcccaacagttggggggctactgaatgctacatttggaaatgcaacggaaatgattatatcaatatacgcactgaaaaatgggatgattcgggtcgtccagcagtcactactaggctcaatattgtcaaatatgctgctggttcttgggtgtgctttctttgctggtggtcttgtccattctgacagggaccaggtcttcaacaaggcatcagctgttgtaaactcaggactactgttgatggctgtcttaggccttatgttcccagcagtgcttcatttcacacattcagaagcgcagtatggaaaatctgaagtagctctttcaaggtttagcagctgcatcatgcttgtggcctatgctagctatctattttttcaactaaagagccaccgcagtatgtacagcccaattggtgatgaagaagccgccgctgaggaggaggatgaaaaggagattacacaaggggaagccatctgctggcttttcatattgactatttggatttcagtactctcagggtacctggttgatgccattcagggtgcgtctgattcattaaacttgccagtggcctttattagtgttattctgcttcctattgtggggaatgctgctgaacatgcaagcgccatcatgtttgccatgaaaaacaaattggacattacattgggagttgcgatagggtcatcaacacagatctccatgtttgtgattccattctgcgtggtaattggctggatgatgggacaagaaatggacttgaattttcaactgttcgagacagcgactctctttataactgtactagtggtggcattcatgctacaggaaggcacatcaaactattttaaaggtcttatgctcatcttatgctacctcatagttgctgcaagcttttttgtccatgtcgaccctgatgcaagtaagtatcttgtttattgttttcttagatgcacgagagcaaactagaccaaaattgatgggttaatggaaatgcaagaattaaaccatttggataaaaaaattagtcagactattgatttatttccttaccatagacaaccataactgtgaaagccaattatcccatttgtaaataacatattcagtatatgatattgctgttgatagacatgactgattcaaattaggatgctttcgtttaaatcctgctatccacaacacaaactcaacagactgaactaagacaaaccttcaattgcaatttgtggattgcttagaaaacaaaatgtttaatttcaaggtgtcttatctccagacaaggacctgcaagagtcctgaatttggaagcaacttgtgggcagaatctcggaccgagggtttaacttggggctcaagattacaaggagctgatgcagcttttttaggatagcaacagcatcgcccgttgagga

SEQ ID NO: 80847 - DNA, 1061 bp, Zea Mays
aacatagcaagatattggttctcctgatttttcctttactatgggcacaactatttaaaacaggaagaagccgccgctgaggaggaggatgaaaaggagattacacaaggggaagccatctgctggcttttcatattgactatttggatttcagtactctcagggtacctggttgatgccattcagggtgcgtctgattcattaaacttgccagtggcctttattagtgttattctgcttcctattgtggggaatgctgctgaacatgcaagcgccatcatgtttgccatgaaaaacaaattggacattacattgggagttgcgatagggtcatcaacacagatctccatgtttgtgattccattctgcgtggtaattggctggatgatgggacaagaaatggacttgaattttcaactgttcgagacagcgactctctttataactgtactagtggtggcattcatgctacaggaaggcacatcaaactattttaaaggtcttatgctcatcttatgctacctcatagttgctgcaagcttttttgtccatgtcgaccctgatgcaagtaagtatcttgtttattgttttcttagatgcacgagagcaaactagaccaaaattgatgggttaatggaaatgcaagaattaaaccatttggataaaaaaattagtcagactattgatttatttccttaccatagacaaccataactgtgaaagccaattatcccatttgtaaataacatattcagtatatgatattgctgttgatagacatgactgattcaaattaggatgctttcgtttaaatcctgctatccacaacacaaactcaacagactgaactaagacaaaccttcaattgcaatttgtggattgcttagaaaacaaaatgtttaatttcaaggtgtcttatctccagacaaggacctgcaagagtcctgaatttggaagcaacttgtgggcagaatctcggaccgagggtttaacttggggctcaagattacaaggagctgatgcagcttttttaggatagcaacagcatcgcccgttgagga

SEQ ID NO: 80848 - DNA, 4107 bp, Zea Mays
aacgatttttatagaagttggctcaaacaaacggggcatagaaagttaggccgttagcacttcagcttgatatgttatacaaccggcccatcgcaccttggagcggcccagctcgtgcgctctcgtcttcgcgatcgcgaacagtcgcggcggcctcgtcattgccgcagaaaccctaaccctagatccgccgtcatggatctcctccagtcctcttacgcgccggacgacgcgtcgtctccggaggcttcggcggccgcgtcctcgccggactcctcgccgctccgccttccgtccaagtccgccgcccccgccgtcgatgacaccgcgctcgcactctcctccgcggcgtccgccgcccgcccactcgacccttcgctccacctcgtcgccttcaacccaactgctgaccagctctgggctcccatcctcgggccccagcacccccacgccccgatctcgtccgcctccggcaaccgcaaccacaagctcggccacgttgaggacgccgctgtcctgccattcctattcgacgagcagtacaacaccttccatcggtttggctacgccgccgacccgtctggcctccacatcgtcggcgacgcccagccccaggcgcctgagcccgacactgtctacaacctcgccccttccgagcacaagcgccgtcgcctcctggccaaggcggacaacgaggcggagctagcccccccggaggcaaagaaccccgcctccgaggaatggatcctccacaacaagcagagtccctgggctgggaagaaggaagcgcctcccgcggagctcactgacgagcagaagcagtatgcggaggcgcacgctgccaagaaggccgagaaggaggcccgcctcgaagggaagagcgagaggacagaggttgtggtcaagaccaccttccacggcaaggaggagaaggactaccaaggacgctcctggatcacgccgcccaaggatgccaaggccacaaacgaccactgctacatccccaagaggtgtgtgcacgagtgggtcggtcacaccaagggggtctcagctatcaggtttttcccgaagtatggacatttgctgctctctgcgagtatggattgcaagattaagatctgggatgttcttgggtcacggacatgtatgcgtacctatatggggcactcaaaggcggtaagggatatatcattctccaatgacgggactaagttcttgagcgctgggtatgacaggaatatacagtactgggatactgagacagggcaggtgatctcgaccttttcaactgggaaggtcccatatgttgtgaagctcaatcctgatgaggataagcagcatattctccttgccggaatgagcgataagaagattgtgcaatgggatatgaagtcagggcagattacacaagagtatgatcagcatttaggggctgtgaacaccataacttttgtggataacaacaggagatttgtgacctcaagtgatgacaagtctcttcgtgtgtgggagtttggcatccctgtggtgattaagtacatcagtgagccgcacatgcattcaatgccatcgatgtcactgcatcccaactccaattggctggcagcacagagtttggacaatcagatactgatatacagcaccaaggagaggtttcagcttaataagaagaagagatttgctggccacattgtggcaggttatgcttgtcaggtgaacttctcacctgatgggaggtttgtgatgtctggtgatggcgagggtagctgctggttctgggactggaaaagctgcaggagattcaagactttgaagtgtcacaacggggtttgcattggatgtgagtggcatccgttggaaactagcaaggttgcaacctgtggatgggatggtgtaattaaatactgggactgaactttggcagagatattggttgagctcctgggaaaggttttgtaacaatccgattcacgccgaatgtcatggcatactgtaagtcacatgctcgacaagagaatcccggaggaaaaaacatgtgttttttgaggttacatatatgggagaaaaaggaacgacgtggtataaaattagctgctgattcaggaactgtgatgtgggcatgcatttgatgcgaacaaacatggtccagaaaggtgacaaaacagaagctcctccaccagcattggtgtcggggtagggatcggcatagcactacgcaaccccgctgctcctgctcgtcgtcgtttcttgattccctccttttcctagcttccaaggtcaaaaaccacacgggcgacgcccacgtatccttacacttgtccatttccatccggtatctgatcccatcttttcatcgtcttccatctctcatggaccagtcctccatcctcttctttcttgagggaaacaaagaccatttttgtgtatatgctttcccttgtgggtgcaaacaccatccggtccgctaccctttcgcccgccagcgccgaccctatatcttccgtcgtcaccaccggtggccggtgcacataacaatagcatactgcgacagggcagcacatacggtggtgtgccagtgatccatcaagaagctaagccatggcggcggcgctgcgggcgctggcggtgctgctgtgggtggcggcggcgtaccctgtggtgttccgggcgcggcccgtgcaggcgctggcggccaactggggcacccgcgcgctgcacccgctgccgggggacatcaccgtacgcctcctgcgggacaacggcttcgacaaggtgaagctgttcgaggcggacccgccggcgctcagggcgctgggtcactcagggatccaggtcatgctgggcctccccaacgagctgctgggctccgtggccgccagcgtgaccgccgccgagcagtgggtgatccagaacgtctccacctacgtctccaagtacggcgtggacatccgctacgtggccgtcggcaacgagccgttcctcaagtcgtacaagggcaagttcgaggccgccacgctgcccgccgtgcagaacgtgcaggccgcgctcgtcaaggcgggcctcgccaggcaggtgcacgtcaccgtcccgctcaacgccgacgtctacgagtccggcgacggccgcccttcctcgggcgacttcaggcccgacatcgccggcctcatggtcagcctcgtccgcttcctcctcgacaacggcggcgtgctcaccatcaacatctacccattcctctccctgtacgccgaccccaacttccccgtcgactacgcctacttcccgtcccccggcgcgcgcccctcgcaggccagcgtgcaggacggcaacgtgctctacaccaacgtcttcgacgccaactacgacaccctcatcgccgcgctcgagaagcacggcctcggcgccatccccgtcatcgtcggggagatcggctggcccaccgacggcgacaagaacgccaacgccgccaacgcgcagcgcttcaaccagggcctcttcgaccgcatcatcgccggcaagggcaccccgcggcgcccgcagatgcccgacgtctacgtcttcgcgctgctggacgaggacaacaagagcatcgacccgggcagcttcgagcgccactggggcgtcttcaactacgacggctcgcccaagtacccgctcaggctcgccagcggcagggcgatcgtgccggccaagggcgtccgctacctctccaagcagtggtgcgtgctccgcccggacgccagcgcctccgacccggccatcgccggcgccgtcggctacgcctgcgagtactccgactgcaccagcctcggcgccggctcctcctgcggcagcgtcgatgcgcgcgccaacgtctcctacgccttcaaccagttcttccagtcggccaaccagcagaaggccgcctgcaaatttaacaacctctccgttatcaccaccaccgacccgtcccaggggacctgccgcttcgagatcatgatcgacaccggccgccacgagctcaccggaaagccggcgtcgcccgccgccagggcgggtccttcagcttcatcttggagcgccgtgctgctgctcggcttggctggccttactgctctggttgcctggtaa

SEQ ID NO: 80849 - DNA, 4583 bp, Zea Mays
ccagctcgtgcgctctcgtcttcgcgatcgcgaacagtcgcggcggcctcgtcattgccgcagaaaccctaaccctagatccgccgtcatggatctcctccagtcctcttacgcgccggacgacgcgtcgtctccggaggcttcggcggccgcgtcctcgccggactcctcgccgctccgccttccgtccaagtccgccgcccccgccgtcgatgacaccgcgctcgcactctcctccgcggcgtccgccgcccgcccactcgacccttcgctccacctcgtcgccttcaacccaactgctgaccagctctgggctcccatcctcgggccccagcacccccacgccccgatctcgtccgcctccggcaaccgcaaccacaagctcggccacgttgaggacgccgctgtcctgccattcctattcgacgagcagtacaacaccttccatcggtttggctacgccgccgacccgtctggcctccacatcgtcggcgacgcccagccccaggcgcctgagcccgacactgtctacaacctcgccccttccgagcacaagcgccgtcgcctcctggccaaggcggacaacgaggcggagctagcccccccggaggcaaagaaccccgcctccgaggaatggatcctccacaacaagcagagtccctgggctgggaagaaggaagcgcctcccgcggagctcactgacgagcagaagcagtatgcggaggcgcacgctgccaagaaggccgagaaggaggcccgcctcgaagggaagagcgagaggacagaggttgtggtcaagaccaccttccacggcaaggaggagaaggactaccaaggacgctcctggatcacgccgcccaaggatgccaaggccacaaacgaccactgctacatccccaagaggtgtgtgcacgagtgggtcggtcacaccaagggggtctcagctatcaggtttttcccgaagtatggacatttgctgctctctgcgagtatggattgcaagattaagatctgggatgttcttgggtcacggacatgtatgcgtacctatatggggcactcaaaggcggtaagggatatatcattctccaatgacgggactaagttcttgagcgctgggtatgacaggaatatacagtactgggatactgagacagggcaggtgatctcgaccttttcaactgggaaggtcccatatgttgtgaagctcaatcctgatgaggataagcagcatattctccttgccggaatgagcgataagaagattgtgcaatgggatatgaagtcagggcagattacacaagagtatgatcagcatttaggggctgtgaacaccataacttttgtggataacaacaggagatttgtgacctcaagtgatgacaagtctcttcgtgtgtgggagtttggcatccctgtggtgattaagtacatcagtgagccgcacatgcattcaatgccatcgatgtcactgcatcccaactccaattggctggcagcacagagtttggacaatcagatactgatatacagcaccaaggagaggtttcagcttaataagaagaagagatttgctggccacattgtggcaggttatgcttgtcaggtgaacttctcacctgatgggaggtttgtgatgtctggtgatggcgagggtagctgctggttctgggactggaaaagctgcaggagattcaagactttgaagtgtcacaacggggtttgcattggatgtgagtggcatccgttggaaactagcaaggttgcaacctgtggatgggatggtgtaattaaatactgggactgaactttggcagagatattggttgagctcctgggaaaggttttgtaacaatccgattcacgccgaatgtcatggcatactgtaagtcacatgctcgacaagagaatcccggaggaaaaaacatgtgttttttgaggttacatatatgggagaaaaaggtggggttttgctgctacctttgtgttggttctgccctgttagatgtccaaatgtacaatattcgcaccatattcaaatttttagttgtatctctgccactagcaacttgtttgcggtttctggtaatcctgttccttcgaacgtttgtaccatctgaggaagtgtctgttgtgtagtatccccctccggtctgttttataacttaggggttgtttgtttgggattataatctgtccagatcaaaataagttaagattatataatttgggcagattataatcacaaacaaacaggcccttagatagctccctattttaatagctggggccaagtgaacaggaaataaatagagattgagttgagacaagtatcttccagatccatgtcaaatgcttgacgccttgattcctgagcaattaaatagattgtagttgattcgtaatgttatacatatacactaataaaaacagatgattaaagttcataggaagatctattcctgattttaaacagtggattaaaaacgttcgttgattcattggcgtaatcatacttctcagcattgttctattcctgatccaggaacgacgtggtataaaattagctgctgattcaggaactgtgatgtgggcatgcatttgatgcgaacaaacatggtccagaaaggtgacaaaacagaagctcctccaccagcattggtgtcggggtagggatcggcatagcactacgcaaccccgctgctcctgctcgtcgtcgtttcttgattccctccttttcctagcttccaaggtcaaaaaccacacgggcgacgcccacgtatccttacacttgtccatttccatccggtatctgatcccatcttttcatcgtcttccatctctcatggaccagtcctccatcctcttctttcttgagggaaacaaagaccatttttgtgtatatgctttcccttgtgggtgcaaacaccatccggtccgctaccctttcgcccgccagcgccgaccctatatcttccgtcgtcaccaccggtggccggtgcacataacaatagcatactgcgacagggcagcacatacggtggtgtgccagtgatccatcaagaagctaagccatggcggcggcgctgcgggcgctggcggtgctgctgtgggtggcggcggcgtaccctgtggtgttccgggcgcggcccgtgcaggcgctggcggccaactggggcacccgcgcgctgcacccgctgccgggggacatcaccgtacgcctcctgcgggacaacggcttcgacaaggtgaagctgttcgaggcggacccgccggcgctcagggcgctgggtcactcagggatccaggtcatgctgggcctccccaacgagctgctgggctccgtggccgccagcgtgaccgccgccgagcagtgggtgatccagaacgtctccacctacgtctccaagtacggcgtggacatccgctacgtggccgtcggcaacgagccgttcctcaagtcgtacaagggcaagttcgaggccgccacgctgcccgccgtgcagaacgtgcaggccgcgctcgtcaaggcgggcctcgccaggcaggtgcacgtcaccgtcccgctcaacgccgacgtctacgagtccggcgacggccgcccttcctcgggcgacttcaggcccgacatcgccggcctcatggtcagcctcgtccgcttcctcctcgacaacggcggcgtgctcaccatcaacatctacccattcctctccctgtacgccgaccccaacttccccgtcgactacgcctacttcccgtcccccggcgcgcgcccctcgcaggccagcgtgcaggacggcaacgtgctctacaccaacgtcttcgacgccaactacgacaccctcatcgccgcgctcgagaagcacggcctcggcgccatccccgtcatcgtcggggagatcggctggcccaccgacggcgacaagaacgccaacgccgccaacgcgcagcgcttcaaccagggcctcttcgaccgcatcatcgccggcaagggcaccccgcggcgcccgcagatgcccgacgtctacgtcttcgcgctgctggacgaggacaacaagagcatcgacccgggcagcttcgagcgccactggggcgtcttcaactacgacggctcgcccaagtacccgctcaggctcgccagcggcagggcgatcgtgccggccaagggcgtccgctacctctccaagcagtggtgcgtgctccgcccggacgccagcgcctccgacccggccatcgccggcgccgtcggctacgcctgcgagtactccgactgcaccagcctcggcgccggctcctcctgcggcagcgtcgatgcgcgcgccaacgtctcctacgccttcaaccagttcttccagtcggccaaccagcagaaggccgcctgcaaatttaacaacctctccgttatcaccaccaccgacccgtcccaggggacctgccgcttcgagatcatgatcgacaccggccgccacgagctcaccggaaagccggcgtcgcccgccgccagggcgggtccttcagcttcatcttggagcgccgtgctgctgctcggcttggctggccttactgctctggttgcctggtaa

SEQ ID NO: 80850 - DNA, 2584 bp, Zea Mays
acaagattttcctactattcgtctagctatagtatcaaagcaaaagaattctgcttcggatgttccatcagtggcaatgaagctgagtttatatctgtgagctagaaattgttagtgttatataacagttattagatagctatgcaagaagacgacattttcctctgtatgcaaaacataattggtttggtgtttgtgtatacggttacctgaactttgttacaccattctacattgatgtgggcttgatattttttgagtaatgtcatgttgtagggaacaacccatctattgtctagcttaatgttagatttcatgacgaatctatcattgtttgatcgtttgtaaactgcaaatccattcatatcaactacagtttcactgttaaagagcttaggatagtgcttggagcattgatttcttttcatgcaaggcgaattttgattataatagccacatggtccatggaccatgtgttccgcaagtaaggcatatcctaatggatcagtagctggatctggtatctcagcagttatgtaagaatctataaggttagcatttggctgtgaggtatcagttgacacccagaaaataatatgcgcgtgaggtaatccacgtttctggaattctactgtatataggactgcatcacgaaaaaaagatgaattgattagaaagacttatagtagctaagttatgacatgtgatgtggtaatggtattaacagtcttgtcattgttatgtatggattcgtgttactgttaggtttacaaagaaaagaacaaaccaaacaaagaagggttccttttttgtttattaagttaaagcgtgtacaatggaacttatgttgccaggcatgaaaaatactatttacgcaaattgcaaatggagcaaagagataagaagcacaaaacttttggtaaattaagtttgaatatgtataatatagcaagggttttggtagttaaggcaatattgttcatgggattgcattgaacggaaggttgcatatgaggaaaccacgaaaaaagttaggaaaacctttggtgagtaattatgtgtttgtaatagatcaatgttataagcggtattgtcaacatttgtgtgcatttgtataaaatgtttggacaatcaaggtttcaatatgtactatgtaaatgttttcagtcaaaaggttgtatactaaaaaaagaggactagacaaggtgatataggttaagtgaattatgaataaataagtaaatctaacctttttactcaagttaagaagattatattagacaaggtgttataaacttagtgtataaaggatgaataagtaaatttaacttttgtactcaaattgtgggttcgcagcatagatggtaaagcaacaatattggaataaagatttgttttttttactgtagataaggtagaaaaaacgaatgagtataagaaagtttgtttacgaatacaaattccaactcaataattaaagagaagtatatgtatgtataaaattggaaacaaaatattcgcacctgctttgcatggtccaactatctttccagattttatatcttgtaataactcttgtaatttcatatggaatattcttaccgcaatatcaggtgcgtcagaatttttttgtccacagtggtaaagactctcaataatttcgggccactttgcattacatgtgaaggttacgaagaagtcaggtgggccatgaactctgcaaatagctatgctgtcgtgatagttttgtatcatgtatcgtcttccaccgatatgtgacgctggaagcacaattgttttccccatctcttcaccgtttatgcaacctctactaacagcatctgatataccttgtaaattttccatccttaatttgtcctgattattcagaatgtaagtaagcctattttcatcaatgcaggcacgggcatcgaccttagcttgatttgataatatcccataagagagaaatggattgggttgcccgggtttataatgaaattgatagcaataatagtcttgcattgtcatacgaactcttgaatttgcctgtctgttttgtaagccgctatacataacaccaatttggaaacctcgttctccatatggaaataggagtggatattgaagggccatataagctggatgtaacgatgaaatacgttttaattcataatttctggtttctatgataatgtctcgtttgaaggtttcaagggagaaatcaccgataactagcatggctaaatcatcagttgttggcatgtcatattgcacaggatctccttctttggctccaataattctaatgataaattcctcgtctgcgtgttcgataagcctttccttagcaattctgaattttttagcgaaaggattatgggtgtccaacatctgtaatagttcatgaacaatttgtggctgtataggagaatcaggagcatcatcacttgataaagaccgtattcgattatttacctcatgtgatgtatcatatacataaagttgaaggaattttgggggctggtcggtcattggaagtaatgagcctattcgatgatggatctgaccacatatcttgaag

SEQ ID NO: 80851 - DNA, 1065 bp, Zea Mays
atactgtttcctttttctttcctttttacaaatgtagtgctctggttcattaattaatttcatttcccctctgaatatcccctatatatctataatcaccctctcgagaggaaccagcacaaactcagagaactaccgtgctactagatacatagattgtcagctgtgagaagactcccatccccacaagcccatcatgtcttgcataggtggttcctcctcttccacggcgagcaacaagagaaagggaaaggagattgtggtggaggtgtcagctgtggtggaggaggaggagaagcagcagcagcagcagagaaagggaaaggaggttgcgttggaggaggtgccactgcctgcagtggcggagtcttacgacgattcagatttagattcgggttctggttgggacttctacgaggaggagtactcggagaagaaggagcaagagaggaaggaaaagaaacctgcatggctggatacgctgctgagaaccaagttctgggacccgtgcaaggagcacgggtccaagaacagggcagaccagtgcatgttctgcctcaggtgctccaagctgagctgccctcgctgtgtccacgaccagcccggccaccgcctcctcaagatccgccgctacgtctaccgctccgtcgtccacgcttccgacatgcaggagctcggcatcgacgtctccaggatacagacatatgtcatcaatgcgagaaaggtgctgcatctgaggcccatgaacagatccaagcatttcaggcctcaagcagggacacctcgctgcataacctgcaggacctggctgcgtagcgcgcccaacttattttgctcccttacctgtgagggcccgaagctgagctccgctacaggagtttccaagtgcatatggctgaacctgctgaggagctgttgcctgatgaccctgaagttgagcatgagatcatgcctgcacaagttgagccgccaccactggcggcagccgccgccgcaaatcagaacgtgtcactccgcaggcgggcgcgcaagcaggcagcgccattgagggcgccgttcttctga

SEQ ID NO: 80852 - DNA, 327 bp, Zea Mays
gagctatctgctgagatatgatctagtattccatttatcaaggctataaggacaggttgggtgcatccaaatctcaatttggacaatccagagaaaaccgtggatgctggtgggcccgcagaaggagagatgtgatgtgaaggtggcgctgtcgaactcgtttggatttggcgggcacaactcatcgattttgtttgcaccattcaagtgatagccgttgacaaatttcttgtggtgggctacacaccgtcgaactgagaccttgtataagaatgtatttaccggacgcagcaatatctcctgtactgcaagattaggaagacgata

SEQ ID NO: 80853 - DNA, 2810 bp, Zea Mays
tagcaaattaactgtccagcaaagcgagcccgttggaaactcggcccaaactctacctcatctatcacctcaacaaccacaccagcaaatgagttacttatctctactattccttaagaccataacgagggcgtccaccgcatcaccgtgcccccgcccccgtctacgagcgaccctctgcgctcgcgcgaatcccgcccgagatcgccgccgatccgaagcaacggcaccgtgcccctccccctcgcgagatccgcgaccgccccatcccggcgccgcgggatccacgcctccgccctcgcccttccccacccccacccgctaatctcgcggtcgatccgcgcccggtcctgaccccgcctccgtcctcagcaccgccactccgtcccccatcttcggcgccgccgtctcccgctcccctggcacgcattcggggtccttgcgggcgacaagcacctccgtcccggaggcatctgccgctgcagcatagaccaccatgtcctcgctcggcagcaccgatgttgacgatggcaacgaggaggaggacggctccgcgagcacccccgagatctactgctgccactcccacgcagttcttgctcacgagatctgtgtgcaggttgatgtcctcgtggtgccacgccgacctcgccgccaccaagcgcgccacccatgtcctcaccgacctcgccaaaattggacggatcgaagcaccataataagtgtttagctttcctccgcgcctcgggcggccgcggcacaggcgccgccgcgcccgctcgccgcgaagcacaaggacgagccggaccccgacgacggcaggcagagggtcactgtcttcttcggcacgcaaaccggcaccgctgagggctttgccaagtgcatgactcgtgcccgcgccaggactcgttgccaatattgcactcttagtgcaaagaatagctgagcttgttacagataatatgggtggacctgtcaaagatgctaacgacatgctcacaaggtggctggagaagagtactgagctgagaacatcgctacaaacaagtttgttgcctattggttgcatcaagatagggttatcacatcaccgtgccctacttttcaagatccttgcctatagtgttgggattccatgcaaacttgtcaaagggagcaattatactggtggtgatgacgacgatgctataaacataattaagatggacaatgaaagggagtttttggttgatctgatggctgctcctggtgctcttattccagcagatatcttaagttggaaaggcaattcgttaaattctaatcgaaaactcggcctgaatcgaacagctggatcatcaagtactgttgatgctaatgtggatcctactgtattgccacttgaacctaaaggtggccaactgcctttgttcagcagtggtgattggatgtcagacattgattctggatatgaggcagcagaaattgcagcttctactcaaacctcttcgggtgtcacaccatatctgtgttctgctggaagtgtttttggcagttcatggatgctggttaatcatgaccaatcagatggaccatcaacttctgctggtacatcatcgcagcagaaagttgtacctcaaagcgagcatcagcggaatttaaaccgccttccagatctgcaggaaattccagagtcaaaaaacctttttgctgaccttgttccttctggggataataagtccaagaaaacttcagtaccattcaaaggaccagatcataggaacaatgagttgcaaaagcgcagagagaacattgtccctaatgctggaagaccacatcagcggttagttatgaagaattggtctccttacaatgatgtttccaacaacaaacagtacaattatgtcgaggattcgtttgctcgtagaaatgttggtaataatgctgcaccatcatcatcccagatgccacgaccagccgcaagatctaaccttaattctagattgcataatgatgcatcatatcataattatgatagcattatggctggtacctctgccatgaacattacatctacagctgagaccgggaaggttcctgaaagggttatgcgtggtgatttggacaaaggccaaacaaattatagattggaggatcaacatgtcatagttcaaccaccacagggaagacttccatggggtattcctgcagaaggaagcgttccaatgaatagagttcagagtcaagcaaaacaacacttggaaaacatggatgcaaagcaagaccataagaaattgctccctgatccaaaaaaatctccccttgacaaattcatggacacatcattgccttcaagaaacatggacatgaggtcacagaggcttgacttcgatgatgtctctgagtgcgaaattccttgggaagatcttgtgattggtgaaaggattggcttaggttcatatggagagatttactgtgctgactggaatggaaccgaagtagctgtaaaaaaattcttggatcaagatttttatggcgatgctctggatgagtttaggagtgaagatgcaaagatttttcaaaggaactttgtgattgatctattaagttacgaggacaattcataccgctatgccatccctgcaaacatacaacagggacttatataggtctacatgatattgatggttgcaatgtagtggtgaaagggatagattaaaataacaaaatttatatgtatagccaggatcatcaatggattacaaaatcttttctcataacaatataacacatttatatataagttatgatgatattatatgtttccgttg

SEQ ID NO: 80854 - DNA, 2996 bp, Zea Mays
ctcatctatcacctcaacaaccacaccagcaaatgagttacttatctctactattccttaagaccataacgagggcgtccaccgcatcaccgtgcccccgcccccgtctacgagcgaccctctgcgctcgcgcgaatcccgcccgagatcgccgccgatccgaagcaacggcaccgtgcccctccccctcgcgagatccgcgaccgccccatcccggcgccgcgggatccacgcctccgccctcgcccttccccacccccacccgctaatctcgcggtcgatccgcgcccggtcctgaccccgcctccgtcctcagcaccgccactccgtcccccatcttcggcgccgccgtctcccgctcccctggcacgcattcggggtccttgcgggcgacaagcacctccgtcccggaggcatctgccgctgcagcatagaccaccatgtcctcgctcggcagcaccgatgttgacgatggcaacgaggaggaggacggctccgcgagcacccccgagatctactgctgccactcccacgcagttcttgctcacgagatctgtgtgcaggttgatgtcctcgtggtgccacgccgacctcgccgccaccaagcgcgccacccatgtcctcaccgacctcgccaaaattgcgccgccgcgcccgctcgccgcgaagcacaaggacgagccggaccccgacgacggcaggcagagggtcactgtcttcttcggcacgcaaaccggcaccgctgagggctttgccaagtgcatgactcgtgcccgcgccaggactcgttgccaatattgcactcttagtgcaaagaatagctgagcttgttacagataatatgggtggacctgtcaaagatgctaacgacatgctcacaaggtggctggagaagagtactgagctgagaacatcgctacaaacaagtttgttgcctattggttgcatcaagatagggttatcacatcaccgtgccctacttttcaagatccttgcctatagtgttgggattccatgcaaacttgtcaaagggagcaattatactggtggtgatgacgacgatgctataaacataattaagatggacaatgaaagggagtttttggttgatctgatggctgctcctggtgctcttattccagcagatatcttaagttggaaaggcaattcgttaaattctaatcgaaaactcggcctgaatcgaacagctggatcatcaagtactgttgatgctaatgtggatcctactgtattgccacttgaacctaaaggtggccaactgcctttgttcagcagtggtgattggatgtcagacattgattctggatatgaggcagcagaaattgcagcttctactcaaacctcttcgggtgtcacaccatatctgtgttctgctggaagtgtttttggcagttcatggatgctggttaatcatgaccaatcagatggaccatcaacttctgctggtacatcatcgcagcagaaagttgtacctcaaagcgagcatcagcggaatttaaaccgccttccagatctgcaggaaattccagagtcaaaaaacctttttgctgaccttgttccttctggggataataagtccaagaaaacttcagtaccattcaaaggaccagatcataggaacaatgagttgcaaaagcgcagagagaacattgtccctaatgctggaagaccacatcagcggttagttatgaagaattggtctccttacaatgatgtttccaacaacaaacagtacaattatgtcgaggattcgtttgctcgtagaaatgttggtaataatgctgcaccatcatcatcccagatgccacgaccagccgcaagatctaaccttaattctagattgcataatgatgcatcatatcataattatgatagcattatggctggtacctctgccatgaacattacatctacagctgagaccgggaaggttcctgaaagggttatgcgtggtgatttggacaaaggccaaacaaattatagattggaggatcaacatgtcatagttcaaccaccacagggaagacttccatggggtattcctgcagaaggaagcgttccaatgaatagagttcagagtcaagcaaaacaacacttggaaaacatggatgcaaagcaagaccataagaaattgctccctgatccaaaaaaatctccccttgacaaattcatggacacatcattgccttcaagaaacatggacatgaggtcacagaggcttgacttcgatgatgtctctgagtgcgaaattccttgggaagatcttgtgattggtgaaaggattggcttaggttcatatggagagatttactgtgctgactggaatggaaccgaagtagctgtaaaaaaattcttggatcaagatttttatggcgatgctctggatgagtttaggagtgaagcggcgaccagaatatgcatcaggcgggaggaatggggcggtcgctggagctgctgctgatccagtttttgatgccggataacgacacacgtcggcaggcggaggagcagatccgacggctggcccgtgacccgcaggtggtccctgcgctcgtccaccatctccgtacggccaagacccccaacgtccgccagctcgccgcggtgctactccgcaagaagatcacctcccactggcccaagcttccccctgactccaaggcatcacttaaacaagcccttatcgattcaatcacactcgaccacaggatgcaaagatttttcaaaggaactttgtgattgatctattaagttacgaggacaattcataccgctatgccatccctgcaaacatacaacagggacttatataggtctacatgatattgatggttgcaatgtagtggtgaaagggatagattaaaataacaaaatttatatgtatagccaggatcatcaatggattacaaaatcttttctcataacaatataacacatttatatataagttatgatgatattatatgtttccgttg

SEQ ID NO: 80855 - DNA, 3674 bp, Zea Mays
ccgcccccgtctacgagcgaccctctgcgctcgcgcgaatcccgcccgagatcgccgccgatccgaagcaacggcaccgtgcccctccccctcgcgagatccgcgaccgccccatcccggcgccgcgggatccacgcctccgccctcgcccttccccacccccacccgctaatctcgcggtcgatccgcgcccggtcctgaccccgcctccgtcctcagcaccgccactccgtcccccatcttcggcgccgccgtctcccgctcccctggcacgcattcggggtccttgcgggcgacaagcacctccgtcccggaggcatctgccgctgcagcatagaccaccatgtcctcgctcggcagcaccgatgttgacgatggcaacgaggaggaggacggctccgcgagcacccccgagatctactgctgccactcccacgcagttcttgctcacgagatctgtgtgcaggttgatgtcctcgtggtgccacgccgacctcgccgccaccaagcgcgccacccatgtcctcaccgacctcgccaaaattggacggatcgaagcaccataataagtgtttagctttcctccgcgcctcgggcggccgcggcacaggcgccgccgcgcccgctcgccgcgaagcacaaggacgagccggaccccgacgacggcaggcagagggtcactgtcttcttcggcacgcaaaccggcaccgctgagggctttgccaaggtccctactcaaactctgctcctctgtttgctgtgtttgcggtcccttctacagactacagccagagctcggtgctctgctcgcttgcttgcaccgctggctaagatcggatttgacggcacttttgggcgtggagatcttggtaccgtccagaagaagctcaaatctatttcatacacaagtgcatttgattttgttcctgatgttaggctgacctttaacaatgcgatgacttacattccttgtggccatgtagtgcatgactcgtgcccgcgccaggactcgttgccaatattgcactcttagtgcaaagaatagctgagcttgttacagataatatgggtggacctgtcaaagatgctaacgacatgctcacaaggtggctggagaagagtactgagctgagaacatcgctacaaacaagtttgttgcctattggttgcatcaagatagggttatcacatcaccgtgccctacttttcaagatccttgcctatagtgttgggattccatgcaaacttgtcaaagggagcaattatactggtggtgatgacgacgatgctataaacataattaagatggacaatgaaagatatcttaagttggaaaggcaattcgttaaattctaatcgaaaactcggcctgaatcgaacagctggatcatcaagtactgttgatgctaatgtggatcctactgtattgccacttgaacctaaaggtggccaactgcctttgttcagcagtggtgattggatgtcagacattgattctggatatgaggcagcagaaattgcagcttctactcaaacctcttcgggtgtcacaccatatctgtgttctgctggaagtgtttttggcagttcatggatgctggttaatcatgaccaatcagatggaccatcaacttctgctggtacatcatcgcagcagaaagttgtacctcaaagcgagcatcagcggaatttaaaccgccttccagatctgcaggaaattccagagtcaaaaaacctttttgctgaccttgttccttctggggataataagtccaagaaaacttcagtaccattcaaaggaccagatcataggaacaatgagttgcaaaagcgcagagagaacattgtccctaatgctggaagaccacatcagcggttagttatgaagaattggtctccttacaatgatgtttccaacaacaaacagtacaattatgtcgaggattcgtttgctcgtagaaatgttggtaataatgctgcaccatcatcatcccagatgccacgaccagccgcaagatctaaccttaattctagattgcataatgatgcatcatatcataattatgatagcattatggctggtacctctgccatgaacattacatctacagctgagaccgggaaggttcctgaaagggttatgcgtggtgatttggacaaaggccaaacaaattatagattggaggatcaacatgtcatagttcaaccaccacagggaagacttccatggggtattcctgcagaaggaagcgttccaatgaatagagttcagagtcaagcaaaacaacacttggaaaacatggatgcaaagcaagaccataagaaattgctccctgatccaaaaaaatctccccttgacaaattcatggacacatcattgccttcaagaaacatggacatgaggtcacagaggcttgacttcgatgatgtctctgagtgcgaaattccttgggaagatcttgtgattggtgaaaggattggcttaggttcatatggagagatttactgtgctgactggaatggaaccgaagtagctgtaaaaaaattcttggatcaagatttttatggcgatgctctggatgagtttaggagtgaagtaggtgaacttttatctgtttctatcttggagttttcctaaataaactattcaattttcatatttactcagttcaattgttgatttattgtttgatatacggatatactttttgacaagattcgaattatgcgtcggctgcgccatccaaatattgttctctttatgggtgctgttacacgccctccgaacttatctattgtatctgaatatattccaaggcggcgaccagaatatgcatcaggcgggaggaatggggcggtcgctggagctgctgctgatccagtttttgatgccggataacgacacacgtcggcaggcggaggagcagatccgacggctggcccgtgacccgcaggtggtccctgcgctcgtccaccatctccgtacggccaagacccccaacgtccgccagctcgccgcggtgctactccgcaagaagatcacctcccactggcccaagcttccccctgactccaaggcatcacttaaacaagcccttatcgattcaatcacactcgaccacaggttctttgctaaatacctatcaccaatccttctacgcatgtctgccttagaatctgcacgctttcaattcactcaaattgtgcatttggccatttgcctaaggaacactttgagtgtattctcaacttattagtttgtgctgatcagaattgaactgagaggtccagctttagtgaaccttcctgtttgcgccccaaacaacatagaattttgatgctctattgtgaccgcacaccacaattgctcatataattagttatatatgtcaattggggagaaattctgcttgcgcttcacccaattttggttgagtactgtgaagattatctgcgcaatatattctcatccatgttataaaatggctgatgattaatctttctgctgaactaaattaatcatggttgctctagagctggttgatccaggccgtgctttgttcaattggttacatgataatgcattgtggtcagattatggtaactgatactgtgatataaatatccgatgacctcccatttctggttacttgtggtctagacctaaatctgct

SEQ ID NO: 80856 - DNA, 3277 bp, Zea Mays
ccgcccccgtctacgagcgaccctctgcgctcgcgcgaatcccgcccgagatcgccgccgatccgaagcaacggcaccgtgcccctccccctcgcgagatccgcgaccgccccatcccggcgccgcgggatccacgcctccgccctcgcccttccccacccccacccgctaatctcgcggtcgatccgcgcccggtcctgaccccgcctccgtcctcagcaccgccactccgtcccccatcttcggcgccgccgtctcccgctcccctggcacgcattcggggtccttgcgggcgacaagcacctccgtcccggaggcatctgccgctgcagcatagaccaccatgtcctcgctcggcagcaccgatgttgacgatggcaacgaggaggaggacggctccgcgagcacccccgagatctactgctgccactcccacgcagttcttgctcacgagatctgtgtgcaggttgatgtcctcgtggtgccacgccgacctcgccgccaccaagcgcgccacccatgtcctcaccgacctcgccaaaattggacggatcgaagcaccataataagtgtttagctttcctccgcgcctcgggcggccgcggcacaggcgccgccgcgcccgctcgccgcgaagcacaaggacgagccggaccccgacgacggcaggcagagggtcactgtcttcttcggcacgcaaaccggcaccgctgagggctttgccaaggtccctactcaaactctgctcctctgtttgctgtgtttgcggtcccttctacagactacagccagagctcggtgctctgctcgcttgcttgcaccgctggctaagatcggatttgacggcacttttgggcgtggagatcttgtgcatgactcgtgcccgcgccaggactcgttgccaatattgcactcttagtgcaaagaatagctgagcttgttacagataatatgggtggacctgtcaaagatgctaacgacatgctcacaaggtggctggagaagagtactgagctgagaacatcgctacaaacaagtttgttgcctattggttgcatcaagatagggttatcacatcaccgtgccctacttttcaagatccttgcctatagtgttgggattccatgcaaacttgtcaaagggagcaattatactggtggtgatgacgacgatgctataaacataattaagatggacaatgaaagatatcttaagttggaaaggcaattcgttaaattctaatcgaaaactcggcctgaatcgaacagctggatcatcaagtactgttgatgctaatgtggatcctactgtattgccacttgaacctaaaggtggccaactgcctttgttcagcagtggtgattggatgtcagacattgattctggatatgaggcagcagaaattgcagcttctactcaaacctcttcgggtgtcacaccatatctgtgttctgctggaagtgtttttggcagttcatggatgctggttaatcatgaccaatcagatggaccatcaacttctgctggtacatcatcgcagcagaaagttgtacctcaaagcgagcatcagcggaatttaaaccgccttccagatctgcaggaaattccagagtcaaaaaacctttttgctgaccttgttccttctggggataataagtccaagaaaacttcagtaccattcaaaggaccagatcataggaacaatgagttgcaaaagcgcagagagaacattgtccctaatgctggaagaccacatcagcggttagttatgaagaattggtctccttacaatgatgtttccaacaacaaacagtacaattatgtcgaggattcgtttgctcgtagaaatgttggtaataatgctgcaccatcatcatcccagatgccacgaccagccgcaagatctaaccttaattctagattgcataatgatgcatcatatcataattatgatagcattatggctggtacctctgccatgaacattacatctacagctgagaccgggaaggttcctgaaagggttatgcgtggtgatttggacaaaggccaaacaaattatagattggaggatcaacatgtcatagttcaaccaccacagggaagacttccatggggtattcctgcagaaggaagcgttccaatgaatagagttcagagtcaagcaaaacaacacttggaaaacatggatgcaaagcaagaccataagaaattgctccctgatccaaaaaaatctccccttgacaaattcatggacacatcattgccttcaagaaacatggacatgaggtcacagaggcttgacttcgatgatgtctctgagtgcgaaattccttgggaagatcttgtgattggtgaaaggattggcttaggttcatatggagagatttactgtgctgactggaatggaaccgaagtagctgtaaaaaaattcttggatcaagatttttatggcgatgctctggatgagtttaggagtgaagtaggtgaacttttatctgtttctatcttggagttttcctaaataaactattcaattttcatatttactcagttcaattgttgatttattgtttgatatacggatatactttttgacaagattcgaattatgcgtcggctgcgccatccaaatattgttctctttatgggtgctgttacacgccctccgaacttatctattgtatctgaatatattccaaggcggcgaccagaatatgcatcaggcgggaggaatggggcggtcgctggagctgctgctgatccagtttttgatgccggataacgacacacgtcggcaggcggaggagcagatccgacggctggcccgtgacccgcaggtggtccctgcgctcgtccaccatctccgtacggccaagacccccaacgtccgccagctcgccgcggtgctactccgcaagaagatcacctcccactggcccaagcttccccctgactccaaggcatcacttaaacaagcccttatcgattcaatcacactcgaccacaggatgcaaagatttttcaaaggaactttgtgattgatctattaagttacgaggacaattcataccgctatgccatccctgcaaacatacaacagggacttatataggtctacatgatattgatggttgcaatgtagtggtgaaagggatagattaaaataacaaaatttatatgtatagccaggatcatcaatggattacaaaatcttttctcataacaatataacacatttatatataagttatgatgatattatatgtttccgttg

SEQ ID NO: 80857 - DNA, 2974 bp, Zea Mays
ccccgtctacgagcgaccctctgcgctcgcgcgaatcccgcccgagatcgccgccgatccgaagcaacggcaccgtgcccctccccctcgcgagatccgcgaccgccccatcccggcgccgcgggatccacgcctccgccctcgcccttccccacccccacccgctaatctcgcggtcgatccgcgcccggtcctgaccccgcctccgtcctcagcaccgccactccgtcccccatcttcggcgccgccgtctcccgctcccctggcacgcattcggggtccttgcgggcgacaagcacctccgtcccggaggcatctgccgctgcagcatagaccaccatgtcctcgctcggcagcaccgatgttgacgatggcaacgaggaggaggacggctccgcgagcacccccgagatctactgctgccactcccacgcagttcttgctcacgagatctgtgtgcaggttgatgtcctcgtggtgccacgccgacctcgccgccaccaagcgcgccacccatgtcctcaccgacctcgccaaaattggacggatcgaagcaccataataagtgtttagctttcctccgcgcctcgggcggccgcggcacaggcgccgccgcgcccgctcgccgcgaagcacaaggacgagccggaccccgacgacggcaggcagagggtcactgtcttcttcggcacgcaaaccggcaccgctgagggctttgccaagtgcatgactcgtgcccgcgccaggactcgttgccaatattgcactcttagtgcaaagaatagctgagcttgttacagataatatgggtggacctgtcaaagatgctaacgacatgctcacaaggtggctggagaagagtactgagctgagaacatcgctacaaacaagtttgttgcctattggttgcatcaagatagggttatcacatcaccgtgccctacttttcaagatccttgcctatagtgttgggattccatgcaaacttgtcaaagggagcaattatactggtggtgatgacgacgatgctataaacataattaagatggacaatgaaagggagtttttggttgatctgatggctgctcctggtgctcttattccagcagatatcttaagttggaaaggcaattcgttaaattctaatcgaaaactcggcctgaatcgaacagctggatcatcaagtactgttgatgctaatgtggatcctactgtattgccacttgaacctaaaggtggccaactgcctttgttcagcagtggtgattggatgtcagacattgattctggatatgaggcagcagaaattgcagcttctactcaaacctcttcgggtgtcacaccatatctgtgttctgctggaagtgtttttggcagttcatggatgctggttaatcatgaccaatcagatggaccatcaacttctgctggtacatcatcgcagcagaaagttgtacctcaaagcgagcatcagcggaatttaaaccgccttccagatctgcaggaaattccagagtcaaaaaacctttttgctgaccttgttccttctggggataataagtccaagaaaacttcagtaccattcaaaggaccagatcataggaacaatgagttgcaaaagcgcagagagaacattgtccctaatgctggaagaccacatcagcggttagttatgaagaattggtctccttacaatgatgtttccaacaacaaacagtacaattatgtcgaggattcgtttgctcgtagaaatgttggtaataatgctgcaccatcatcatcccagatgccacgaccagccgcaagatctaaccttaattctagattgcataatgatgcatcatatcataattatgatagcattatggctggtacctctgccatgaacattacatctacagctgagaccgggaaggttcctgaaagggttatgcgtggtgatttggacaaaggccaaacaaattatagattggaggatcaacatgtcatagttcaaccaccacagggaagacttccatggggtattcctgcagaaggaagcgttccaatgaatagagttcagagtcaagcaaaacaacacttggaaaacatggatgcaaagcaagaccataagaaattgctccctgatccaaaaaaatctccccttgacaaattcatggacacatcattgccttcaagaaacatggacatgaggtcacagaggcttgacttcgatgatgtctctgagtgcgaaattccttgggaagatcttgtgattggtgaaaggattggcttaggttcatatggagagatttactgtgctgactggaatggaaccgaagtagctgtaaaaaaattcttggatcaagatttttatggcgatgctctggatgagtttaggagtgaagtaggtgaacttttatctgtttctatcttggagttttcctaaataaactattcaattttcatatttactcagttcaattgttgatttattgtttgatatacggatatactttttgacaagattcgaattatgcgtcggctgcgccatccaaatattgttctctttatgggtgctgttacacgccctccgaacttatctattgtatctgaatatattccaaggcggcgaccagaatatgcatcaggcgggaggaatggggcggtcgctggagctgctgctgatccagtttttgatgccggataacgacacacgtcggcaggcggaggagcagatccgacggctggcccgtgacccgcaggtggtccctgcgctcgtccaccatctccgtacggccaagacccccaacgtccgccagctcgccgcggtgctactccgcaagaagatcacctcccactggcccaagcttccccctgactccaaggcatcacttaaacaagcccttatcgattcaatcacactcgaccacagggttaataccaactacctcgttctataagatatggtcatgtggcgaaatagtaggcgaat

SEQ ID NO: 80858 - DNA, 3199 bp, Zea Mays
cgagcgaccctctgcgctcgcgcgaatcccgcccgagatcgccgccgatccgaagcaacggcaccgtgcccctccccctcgcgagatccgcgaccgccccatcccggcgccgcgggatccacgcctccgccctcgcccttccccacccccacccgctaatctcgcggtcgatccgcgcccggtcctgaccccgcctccgtcctcagcaccgccactccgtcccccatcttcggcgccgccgtctcccgctcccctggcacgcattcggggtccttgcgggcgacaagcacctccgtcccggaggcatctgccgctgcagcatagaccaccatgtcctcgctcggcagcaccgatgttgacgatggcaacgaggaggaggacggctccgcgagcacccccgagatctactgctgccactcccacgcagttcttgctcacgagatctgtgtgcaggttgatgtcctcgtggtgccacgccgacctcgccgccaccaagcgcgccacccatgtcctcaccgacctcgccaaaattcttccttaccagggacggatcgaagcaccataataagtgtttagctttcctccgcgcctcgggcggccgcggcacaggcgccgccgcgcccgctcgccgcgaagcacaaggacgagccggaccccgacgacggcaggcagagggtcactgtcttcttcggcacgcaaaccggcaccgctgagggctttgccaagtgcatgactcgtgcccgcgccaggactcgttgccaatattgcactcttagtgcaaagaatagctgagcttgttacagataatatgggtggacctgtcaaagatgctaacgacatgctcacaaggtggctggagaagagtactgagctgagaacatcgctacaaacaagtttgttgcctattggttgcatcaagatagggttatcacatcaccgtgccctacttttcaagatccttgcctatagtgttgggattccatgcaaacttgtcaaagggagcaattatactggtggtgatgacgacgatgctataaacataattaagatggacaatgaaagcagatatcttaagttggaaaggcaattcgttaaattctaatcgaaaactcggcctgaatcgaacagctggatcatcaagtactgttgatgctaatgtggatcctactgtattgccacttgaacctaaaggtggccaactgcctttgttcagcagtggtgattggatgtcagacattgattctggatatgaggcagcagaaattgcagcttctactcaaacctcttcgggtgtcacaccatatctgtgttctgctggaagtgtttttggcagttcatggatgctggttaatcatgaccaatcagatggaccatcaacttctgctggtacatcatcgcagcagaaagttgtacctcaaagcgagcatcagcggaatttaaaccgccttccagatctgcaggaaattccagagtcaaaaaacctttttgctgaccttgttccttctggggataataagtccaagaaaacttcagtaccattcaaaggaccagatcataggaacaatgagttgcaaaagcgcagagagaacattgtccctaatgctggaagaccacatcagcggttagttatgaagaattggtctccttacaatgatgtttccaacaacaaacagtacaattatgtcgaggattcgtttgctcgtagaaatgttggtaataatgctgcaccatcatcatcccagatgccacgaccagccgcaagatctaaccttaattctagattgcataatgatgcatcatatcataattatgatagcattatggctggtacctctgccatgaacattacatctacagctgagaccgggaaggttcctgaaagggttatgcgtggtgatttggacaaaggccaaacaaattatagattggaggatcaacatgtcatagttcaaccaccacagggaagacttccatggggtattcctgcagaaggaagcgttccaatgaatagagttcagagtcaagcaaaacaacacttggaaaacatggatgcaaagcaagaccataagaaattgctccctgatccaaaaaaatctccccttgacaaattcatggacacatcattgccttcaagaaacatggacatgaggtcacagaggcttgacttcgatgatgtctctgagtgcgaaattccttgggaagatcttgtgattggtgaaaggattggcttaggttcatatggagagatttactgtgctgactggaatggaaccgaagtagctgtaaaaaaattcttggatcaagatttttatggcgatgctctggatgagtttaggagtgaagcggcgaccagaatatgcatcaggcgggaggaatggggcggtcgctggagctgctgctgatccagtttttgatgccggataacgacacacgtcggcaggcggaggagcagatccgacggctggcccgtgacccgcaggtggtccctgcgctcgtccaccatctccgtacggccaagacccccaacgtccgccagctcgccgcggtgctactccgcaagaagatcacctcccactggcccaagcttccccctgactccaaggcatcacttaaacaagcccttatcgattcaatcacactcgaccacaggttctttgctaaatacctatcaccaatccttctacgcatgtctgccttagaatctgcacgctttcaattcactcaaattgtgcatttggccatttgcctaaggaacactttgagtgtattctcaacttattagtttgtgctgatcagaattgaactgagaggtccagctttagtgaaccttcctgtttgcgccccaaacaacatagaattttgatgctctattgtgaccgcacaccacaattgctcatataattagttatatatgtcaattggggagaaattctgcttgcgcttcacccaattttggttgagtactgtgaagattatctgcgcaatatattctcatccatgttataaaatggctgatgattaatctttctgctgaactaaattaatcatggttgctctagagctggttgatccaggccgtgctttgttcaattggttacatgataatgcattgtggtcagattatggtaactgatactgtgatataaatatccgatgacctcccatttctggttacttgtggtctagacctaaatctgct

SEQ ID NO: 80859 - DNA, 4216 bp, Zea Mays
cgagcgaccctctgcgctcgcgcgaatcccgcccgagatcgccgccgatccgaagcaacggcaccgtgcccctccccctcgcgagatccgcgaccgccccatcccggcgccgcgggatccacgcctccgccctcgcccttccccacccccacccgctaatctcgcggtcgatccgcgcccggtcctgaccccgcctccgtcctcagcaccgccactccgtcccccatcttcggcgccgccgtctcccgctcccctggcacgcattcggggtccttgcgggcgacaagcacctccgtcccggaggcatctgccgctgcagcatagaccaccatgtcctcgctcggcagcaccgatgttgacgatggcaacgaggaggaggacggctccgcgagcacccccgagatctactgctgccactcccacgcagttcttgctcacgagatctgtgtgcaggttgatgtcctcgtggtgccacgccgacctcgccgccaccaagcgcgccacccatgtcctcaccgacctcgccaaaattggacggatcgaagcaccataataagtgtttagctttcctccgcgcctcgggcggccgcggcacaggcgccgccgcgcccgctcgccgcgaagcacaaggacgagccggaccccgacgacggcaggcagagggtcactgtcttcttcggcacgcaaaccggcaccgctgagggctttgccaaggtccctactcaaactctgctcctctgtttgctgtgtttgcggtcccttctacagactacagccagagctcggtgctctgctcgcttgcttgcaccgctggctaagatcggatttgacggcacttttgggcgtggagatcttggtaccgtccagaagaagctcaaatctatttcatacacaagtgcatttgattttgttcctgatgttaggctgacctttaacaatgcgatgacttacattccttgtggccatgtagtgcatgactcgtgcccgcgccaggactcgttgccaatattgcactcttagtgcaaagaatagctgagcttgttacagataatatgggtggacctgtcaaagatgctaacgacatgctcacaaggtggctggagaagagtactgagctgagaacatcgctacaaacaagtttgttgcctattggttgcatcaagatagggttatcacatcaccgtgccctacttttcaagatccttgcctatagtgttgggattccatgcaaacttgtcaaagggagcaattatactggtggtgatgacgacgatgctataaacataattaagatggacaatgaaagggagtttttggttgatctgatggctgctcctggtgctcttattccagcagatatcttaagttggaaaggcaattcgttaaattctaatcgaaaactcggcctgaatcgaacagctggatcatcaagtactgttgatgctaatgtggatcctactgtattgccacttgaacctaaaggtggccaactgcctttgttcagcagtggtgattggatgtcagacattgattctggatatgaggcagcagaaattgcagcttctactcaaacctcttcgggtgtcacaccatatctgtgttctgctggaagtgtttttggcagttcatggatgctggttaatcatgaccaatcagatggaccatcaacttctgctggtacatcatcgcagcagaaagttgtacctcaaagcgagcatcagcggaatttaaaccgccttccagatctgcaggaaattccagagtcaaaaaacctttttgctgaccttgttccttctggggataataagtccaagaaaacttcagtaccattcaaaggaccagatcataggaacaatgagttgcaaaagcgcagagagaacattgtccctaatgctggaagaccacatcagcggttagttatgaagaattggtctccttacaatgatgtttccaacaacaaacagtacaattatgtcgaggattcgtttgctcgtagaaatgttggtaataatgctgcaccatcatcatcccagatgccacgaccagccgcaagatctaaccttaattctagattgcataatgatgcatcatatcataattatgatagcattatggctggtacctctgccatgaacattacatctacagctgagaccgggaaggttcctgaaagggttatgcgtggtgatttggacaaaggccaaacaaattatagattggaggatcaacatgtcatagttcaaccaccacagggaagacttccatggggtattcctgcagaaggaagcgttccaatgaatagagttcagagtcaagcaaaacaacacttggaaaacatggatgcaaagcaagaccataagaaattgctccctgatccaaaaaaatctccccttgacaaattcatggacacatcattgccttcaagaaacatggacatgaggtcacagaggcttgacttcgatgatgtctctgagtgcgaaattccttgggaagatcttgtgattggtgaaaggattggcttaggtacttattttgctaccaagttttgatatacactcttctgcttttgaactactcccttcggtttcgttttaactgaggtcctagccttttttgtgtgaatgttaattattgatgttttacctattataactattttatgaccatgctacccttcattaatgataagctaacgcctcgtttcctccaacgtttcgtttgccgttccatgctagcgactgataacaagcagtacgccagccaaaaacagcaaggcgcgaatcgcgatagaaaaaaaacggcagtgcgacaatgtaaaatagtgtcctgaaaaaaaatgccaagctatgtaaaatatgccatgcaaaaataaacgtgctatggcaagactcgaacccaagtgctcgggtgtttttgctatagcaagcaaccagtaggcatcaaagcagatctggttgaggtggccacgatacatatttaataagggtacaacaggaaatcacacataattaatcactccttggtatgctaaatcatgtcctaaatgtcaattaaaacgaaactggagggagtaataacataaagctgttttggaaactaattttaaatatgctgaactgtatttcaagttgttagctttgatgggtatgctttttattggttgaataggagtgggttggttgcttgaacttgcaccttcctgatctctgcatgaaaactattgattgatttgcttcgttcaataggttcatatggagagatttactgtgctgactggaatggaaccgaagtagctgtaaaaaaattcttggatcaagatttttatggcgatgctctggatgagtttaggagtgaagtaggcggcgaccagaatatgcatcaggcgggaggaatggggcggtcgctggagctgctgctgatccagtttttgatgccggataacgacacacgtcggcaggcggaggagcagatccgacggctggcccgtgacccgcaggtggtccctgcgctcgtccaccatctccgtacggccaagacccccaacgtccgccagctcgccgcggtgctactccgcaagaagatcacctcccactggcccaagcttccccctgactccaaggcatcacttaaacaagcccttatcgattcaatcacactcgaccacaggttctttgctaaatacctatcaccaatccttctacgcatgtctgccttagaatctgcacgctttcaattcactcaaattgtgcatttggccatttgcctaaggaacactttgagtgtattctcaacttattagtttgtgctgatcagaattgaactgagaggtccagctttagtgaaccttcctgtttgcgccccaaacaacatagaattttgatgctctattgtgaccgcacaccacaattgctcatataattagttatatatgtcaattggggagaaattctgcttgcgcttcacccaattttggttgagtactgtgaagattatctgcgcaatatattctcatccatgttataaaatggctgatgattaatctttctgctgaactaaattaatcatggttgctctagagctggttgatccaggccgtgctttgttcaattggttacatgataatgcattgtggtcagattatggtaactgatactgtgatataaatatccgatgacctcccatttctggttacttgtggtctagacctaaatctgct

SEQ ID NO: 80860 - DNA, 3246 bp, Zea Mays
cgagcgaccctctgcgctcgcgcgaatcccgcccgagatcgccgccgatccgaagcaacggcaccgtgcccctccccctcgcgagatccgcgaccgccccatcccggcgccgcgggatccacgcctccgccctcgcccttccccacccccacccgctaatctcgcggtcgatccgcgcccggtcctgaccccgcctccgtcctcagcaccgccactccgtcccccatcttcggcgccgccgtctcccgctcccctggcacgcattcggggtccttgcgggcgacaagcacctccgtcccggaggcatctgccgctgcagcatagaccaccatgtcctcgctcggcagcaccgatgttgacgatggcaacgaggaggaggacggctccgcgagcacccccgagatctactgctgccactcccacgcagttcttgctcacgagatctgtgtgcaggttgatgtcctcgtggtgccacgccgacctcgccgccaccaagcgcgccacccatgtcctcaccgacctcgccaaaattcttccttaccagggacggatcgaagcaccataataagtgtttagctttcctccgcgcctcgggcggccgcggcacaggcgccgccgcgcccgctcgccgcgaagcacaaggacgagccggaccccgacgacggcaggcagagggtcactgtcttcttcggcacgcaaaccggcaccgctgagggctttgccaagtgcatgactcgtgcccgcgccaggactcgttgccaatattgcactcttagtgcaaagaatagctgagcttgttacagataatatgggtggacctgtcaaagatgctaacgacatgctcacaaggtggctggagaagagtactgagctgagaacatcgctacaaacaagtttgttgcctattggttgcatcaagatagggttatcacatcaccgtgccctacttttcaagatccttgcctatagtgttgggattccatgcaaacttgtcaaagggagcaattatactggtggtgatgacgacgatgctataaacataattaagatggacaatgaaagggagtttttggttgatctgatggctgctcctggtgctcttattccagcagatatcttaagttggaaaggcaattcgttaaattctaatcgaaaactcggcctgaatcgaacagctggatcatcaagtactgttgatgctaatgtggatcctactgtattgccacttgaacctaaaggtggccaactgcctttgttcagcagtggtgattggatgtcagacattgattctggatatgaggcagcagaaattgcagcttctactcaaacctcttcgggtgtcacaccatatctgtgttctgctggaagtgtttttggcagttcatggatgctggttaatcatgaccaatcagatggaccatcaacttctgctggtacatcatcgcagcagaaagttgtacctcaaagcgagcatcagcggaatttaaaccgccttccagatctgcaggaaattccagagtcaaaaaacctttttgctgaccttgttccttctggggataataagtccaagaaaacttcagtaccattcaaaggaccagatcataggaacaatgagttgcaaaagcgcagagagaacattgtccctaatgctggaagaccacatcagcggttagttatgaagaattggtctccttacaatgatgtttccaacaacaaacagtacaattatgtcgaggattcgtttgctcgtagaaatgttggtaataatgctgcaccatcatcatcccagatgccacgaccagccgcaagatctaaccttaattctagattgcataatgatgcatcatatcataattatgatagcattatggctggtacctctgccatgaacattacatctacagctgagaccgggaaggttcctgaaagggttatgcgtggtgatttggacaaaggccaaacaaattatagattggaggatcaacatgtcatagttcaaccaccacagggaagacttccatggggtattcctgcagaaggaagcgttccaatgaatagagttcagagtcaagcaaaacaacacttggaaaacatggatgcaaagcaagaccataagaaattgctccctgatccaaaaaaatctccccttgacaaattcatggacacatcattgccttcaagaaacatggacatgaggtcacagaggcttgacttcgatgatgtctctgagtgcgaaattccttgggaagatcttgtgattggtgaaaggattggcttaggttcatatggagagatttactgtgctgactggaatggaaccgaagtagctgtaaaaaaattcttggatcaagatttttatggcgatgctctggatgagtttaggagtgaagcggcgaccagaatatgcatcaggcgggaggaatggggcggtcgctggagctgctgctgatccagtttttgatgccggataacgacacacgtcggcaggcggaggagcagatccgacggctggcccgtgacccgcaggtggtccctgcgctcgtccaccatctccgtacggccaagacccccaacgtccgccagctcgccgcggtgctactccgcaagaagatcacctcccactggcccaagcttccccctgactccaaggcatcacttaaacaagcccttatcgattcaatcacactcgaccacaggttctttgctaaatacctatcaccaatccttctacgcatgtctgccttagaatctgcacgctttcaattcactcaaattgtgcatttggccatttgcctaaggaacactttgagtgtattctcaacttattagtttgtgctgatcagaattgaactgagaggtccagctttagtgaaccttcctgtttgcgccccaaacaacatagaattttgatgctctattgtgaccgcacaccacaattgctcatataattagttatatatgtcaattggggagaaattctgcttgcgcttcacccaattttggttgagtactgtgaagattatctgcgcaatatattctcatccatgttataaaatggctgatgattaatctttctgctgaactaaattaatcatggttgctctagagctggttgatccaggccgtgctttgttcaattggttacatgataatgcattgtggtcagattatggtaactgatactgtgatataaatatccgatgacctcccatttctggttacttgtggtctagacctaaatctgct

SEQ ID NO: 80861 - DNA, 3187 bp, Zea Mays
cgagcgaccctctgcgctcgcgcgaatcccgcccgagatcgccgccgatccgaagcaacggcaccgtgcccctccccctcgcgagatccgcgaccgccccatcccggcgccgcgggatccacgcctccgccctcgcccttccccacccccacccgctaatctcgcggtcgatccgcgcccggtcctgaccccgcctccgtcctcagcaccgccactccgtcccccatcttcggcgccgccgtctcccgctcccctggcacgcattcggggtccttgcgggcgacaagcacctccgtcccggaggcatctgccgctgcagcatagaccaccatgtcctcgctcggcagcaccgatgttgacgatggcaacgaggaggaggacggctccgcgagcacccccgagatctactgctgccactcccacgcagttcttgctcacgagatctgtgtgcaggttgatgtcctcgtggtgccacgccgacctcgccgccaccaagcgcgccacccatgtcctcaccgacctcgccaaaattggacggatcgaagcaccataataagtgtttagctttcctccgcgcctcgggcggccgcggcacaggcgccgccgcgcccgctcgccgcgaagcacaaggacgagccggaccccgacgacggcaggcagagggtcactgtcttcttcggcacgcaaaccggcaccgctgagggctttgccaagtgcatgactcgtgcccgcgccaggactcgttgccaatattgcactcttagtgcaaagaatagctgagcttgttacagataatatgggtggacctgtcaaagatgctaacgacatgctcacaaggtggctggagaagagtactgagctgagaacatcgctacaaacaagtttgttgcctattggttgcatcaagatagggttatcacatcaccgtgccctacttttcaagatccttgcctatagtgttgggattccatgcaaacttgtcaaagggagcaattatactggtggtgatgacgacgatgctataaacataattaagatggacaatgaaagcagatatcttaagttggaaaggcaattcgttaaattctaatcgaaaactcggcctgaatcgaacagctggatcatcaagtactgttgatgctaatgtggatcctactgtattgccacttgaacctaaaggtggccaactgcctttgttcagcagtggtgattggatgtcagacattgattctggatatgaggcagcagaaattgcagcttctactcaaacctcttcgggtgtcacaccatatctgtgttctgctggaagtgtttttggcagttcatggatgctggttaatcatgaccaatcagatggaccatcaacttctgctggtacatcatcgcagcagaaagttgtacctcaaagcgagcatcagcggaatttaaaccgccttccagatctgcaggaaattccagagtcaaaaaacctttttgctgaccttgttccttctggggataataagtccaagaaaacttcagtaccattcaaaggaccagatcataggaacaatgagttgcaaaagcgcagagagaacattgtccctaatgctggaagaccacatcagcggttagttatgaagaattggtctccttacaatgatgtttccaacaacaaacagtacaattatgtcgaggattcgtttgctcgtagaaatgttggtaataatgctgcaccatcatcatcccagatgccacgaccagccgcaagatctaaccttaattctagattgcataatgatgcatcatatcataattatgatagcattatggctggtacctctgccatgaacattacatctacagctgagaccgggaaggttcctgaaagggttatgcgtggtgatttggacaaaggccaaacaaattatagattggaggatcaacatgtcatagttcaaccaccacagggaagacttccatggggtattcctgcagaaggaagcgttccaatgaatagagttcagagtcaagcaaaacaacacttggaaaacatggatgcaaagcaagaccataagaaattgctccctgatccaaaaaaatctccccttgacaaattcatggacacatcattgccttcaagaaacatggacatgaggtcacagaggcttgacttcgatgatgtctctgagtgcgaaattccttgggaagatcttgtgattggtgaaaggattggcttaggttcatatggagagatttactgtgctgactggaatggaaccgaagtagctgtaaaaaaattcttggatcaagatttttatggcgatgctctggatgagtttaggagtgaagcggcgaccagaatatgcatcaggcgggaggaatggggcggtcgctggagctgctgctgatccagtttttgatgccggataacgacacacgtcggcaggcggaggagcagatccgacggctggcccgtgacccgcaggtggtccctgcgctcgtccaccatctccgtacggccaagacccccaacgtccgccagctcgccgcggtgctactccgcaagaagatcacctcccactggcccaagcttccccctgactccaaggcatcacttaaacaagcccttatcgattcaatcacactcgaccacaggttctttgctaaatacctatcaccaatccttctacgcatgtctgccttagaatctgcacgctttcaattcactcaaattgtgcatttggccatttgcctaaggaacactttgagtgtattctcaacttattagtttgtgctgatcagaattgaactgagaggtccagctttagtgaaccttcctgtttgcgccccaaacaacatagaattttgatgctctattgtgaccgcacaccacaattgctcatataattagttatatatgtcaattggggagaaattctgcttgcgcttcacccaattttggttgagtactgtgaagattatctgcgcaatatattctcatccatgttataaaatggctgatgattaatctttctgctgaactaaattaatcatggttgctctagagctggttgatccaggccgtgctttgttcaattggttacatgataatgcattgtggtcagattatggtaactgatactgtgatataaatatccgatgacctcccatttctggttacttgtggtctagacctaaatctgct

SEQ ID NO: 80862 - DNA, 4112 bp, Zea Mays
cgagcgaccctctgcgctcgcgcgaatcccgcccgagatcgccgccgatccgaagcaacggcaccgtgcccctccccctcgcgagatccgcgaccgccccatcccggcgccgcgggatccacgcctccgccctcgcccttccccacccccacccgctaatctcgcggtcgatccgcgcccggtcctgaccccgcctccgtcctcagcaccgccactccgtcccccatcttcggcgccgccgtctcccgctcccctggcacgcattcggggtccttgcgggcgacaagcacctccgtcccggaggcatctgccgctgcagcatagaccaccatgtcctcgctcggcagcaccgatgttgacgatggcaacgaggaggaggacggctccgcgagcacccccgagatctactgctgccactcccacgcagttcttgctcacgagatctgtgtgcaggttgatgtcctcgtggtgccacgccgacctcgccgccaccaagcgcgccacccatgtcctcaccgacctcgccaaaattgcgccgccgcgcccgctcgccgcgaagcacaaggacgagccggaccccgacgacggcaggcagagggtcactgtcttcttcggcacgcaaaccggcaccgctgagggctttgccaagtgcatgactcgtgcccgcgccaggactcgttgccaatattgcactcttagtgcaaagaatagctgagcttgttacagataatatgggtggacctgtcaaagatgctaacgacatgctcacaaggtggctggagaagagtactgagctgagaacatcgctacaaacaagtttgttgcctattggttgcatcaagatagggttatcacatcaccgtgccctacttttcaagatccttgcctatagtgttgggattccatgcaaacttgtcaaagggagcaattatactggtggtgatgacgacgatgctataaacataattaagatggacaatgaaagggagtttttggttgatctgatggctgctcctggtgctcttattccagcagatatcttaagttggaaaggcaattcgttaaattctaatcgaaaactcggcctgaatcgaacagctggatcatcaagtactgttgatgctaatgtggatcctactgtattgccacttgaacctaaaggtggccaactgcctttgttcagcagtggtgattggatgtcagacattgattctggatatgaggcagcagaaattgcagcttctactcaaacctcttcgggtgtcacaccatatctgtgttctgctggaagtgtttttggcagttcatggatgctggttaatcatgaccaatcagatggaccatcaacttctgctggtacatcatcgcagcagaaagttgtacctcaaagcgagcatcagcggaatttaaaccgccttccagatctgcaggaaattccagagtcaaaaaacctttttgctgaccttgttccttctggggataataagtccaagaaaacttcagtaccattcaaaggaccagatcataggaacaatgagttgcaaaagcgcagagagaacattgtccctaatgctggaagaccacatcagcggttagttatgaagaattggtctccttacaatgatgtttccaacaacaaacagtacaattatgtcgaggattcgtttgctcgtagaaatgttggtaataatgctgcaccatcatcatcccagatgccacgaccagccgcaagatctaaccttaattctagattgcataatgatgcatcatatcataattatgatagcattatggctggtacctctgccatgaacattacatctacagctgagaccgggaaggttcctgaaagggttatgcgtggtgatttggacaaaggccaaacaaattatagattggaggatcaacatgtcatagttcaaccaccacagggaagacttccatggggtattcctgcagaaggaagcgttccaatgaatagagttcagagtcaagcaaaacaacacttggaaaacatggatgcaaagcaagaccataagaaattgctccctgatccaaaaaaatctccccttgacaaattcatggacacatcattgccttcaagaaacatggacatgaggtcacagaggcttgacttcgatgatgtctctgagtgcgaaattccttgggaagatcttgtgattggtgaaaggattggcttaggtacttattttgctaccaagttttgatatacactcttctgcttttgaactactcccttcggtttcgttttaactgaggtcctagccttttttgtgtgaatgttaattattgatgttttacctattataactattttatgaccatgctacccttcattaatgataagctaacgcctcgtttcctccaacgtttcgtttgccgttccatgctagcgactgataacaagcagtacgccagccaaaaacagcaaggcgcgaatcgcgatagaaaaaaaacggcagtgcgacaatgtaaaatagtgtcctgaaaaaaaatgccaagctatgtaaaatatgccatgcaaaaataaacgtgctatggcaagactcgaacccaagtgctcgggtgtttttgctatagcaagcaaccagtaggcatcaaagcagatctggttgaggtggccacgatacatatttaataagggtacaacaggaaatcacacataattaatcactccttggtatgctaaatcatgtcctaaatgtcaattaaaacgaaactggagggagtaataacataaagctgttttggaaactaattttaaatatgctgaactgtatttcaagttgttagctttgatgggtatgctttttattggttgaataggagtgggttggttgcttgaacttgcaccttcctgatctctgcatgaaaactattgattgatttgcttcgttcaataggttcatatggagagatttactgtgctgactggaatggaaccgaagtagctgtaaaaaaattcttggatcaagatttttatggcgatgctctggatgagtttaggagtgaagtaggtgaacttttatctgtttctatcttggagttttcctaaataaactattcaattttcatatttactcagttcaattgttgatttattgtttgatatacggatatactttttgacaagattcgaattatgcgtcggctgcgccatccaaatattgttctctttatgggtgctgttacacgccctccgaacttatctattgtatctgaatatattccaaggcggcgaccagaatatgcatcaggcgggaggaatggggcggtcgctggagctgctgctgatccagtttttgatgccggataacgacacacgtcggcaggcggaggagcagatccgacggctggcccgtgacccgcaggtggtccctgcgctcgtccaccatctccgtacggccaagacccccaacgtccgccagctcgccgcggtgctactccgcaagaagatcacctcccactggcccaagcttccccctgactccaaggcatcacttaaacaagcccttatcgattcaatcacactcgaccacaggttctttgctaaatacctatcaccaatccttctacgcatgtctgccttagaatctgcacgctttcaattcactcaaattgtgcatttggccatttgcctaaggaacactttgagtgtattctcaacttattagtttgtgctgatcagaattgaactgagaggtccagctttagtgaaccttcctgtttgcgccccaaacaacatagaattttgatgctctattgtgaccgcacaccacaattgctcatataattagttatatatgtcaattggggagaaattctgcttgcgcttcacccaattttggttgagtactgtgaagattatctgcgcaatatattctcatccatgttataaaatggctgatgattaatctttctgctgaactaaattaatcatggttgctctagagctggttgatccaggccgtgctttgttcaattggttacatgataatgcattgtggtcagattatggtaactgatactgtgatataaatatccgatgacctcccatttctggttacttgtggtctagacctaaatctgct

SEQ ID NO: 80863 - DNA, 3238 bp, Zea Mays
cgagcgaccctctgcgctcgcgcgaatcccgcccgagatcgccgccgatccgaagcaacggcaccgtgcccctccccctcgcgagatccgcgaccgccccatcccggcgccgcgggatccacgcctccgccctcgcccttccccacccccacccgctaatctcgcggtcgatccgcgcccggtcctgaccccgcctccgtcctcagcaccgccactccgtcccccatcttcggcgccgccgtctcccgctcccctggcacgcattcggggtccttgcgggcgacaagcacctccgtcccggaggcatctgccgctgcagcatagaccaccatgtcctcgctcggcagcaccgatgttgacgatggcaacgaggaggaggacggctccgcgagcacccccgagatctactgctgccactcccacgcagttcttgctcacgagatctgtgtgcaggttgatgtcctcgtggtgccacgccgacctcgccgccaccaagcgcgccacccatgtcctcaccgacctcgccaaaattggacggatcgaagcaccataataagtgtttagctttcctccgcgcctcgggcggccgcggcacaggcgccgccgcgcccgctcgccgcgaagcacaaggacgagccggaccccgacgacggcaggcagagggtcactgtcttcttcggcacgcaaaccggcaccgctgagggctttgccaagtgcatgactcgtgcccgcgccaggactcgttgccaatattgcactcttagtgcaaagaatagctgagcttgttacagataatatgggtggacctgtcaaagatgctaacgacatgctcacaaggtggctggagaagagtactgagctgagaacatcgctacaaacaagtttgttgcctattggttgcatcaagatagggttatcacatcaccgtgccctacttttcaagatccttgcctatagtgttgggattccatgcaaacttgtcaaagggagcaattatactggtggtgatgacgacgatgctataaacataattaagatggacaatgaaagggagtttttggttgatctgatggctgctcctggtgctcttattccagcagatatcttaagttggaaaggcaattcgttaaattctaatcgaaaactcggcctgaatcgaacagctggatcatcaagtactgttgatgctaatgtggatcctactgtattgccacttgaacctaaaggtggccaactgcctttgttcagcagtggtgattggatgtcagacattgattctggatatgaggcagcagaaattgcagcttctactcaaacctcttcgggtgtcacaccatatctgtgttctgctggaagtgtttttggcagttcatggatgctggttaatcatgaccaatcagatggaccatcaacttctgctggtacatcatcgcagcagaaagttgtacctcaaagcgagcatcagcggaatttaaaccgccttccagatctgcaggaaattccagagtcaaaaaacctttttgctgaccttgttccttctggggataataagtccaagaaaacttcagtaccattcaaaggaccagatcataggaacaatgagttgcaaaagcgcagagagaacattgtccctaatgctggaagaccacatcagcggttagttatgaagaattggtctccttacaatgatgtttccaacaacaaacagtacaattatgtcgaggattcgtttgctcgtagaaatgttggtaataatgctgcaccatcatcatcccagatgccacgaccagccgcaagatctaaccttaattctagattgcataatgatgcatcatatcataattatgatagcattatggctggtacctctgccatgaacattacatctacagctgagaccgggaaggttcctgaaagggttatgcgtggtgatttggacaaaggccaaacaaattatagattggaggatcaacatgtcatagttcaaccaccacagggaagacttccatggggtattcctgcagaaggaagcgttccaatgaatagagttcagagtcaagcaaaacaacacttggaaaacatggatgcaaagcaagaccataagaaattgctccctgatccaaaaaaatctccccttgacaaattcatggacacatcattgccttcaagaaacatggacatgaggtcacagaggcttgacttcgatgatgtctctgagtgcgaaattccttgggaagatcttgtgattggtgaaaggattggcttaggttcatatggagagatttactgtgctgactggaatggaaccgaagtagctgtaaaaaaattcttggatcaagatttttatggcgatgctctggatgagtttaggagtgaagtaggcggcgaccagaatatgcatcaggcgggaggaatggggcggtcgctggagctgctgctgatccagtttttgatgccggataacgacacacgtcggcaggcggaggagcagatccgacggctggcccgtgacccgcaggtggtccctgcgctcgtccaccatctccgtacggccaagacccccaacgtccgccagctcgccgcggtgctactccgcaagaagatcacctcccactggcccaagcttccccctgactccaaggcatcacttaaacaagcccttatcgattcaatcacactcgaccacaggttctttgctaaatacctatcaccaatccttctacgcatgtctgccttagaatctgcacgctttcaattcactcaaattgtgcatttggccatttgcctaaggaacactttgagtgtattctcaacttattagtttgtgctgatcagaattgaactgagaggtccagctttagtgaaccttcctgtttgcgccccaaacaacatagaattttgatgctctattgtgaccgcacaccacaattgctcatataattagttatatatgtcaattggggagaaattctgcttgcgcttcacccaattttggttgagtactgtgaagattatctgcgcaatatattctcatccatgttataaaatggctgatgattaatctttctgctgaactaaattaatcatggttgctctagagctggttgatccaggccgtgctttgttcaattggttacatgataatgcattgtggtcagattatggtaactgatactgtgatataaatatccgatgacctcccatttctggttacttgtggtctagacctaaatctgct

SEQ ID NO: 80864 - DNA, 3423 bp, Zea Mays
cgagcgaccctctgcgctcgcgcgaatcccgcccgagatcgccgccgatccgaagcaacggcaccgtgcccctccccctcgcgagatccgcgaccgccccatcccggcgccgcgggatccacgcctccgccctcgcccttccccacccccacccgctaatctcgcggtcgatccgcgcccggtcctgaccccgcctccgtcctcagcaccgccactccgtcccccatcttcggcgccgccgtctcccgctcccctggcacgcattcggggtccttgcgggcgacaagcacctccgtcccggaggcatctgccgctgcagcatagaccaccatgtcctcgctcggcagcaccgatgttgacgatggcaacgaggaggaggacggctccgcgagcacccccgagatctactgctgccactcccacgcagttcttgctcacgagatctgtgtgcaggttgatgtcctcgtggtgccacgccgacctcgccgccaccaagcgcgccacccatgtcctcaccgacctcgccaaaattctttcctccgcgcctcgggcggccgcggcacaggcgccgccgcgcccgctcgccgcgaagcacaaggacgagccggaccccgacgacggcaggcagagggtcactgtcttcttcggcacgcaaaccggcaccgctgagggctttgccaagtgcatgactcgtgcccgcgccaggactcgttgccaatattgcactcttagtgcaaagaatagctgagcttgttacagataatatgggtggacctgtcaaagatgctaacgacatgctcacaaggtggctggagaagagtactgagctgagaacatcgctacaaacaagtttgttgcctattggttgcatcaagatagggttatcacatcaccgtgccctacttttcaagatccttgcctatagtgttgggattccatgcaaacttgtcaaagggagcaattatactggtggtgatgacgacgatgctataaacataattaagatggacaatgaaagggagtttttggttgatctgatggctgctcctggtgctcttattccagcagatatcttaagttggaaaggcaattcgttaaattctaatcgaaaactcggcctgaatcgaacagctggatcatcaagtactgttgatgctaatgtggatcctactgtattgccacttgaacctaaaggtggccaactgcctttgttcagcagtggtgattggatgtcagacattgattctggatatgaggcagcagaaattgcagcttctactcaaacctcttcgggtgtcacaccatatctgtgttctgctggaagtgtttttggcagttcatggatgctggttaatcatgaccaatcagatggaccatcaacttctgctggtacatcatcgcagcagaaagttgtacctcaaagcgagcatcagcggaatttaaaccgccttccagatctgcaggaaattccagagtcaaaaaacctttttgctgaccttgttccttctggggataataagtccaagaaaacttcagtaccattcaaaggaccagatcataggaacaatgagttgcaaaagcgcagagagaacattgtccctaatgctggaagaccacatcagcggttagttatgaagaattggtctccttacaatgatgtttccaacaacaaacagtacaattatgtcgaggattcgtttgctcgtagaaatgttggtaataatgctgcaccatcatcatcccagatgccacgaccagccgcaagatctaaccttaattctagattgcataatgatgcatcatatcataattatgatagcattatggctggtacctctgccatgaacattacatctacagctgagaccgggaaggttcctgaaagggttatgcgtggtgatttggacaaaggccaaacaaattatagattggaggatcaacatgtcatagttcaaccaccacagggaagacttccatggggtattcctgcagaaggaagcgttccaatgaatagagttcagagtcaagcaaaacaacacttggaaaacatggatgcaaagcaagaccataagaaattgctccctgatccaaaaaaatctccccttgacaaattcatggacacatcattgccttcaagaaacatggacatgaggtcacagaggcttgacttcgatgatgtctctgagtgcgaaattccttgggaagatcttgtgattggtgaaaggattggcttaggttcatatggagagatttactgtgctgactggaatggaaccgaagtagctgtaaaaaaattcttggatcaagatttttatggcgatgctctggatgagtttaggagtgaagtaggtgaacttttatctgtttctatcttggagttttcctaaataaactattcaattttcatatttactcagttcaattgttgatttattgtttgatatacggatatactttttgacaagattcgaattatgcgtcggctgcgccatccaaatattgttctctttatgggtgctgttacacgccctccgaacttatctattgtatctgaatatattccaaggcggcgaccagaatatgcatcaggcgggaggaatggggcggtcgctggagctgctgctgatccagtttttgatgccggataacgacacacgtcggcaggcggaggagcagatccgacggctggcccgtgacccgcaggtggtccctgcgctcgtccaccatctccgtacggccaagacccccaacgtccgccagctcgccgcggtgctactccgcaagaagatcacctcccactggcccaagcttccccctgactccaaggcatcacttaaacaagcccttatcgattcaatcacactcgaccacaggttctttgctaaatacctatcaccaatccttctacgcatgtctgccttagaatctgcacgctttcaattcactcaaattgtgcatttggccatttgcctaaggaacactttgagtgtattctcaacttattagtttgtgctgatcagaattgaactgagaggtccagctttagtgaaccttcctgtttgcgccccaaacaacatagaattttgatgctctattgtgaccgcacaccacaattgctcatataattagttatatatgtcaattggggagaaattctgcttgcgcttcacccaattttggttgagtactgtgaagattatctgcgcaatatattctcatccatgttataaaatggctgatgattaatctttctgctgaactaaattaatcatggttgctctagagctggttgatccaggccgtgctttgttcaattggttacatgataatgcattgtggtcagattatggtaactgatactgtgatataaatatccgatgacctcccatttctggttacttgtggtctagacctaaatctgct

SEQ ID NO: 80865 - DNA, 3056 bp, Zea Mays
cgagcgaccctctgcgctcgcgcgaatcccgcccgagatcgccgccgatccgaagcaacggcaccgtgcccctccccctcgcgagatccgcgaccgccccatcccggcgccgcgggatccacgcctccgccctcgcccttccccacccccacccgctaatctcgcggtcgatccgcgcccggtcctgaccccgcctccgtcctcagcaccgccactccgtcccccatcttcggcgccgccgtctcccgctcccctggcacgcattcggggtccttgcgggcgacaagcacctccgtcccggaggcatctgccgctgcagcatagaccaccatgtcctcgctcggcagcaccgatgttgacgatggcaacgaggaggaggacggctccgcgagcacccccgagatctactgctgccactcccacgcagttcttgctcacgagatctgtgtgcaggttgatgtcctcgtggtgccacgccgacctcgccgccaccaagcgcgccacccatgtcctcaccgacctcgccaaaattggacggatcgaagcaccataataagtgtttagctttcctccgcgcctcgggcggccgcggcacaggcgccgccgcgcccgctcgccgcgaagcacaaggacgagccggaccccgacgacggcaggcagagggtcactgtcttcttcggcacgcaaaccggcaccgctgagggctttgccaagtgcatgactcgtgcccgcgccaggactcgttgccaatattgcactcttagtgcaaagaatagctgagcttgttacagataatatgggtggacctgtcaaagatgctaacgacatgctcacaaggtggctggagaagagtactgagctgagaacatcgctacaaacaagtttgttgcctattggttgcatcaagatagggttatcacatcaccgtgccctacttttcaagatccttgcctatagtgttgggattccatgcaaacttgtcaaagggagcaattatactggtggtgatgacgacgatgctataaacataattaagatggacaatgaaagggagtttttggttgatctgatggctgctcctggtgctcttattccagcagatatcttaagttggaaaggcaattcgttaaattctaatcgaaaactcggcctgaatcgaacagctggatcatcaagtactgttgatgctaatgtggatcctactgtattgccacttgaacctaaaggtggccaactgcctttgttcagcagtggtgattggatgtcagacattgattctggatatgaggcagcagaaattgcagcttctactcaaacctcttcgggtgtcacaccatatctgtgttctgctggaagtgtttttggcagttcatggatgctggttaatcatgaccaatcagatggaccatcaacttctgctggtacatcatcgcagcagaaagttgtacctcaaagcgagcatcagcggaatttaaaccgccttccagatctgcaggaaattccagagtcaaaaaacctttttgctgaccttgttccttctggggataataagtccaagaaaacttcagtaccattcaaaggaccagatcataggaacaatgagttgcaaaagcgcagagagaacattgtccctaatgctggaagaccacatcagcggttagttatgaagaattggtctccttacaatgatgtttccaacaacaaacagtacaattatgtcgaggattcgtttgctcgtagaaatgttggtaataatgctgcaccatcatcatcccagatgccacgaccagccgcaagatctaaccttaattctagattgcataatgatgcatcatatcataattatgatagcattatggctggtacctctgccatgaacattacatctacagctgagaccgggaaggttcctgaaagggttatgcgtggtgatttggacaaaggccaaacaaattatagattggaggatcaacatgtcatagttcaaccaccacagggaagacttccatggggtattcctgcagaaggaagcgttccaatgaatagagttcagagtcaagcaaaacaacacttggaaaacatggatgcaaagcaagaccataagaaattgctccctgatccaaaaaaatctccccttgacaaattcatggacacatcattgccttcaagaaacatggacatgaggtcacagaggcttgacttcgatgatgtctctgagtgcgaaattccttgggaagatcttgtgattggtgaaaggattggcttaggttcatatggagagatttactgtgctgactggaatggaaccgaagtagctgtaaaaaaattcttggatcaagatttttatggcgatgctctggatgagtttaggagtgaagtagattcgaattatgcgtcggctgcgccatccaaatattgttctctttatgggtgctgttacacgccctccgaacttatctattgtatctgaatatattccaaggcggcgaccagaatatgcatcaggcgggaggaatggggcggtcgctggagctgctgctgatccagtttttgatgccggataacgacacacgtcggcaggcggaggagcagatccgacggctggcccgtgacccgcaggtggtccctgcgctcgtccaccatctccgtacggccaagacccccaacgtccgccagctcgccgcggtgctactccgcaagaagatcacctcccactggcccaagcttccccctgactccaaggcatcacttaaacaagcccttatcgattcaatcacactcgaccacaggatgcaaagatttttcaaaggaactttgtgattgatctattaagttacgaggacaattcataccgctatgccatccctgcaaacatacaacagggacttatataggtctacatgatattgatggttgcaatgtagtggtgaaagggatagattaaaataacaaaatttatatgtatagccaggatcatcaatggattacaaaatcttttctcataacaatataacacatttatatataagttatgatgatattatatgtttccgttg

SEQ ID NO: 80866 - DNA, 3343 bp, Zea Mays
gcacttttgggcgtggagatcttgtgcatgactcgtgcccgcgccaggactcgttgccaatattgcactcttagtgcaaagaatagctgagcttgttacagataatatgggtggacctgtcaaagatgctaacgacatgctcacaaggtggctggagaagagtactgagctgagaacatcgctacaaacaagtttgttgcctattggttgcatcaagatagggttatcacatcaccgtgccctacttttcaagatccttgcctatagtgttgggattccatgcaaacttgtcaaagggagcaattatactggtggtgatgacgacgatgctataaacataattaagatggacaatgaaagggagtttttggttgatctgatggctgctcctggtgctcttattccagcagatatcttaagttggaaaggcaattcgttaaattctaatcgaaaactcggcctgaatcgaacagctggatcatcaagtactgttgatgctaatgtggatcctactgtattgccacttgaacctaaaggtggccaactgcctttgttcagcagtggtgattggatgtcagacattgattctggatatgaggcagcagaaattgcagcttctactcaaacctcttcgggtgtcacaccatatctgtgttctgctggaagtgtttttggcagttcatggatgctggttaatcatgaccaatcagatggaccatcaacttctgctggtacatcatcgcagcagaaagttgtacctcaaagcgagcatcagcggaatttaaaccgccttccagatctgcaggaaattccagagtcaaaaaacctttttgctgaccttgttccttctggggataataagtccaagaaaacttcagtaccattcaaaggaccagatcataggaacaatgagttgcaaaagcgcagagagaacattgtccctaatgctggaagaccacatcagcggttagttatgaagaattggtctccttacaatgatgtttccaacaacaaacagtacaattatgtcgaggattcgtttgctcgtagaaatgttggtaataatgctgcaccatcatcatcccagatgccacgaccagccgcaagatctaaccttaattctagattgcataatgatgcatcatatcataattatgatagcattatggctggtacctctgccatgaacattacatctacagctgagaccgggaaggttcctgaaagggttatgcgtggtgatttggacaaaggccaaacaaattatagattggaggatcaacatgtcatagttcaaccaccacagggaagacttccatggggtattcctgcagaaggaagcgttccaatgaatagagttcagagtcaagcaaaacaacacttggaaaacatggatgcaaagcaagaccataagaaattgctccctgatccaaaaaaatctccccttgacaaattcatggacacatcattgccttcaagaaacatggacatgaggtcacagaggcttgacttcgatgatgtctctgagtgcgaaattccttgggaagatcttgtgattggtgaaaggattggcttaggtacttattttgctaccaagttttgatatacactcttctgcttttgaactactcccttcggtttcgttttaactgaggtcctagccttttttgtgtgaatgttaattattgatgttttacctattataactattttatgaccatgctacccttcattaatgataagctaacgcctcgtttcctccaacgtttcgtttgccgttccatgctagcgactgataacaagcagtacgccagccaaaaacagcaaggcgcgaatcgcgatagaaaaaaaacggcagtgcgacaatgtaaaatagtgtcctgaaaaaaaatgccaagctatgtaaaatatgccatgcaaaaataaacgtgctatggcaagactcgaacccaagtgctcgggtgtttttgctatagcaagcaaccagtaggcatcaaagcagatctggttgaggtggccacgatacatatttaataagggtacaacaggaaatcacacataattaatcactccttggtatgctaaatcatgtcctaaatgtcaattaaaacgaaactggagggagtaataacataaagctgttttggaaactaattttaaatatgctgaactgtatttcaagttgttagctttgatgggtatgctttttattggttgaataggagtgggttggttgcttgaacttgcaccttcctgatctctgcatgaaaactattgattgatttgcttcgttcaataggttcatatggagagatttactgtgctgactggaatggaaccgtaagtagttcattcacccattttagttttttgtatcttgagcttggccatttgttcaagatgttctgtggaagccataaaagaatcagatgagaaaccaaatcatggtcaatgcactgaagttttcatttattttcaggaagtagctgtaaaaaaattcttggatcaagatttttatggcgatgctctggatgagtttaggagtgaagtaggtgaacttttatctgtttctatcttggagttttcctaaataaactattcaattttcatatttactcagttcaattgttgatttattgtttgatatacggatatactttttgacaagattcgaattatgcgtcggctgcgccatccaaatattgttctctttatgggtgctgttacacgccctccgaacttatctattgtatctgaatatattccaaggcggcgaccagaatatgcatcaggcgggaggaatggggcggtcgctggagctgctgctgatccagtttttgatgccggataacgacacacgtcggcaggcggaggagcagatccgacggctggcccgtgacccgcaggtggtccctgcgctcgtccaccatctccgtacggccaagacccccaacgtccgccagctcgccgcggtgctactccgcaagaagatcacctcccactggcccaagcttccccctgactccaaggcatcacttaaacaagcccttatcgattcaatcacactcgaccacaggatgcaaagatttttcaaaggaactttgtgattgatctattaagttacgaggacaattcataccgctatgccatccctgcaaacatacaacagggacttatataggtctacatgatattgatggttgcaatgtagtggtgaaagggatagattaaaataacaaaatttatatgtatagccaggatcatcaatggattacaaaatcttttctcataacaatataacacatttatatataagttatgatgatattatatgtttccgttg

SEQ ID NO: 80867 - DNA, 1858 bp, Zea Mays
caggaaaccactcccgatctctcctcccacttcctcttctgcccctccaacctctcctcttcctctggtctctggacaaccaagccagagaggagcagccagcgacaacctcctctcctctcctcccctcttattccgcgcccagcagcgaggcatggtggagaaggcgaggaccatggcgcgcaggctggagatcccccagtggaaggccgacggcctgccgtcgccgacgagcccgctggaccgcgcgtcggcgtcgccccgtgggtggcgccaccgcgacgccgtaggaggaggcgtggggctcgggatcctggcggcgctcgaggccgagggcccgccgcagcccgcgccgagggtgtccatcccgcggcgcgcggcgcggctggaggtgtcggagctcgggtgcagcgggcgctgcgccaccagcctgtgcggcggcgtcggcccggcccccgcccggcccggcggcggcgcggcgttccgcgtcgcggagttcctgtcgtgctgcgacatgtgccggcgggcgctggacgggagggacatcttcatgtaccgcggggagaaagccttctgcagcatggagtgccggtaccacgccatggtgagcgacgagttccagcaggagaaggagcgcaagcgccgcgccgccgtgtcccggacttcggccgcggagatggccgggtcgccgtgcagcggcggcggcggcggcgggcagatcttcttcaccaccggcatcgtcgccgcctgatgggcgggcgggcgggcggatacggatccgtcttctctggtctagtgatacaaaacaaaagaaaaaatatccagctagaggaaccggcggccgctgtaacataaacctgacaagaaaaaaaaaccaagaggagaaataaggacggatgggtgcgtgcgtttgtgtagagcagagaaatgggcgcgggggaattttgctcgtcctctcctcttcttcggtagaggaggaaccgaggcagggagggtttatttcatctgtggattttttttttgtattattattagtaaattatagtagtaccactattatcacgacgatgatgggcgggatgagatgttctgtagcagcagggaagggggaggggggatgatgtgacaagttttccaaggattgttgcttcccttttgtttctcctctagtcctctgctctgcccaagggaataaaactcctcgcttgttcaaatccgttccacactccatggtgttggtgtttgcgttgagaaacctcttacaacaagtatctgatgacgagttgtatactacttgatgacgattgacgagttgagccttttttctcatcatacggagatgaactcttgcggttcttgttcaaagagtaagaaaccgatttgtgaacctgggttctcctggttgcccagacacaaagaaacagtgacctgcggggagcagtatacgcttccctcgggtgcccgtccgtcctagcaaaagcaccaagcggaagcagtctcgttgtgggggagaggagacgagttcaaaccaaccaataattggtggatgcatctaccatatgggctgtggacgtacgtggactgctgctgccactgctggctattggcgtttgcgtgtccatggatcaccattgacacttctggctcggcctagcctgcatgagtcttttcttcttctttgaatcttgagctgcatcagtttttgcaaaacgactcctgcgctgagagtctctgcagttagatgtataagatagtagatgctataatttatgtactgttggaacaatcctggatcagtatacctaacctaacatatactataaacgtgtacaattctttcctacaagcaactttttcc

SEQ ID NO: 80868 - DNA, 1638 bp, Zea Mays
ctcacgttcatatatggtgccggccgcccagctataaatagacggcaagctaagggcaatgccgcactgggcacataacaatacatgcatgtacaaagatctgaataataatgggttcgctccgtgatggcaagaccaacagcagcagtggccggcggtggtgcgcggtgaccggcggccggggcttcatggcgaggcacctggtggccgcgctgctgcgctccggcgagtggcttgtgcgggtcaccgacctcgccccggatgtcgtgctcggcctcggcgacaccgaggacgtcctcgatgacgccctccgtgatggccgcgccgtctatgcctcagcggatgtctgcaacctagaccagcttattcaagcttttgaaggggttgaggttgttttccacacagctgctgcggatccaagcaagaacgaccagcaacttcactataaggtcaacgttgaggggacaaagaacgtggttgatgcgtgcatgatttgcaaggtgaaaaggcttatccacaccagctctattgctgttgtgttcgacggagttaatgggcttctcgatgcaaatgaatcattgccatacccagacaagtttcctgatgcgtatggacaaacaaaggcagaagcagaaaagatagtcatgaaggctaatggcattagtggccttctaacttgttgcatacgtcctggtagcatttttggccctggtgacatagttatactaccaactctggaccaatgtggaaaaacacactttgtttttggtgatgggaagaattgtgatgattttgtatatgttgaaaatgtggtacatggccacatttgtgctgaaaaaactctttctacaatggaaggcgcaaaaaccagtggtggaaaagcctactttataaccaatacggaaccaatgaacatgtgggactttctatatctgcttcaagaagaacttggatacaaaaggttgttcaagataagaatacctttgattgtcatccaggcagtaagctatttggtagagtggggatacaaggttctacaccattatggaatgtgccagcctcaagtgctaacaccagcaaggatcaagtatctgacagttcatagaacattcagttgtaacaaagctgctgaagaacttggctacaaaccaattgtgacacttatggatggtatgaagctagcagtcaaatcatatattcggttgagaaatcatgcagatttatcttacaaacatatataaaagtatacagggaaagttataccaccataaactactaagatgcctccgagtatcctgataaagtggttggagcccgactgccgccaaaccccttccctgggacctgcaatggccccaacaaaggcaggtgtccatcattccagggagctcaatcgtagagccccaaagggtaaaagctattctagccaacacgtccaaaggatcagcctaagaccctgaagccctggagtgctctaggctatgggacattcccacatttaacttttgatcaccacaatttaggtggtgtttggctcgccaaaatgtaacgtaaatagattacatggataatagataacgatacttttgtttggttgagctctttctagtaacactaggtactactatccaatctaat

SEQ ID NO: 80869 - DNA, 1636 bp, Zea Mays
cataacaatacatgcatgtacaaagatctgaataataatgggttcgctccgtgatggcaagaccaacagcagcagtggccggcggtggtgcgcggtgaccggcggccggggcttcatggcgaggcacctggtggccgcgctgctgcgctccggcgagtggcttgtgcgggtcaccgacctcgccccggatgtcgtgctcggcctcggcgacaccgaggacgtcctcgatgacgccctccgtgatggccgcgccgtctatgcctcagcggatgtctgcaacctagaccagcttattcaagcttttgaaggggttgaggttgttttccacacagctgctgcggatccaagcaagaacgaccagcaacttcactataaggtcaacgttgaggggacaaagaacgtggttgatgcgtgcatgatttgcaaggtgaaaaggcttatccacaccagctctattgctgttgtgttcgacggagttaatgggcttctcgatgcaaatgaatcattgccatacccagacaagtttcctgatgcgtatggacaaacaaaggcagaagcagaaaagatagtcatgaaggctaatggcattagtggccttctaacttgttgcatacgtcctggtagcatttttggccctggtgacatagttatactaccaactctggaccaatgtggaaaaacacactttgtttttggtgatgggaagaattgtgatgattttgtatatgttgaaaatgtggtacatggccacatttgtgctgaaaaaactctttctacaatggaaggcgcaaaaaccagtggtggaaaagcctactttataaccaatacggaaccaatgaacatgtgggactttctatatctgcttcaagaagaacttggatacaaaaggttgttcaagataagaatacctttgattgtcatccaggcagtaagctatttggtagagtggggatacaaggttctacaccattatggaatgtgccagcctcaagtgctaacaccagcaaggatcaagtatctgacagttcatagaacattcagttgtaacaaagctgctgaagaacttggctacaaaccaattgtgacacttatggatggtatgaagctagcagtcaaatcatatattcggttgagaaatcatgcagatttatcttacaaacatatataaaagattatcattatggcataggatgcctcatgctgacgatatacaacagcttttgagaattgtcataagcgaagtatacagggaaagttataccaccataaactactaagatgcctccgagtatcctgataaagtggttggagcccgactgccgccaaaccccttccctgggacctgcaatggccccaacaaaggcaggtgtccatcattccagggagctcaatcgtagagccccaaagggtaaaagctattctagccaacacgtccaaaggatcagcctaagaccctgaagccctggagtgctctaggctatgggacattcccacatttaacttttgatcaccacaatttaggtggtgtttggctcgccaaaatgtaacgtaaatagattacatggataatagataacgatacttttgtttggttgagctctttctagtaacactaggtactactatccaatctaat

SEQ ID NO: 80870 - DNA, 1096 bp, Zea Mays
ctaagagcgccttgacactaattaactaatggacaaagaacgtggttgatgcgtgcatgatttgcaaggtgaaaaggcttatccacaccagctctattgctgttgtgttcgacggagttaatgggcttctcgatgcaaatgaatcattgccatacccagacaagtttcctgatgcgtatggacaaacaaaggcagaagcagaaaagatagtcatgaaggctaatggcattagtggccttctaacttgttgcatacgtcctggtagcatttttggccctggtgacatagttatactaccaactctggaccaatgtggaaaaacacactttgtttttggtgatgggaagaattgtgatgattttgtatatgttgaaaatgtggtacatggccacatttgtgctgaaaaaactctttctacaatggaaggcgcaaaaaccagtggtggaaaagcctactttataaccaatacggaaccaatgaacatgtgggactttctatatctgcttcaagaagaacttggatacaaaaggttgttcaagataagaatacctttgattgtcatccaggcagtaagctatttggtagagtggggatacaaggttctacaccattatggaatgtgccagcctcaagtgctaacaccagcaaggatcaagtatctgacagttcatagaacattcagttgtaacaaagctgctgaagaacttggctacaaaccaattgtgacacttatggatggtatgaagctagcagtcaaatcatatattcggttgagaaatcatgcagatttatcttacaaacatatataaaagattatcattatggcataggatgcctcatgctgacgatatacaacagcttttgagaattgtcataagcgaaggtctgccgtgattatgtttccaataaataaaaaattcggtgtttacaactcgcatcaatgtcctgatcaaaaacccagcatgttgtattctgatttagtagcaaagatagattgtaactccttaacaatgatcaggcatgtatttcagatatgttaattggaacacaaataatattactatctgtatatgtattgatcacctttgtgtgaaat

SEQ ID NO: 80871 - DNA, 1350 bp, Zea Mays
aaagcgccaagcagattctgctatgcatgagcgcgcgaaagatggttgctttcttttctctctggcacgcagtgtagaaacagagatgaaatcgaggggaaattttcacctgtgtgtctgagtctgacactgcaagagttgccttggatttttgggggcccatcgtcgtcatgggcatcaaaagtgcatactacctcacagtgacagtactagtagctcatagcaacaagaaaatgggagtaattaattaattgtagcagaggagataatatggatagatatatatatagcgtacgtcgtggacagatgcaattgagaagatgagctcaagtcaaaaatgaaaagggaggtccctggctggtggtggcactactggcatgatatagctactgtactggtacaggtactaagctaagacaagacgaaggggttggttgatctggaagctgcctaattaaacaggtcagtcgaggccggacctgatcctcttgtgtccggcggcgcccgcctggcggacggtgccgacggacccgccctcggacgcgccgtcggatgcggcgaagagcgaggagaggtcggcgtagaggtcgacgacgcggcggatgttgttgttgagctccctgatgaggccgacgttgcgggagaggtcgccgggcaccttggactcgtggttgtggttgatctcgctgatcaggaggcggttctggtccagcagcgtctgcacctgcacgaagctggtctggaacgcgtgcagcaccttggtgtccacgccgccgacgccgaacccggacagcgtcgtctcgccgtcgccgccctccatggaacccggacagctgctgctggtggtcgtcggcgtactagtcttggcaattctgcactctttgtcagcagccgcgcagagtctcctcctcgccgtcgtcgtcgtagtactcctccgtagcacccaccagcacctccgtagccggggaggggaggagaaggacagggaggaaggagatcaggagatcctcagacacacgaaacaggcagaggcaggctggactgctttcttctgttttttttttcttttcttcctactagtaggagtattttttttattgtcggccgtgagatggagagaatcttttggcttgcgacggcggcgagggagggcgacattttaggaggcacgtttctgcttctgcccgcgtctcagtctcagcgtctgctgtctgtctgtgtctgctatcatcgccctctgcgtgcgccgcccgctggatgcgttgtacgcggctgtctcctgatatttctgcatcgcatttgacgggcatgagtatctatatttgtttatttatgtggtctttgctactc

SEQ ID NO: 80872 - DNA, 4793 bp, Zea Mays
ctcaaatgctatgagttaagaacaaggcaacacaaaaaatgttaaatgctaatgaccttcgtccttcgaggcattatttcccttaggatataatgatcttcggacgaaggttgtgaaggacataccttcatcagtgcaacatatgataatgaaaagaggatcatatgaaatgtaaaagacacatgaataattatatattattattaactcatttctattttattatcatagaaaaatagaaatgatatcaagttacaaatgtaccttcggtttgaaagaaggtaagggtacaagcgtgacgcaaaagcaaatgtcaagtcagcgtgaacagtacgggagcactgttcatctatttataggcacgagacgcagcccatgtaaaattacactcatgccctttacatttgctaatgactctatagtaatccatcgaggtctaaatagctttttcccttttaagtcggttcccctttctgctatcatgccgaagctcccctgcgcacagcttcggctctgcgccaaccttcacattctttgtacttcttcacattgtggctctgatccgagtccgaaggtacctgttcatgtattatcctccagaaacattgttaaatcatgtttttgaggaccttcgaaagacgaatgcccccaacaatgcagaactgtaaatgatattgtttgatactatttataaagttaagtttgaaataatgtattaaatagggaataaaataggggatcgagtagagatagccttacgctggctgaataaatctgagatggttgtgcagttgtgcttgcgagttgcgagctgcaaaactaaaaagtgaacatatctggtacaaactaacctttacgtgcaaatgtgcaaacttttaatctgggccacatgatgttgatccaaggaacacagaggcatgaataattttgtacttaaccgtccgctgctaaccacattttttaaattctctctctcactatttcatctcggtacactccttagatcaacattatgtgattcagattaaaattttacacggttgcacgaaatatgtttccaactaaaaaaacagggaacccggatggagcgagggacctggaggcggagggtgaaaaatgaaaggagacgcatgactggaaagggtggcttttgctgcgtctttcctttgacgtcagcgagcgaagaactacttctttccctccctctctcatcattctcagatctcccgctccctccttcccttcatctctctgaatcctgctgcccacctcgccgtcctcgcattccgccgctcgctctcgcgatccggcagcttcctcttcgccgtcgttcttgcctcacctcgtccgctatcctgtaagctgctgctgggtcacccgtggctggactcgaccccgccggcgccgcctccgggggctgggttcgccggatgtttatcggctcctgatccatccggatcccggatccgccgcaaaggcaccgcctttgtaggttctccgggcccatgcaggagggtttggcgattcggcggtgaggcagggctctggtttagttcttgcgttggactagcccggagatgcttcgtggaacggggcacggcggcggggatgcgcggaggcgggcactgcgctcgtcgcggcggcgtctgcccgggtggatctggtggcttctcgggatcttcctccttgtcgggctcatgctcttcgtccttcaccacaaccaaaaggagcagttccggccgcccgtcgtggataatggttcagagatggaggaagtccctcgtgagaaagtgaatttctcagaagagcttttgagcagcacatcatttgctcgccaattagcggatcagatgactttagcaaaggcgtatgtcatccttgcaaaagagcatgataatcttcagcttgcatgggagcttagttcgcagataaggaattgtcaaagattgctctctgaaggggcagttagtgggagagcaatcactaaagatgaagcccatcctataataagccggctagcactgttaatatacaaggctcaggactctcactatgatatcagcacaacaatagtgacattgaagaaccatgccctggcactagaggagcgtgcaaaggcagcaattgttcagagtgctgagtttggccagttagcagcagaatccttcccgaagaatctgcactgtctaactgtgaaactgacagaggagtggcttcggaacccgaagcataggagtcgctcagaggagaaccggaattccacacgattggtggataataatctgtatcatttctgtatattctctgataatgtgctggccacttcagttgttgtcaattctacagtctccaatgcaaatcaccctcaacagcttgtgtttcatgtggtcactgacagaatccattttggcgcaatgtcaacattgttcctcataaatgacttcaaaggttgtactgttgaagtccgatgcatagatgagttctcgtggttgaatgcttcttcatctcctcttgtcaggcaactatctgaggttgaaactcagggttactattactcagctggttccaagaatcctgaaagagaaataaaattccataatccaaagtttgtttctctactgaaccatttacggttctacattcctcagatacttcccaacttggagaaggtggtgtttcttgatgacgatgttgtggtgcaaaaggatttgactcagctgttctccatagagctgcatggcaatgtcattggagcagtggaaacttgtttagagtcgtttcatcggtatcacaagtatctaaatttttcgcatcctactatcagctccaagattgatccacatacttgtggatgggcttttggaatgaacatttttgacttgatagcttggaggaaggcaaacgccacatcattgtatcattattggcaagagcaaaattctgacctattgctctggagaacaggaactcttcctgcaggccttttgacattttatggcctgatggagcccctagaccgcagatggcatgtcttgggtctcgggtatgatgtagacatagatgatcgtctgattgagagtgctgctgttgtgcactataatggaaacatgaaaccctggctgaagctggctattcgccgttacaagtatatatgggaacggtatgtgaatatctcacacccgtatgttagagagtgtatgttgcattagaaagtctgcaaatctctgtatgttcttgcatggcactgaagctgcatgcttcagtttcttcacatgaggctgcttttgagcaccttatgtgccggaaagttccagaggtagaatatatactcaagggacagcatcaaagaagtcaactgttaagttttctttttgggttgggagaagattcattttgggatgaaaataattcctttgcagagtttacatacaatttggactggaaaatttagcagtctaaccagatacatctggatagatactgtaaaagagatacagttggatcaatggacattcttttttttagatttaggaaatgcaaattgtgagctcaactgtgcagggccagtggtgttggattcttttagtaatatcttgttttataccggcgaagaaggctctgcctccctcgtataagtagctcctttgtgcttattcgtacactatgaattcagttggatttcatacactatggcatccttcttttcagaggaaaatgcatgtaggtagatccagatctggtcggcaggttttcatgtgtttcgtttttcatgtgccgtctgcaatgcatgcgtgcttcatcatgatctacacatatattacgtgtgaatggaagaaagacgtctcatgtgtttgagcgacacggattgcatctccgcagctgggaacggctaaggtccctcgttcggttgttaaggattagctcggcacgattcttagccgcattgtttctataatttatataaacttttatttatcagccgaaatgatttcagatgtaatcaaagaaatctcgaaagcgttgttgcggtaatagacttggtaccgttagaactaatctattgtgatttattctaattgagttgttgaaagatggcaagagatacttcatagatgattgtactagattttgctacatgtacttgttaaaatcaaatgataaatcattacatcatttaaaatctataaagttgaggtaaataatcaattagagaaggaaattggacggttacggtctaaccgtggggatattccttaaatgagttttctgagtttttttatggaacatgatattattcgtgagagaacatcgtcattctcaccacaatttaatgagattgctgaaagaaagaaatgtgttctacctgaattagtatttacatgttagagacaatagaattatctaagtaacggtggggtgaagcaaagatgacagtgtattatattatattctaaataaagtgcccacaaagaacaaaaaattacactattcgaggaattaatggataataagagatacaagggattgtaatgtacaattttcttacctttgtttgtcactaccgatggcttggaggcataagaaattgcattggagtgatatagaaaatactagaatatgtacgataacaagtaagatactgtgcaaaattgcactagcatacagaaaattgtcccaaggacaatgcccgaaaagataaggcattcatatctgcaacaaccactagtacaatttggctctatacaagcggtagactttttacatcacaggcggttcggttagaaaaccgcctg

SEQ ID NO: 80873 - DNA, 3830 bp, Zea Mays
tggcattagtctccagagtatggctgtatggctgggtggtataggctcttgagtatcagagtactttgccctagatctttattgccatttttcagttttggatccacttttccattttatggaaatcttagttgccacatcctatttctttatggtagaaagtgtttttggttaatcatgattggttgttagaaatggcaaacatggtatgtgattttaggagttcatgtagcatgatagatagtctgtccctgtactttttttggtgatctgttcaagcacttaggtagggtgtcgttctcacaaggcggtttcacatcctcactgttaataacaaatactattcacgtactaggaagatgagtgctttcttctcatctggggtggacatgtaacagagaagacctaatctgtattatatgtcaatgttcagtagtatgtgtaaattgtgatgtcgtactttgataagttcaagtgattatttagggccttcttgttgtatctgaacactcccaaaagtatggcatttggcagccatcattcataatttcttttttatgtttcttttggcgtcaagcaactttcagtaacacttaagccttctctctctctcttaatttgtaatattttaatggcatggatttgaatcgcttcactgaatttcttattatagcaataaatcgtacctgtgatacctgtttgatgagccttttgaaactgcacaattgagagttgaagatgccaaagagaaatcagatgaatcatgaatagaataggatactgccaaggataatggttcagagatggaggaagtccctcgtgagaaagtgaatttctcagaagagcttttgagcagcacatcatttgctcgccaattagcggatcagatgactttagcaaaggcgtatgtcatccttgcaaaagagcatgataatcttcagcttgcatgggagcttagttcgcagataaggaattgtcaaagattgctctctgaaggggcagttagtgggagagcaatcactaaagatgaagcccatcctataataagccggctagcactgttaatatacaaggctcaggactctcactatgatatcagcacaacaatagtgacattgaagaaccatgccctggcactagaggagcgtgcaaaggcagcaattgttcagagtgctgagtttggccagttagcagcagaatccttcccgaagaatctgcactgtctaactgtgaaactgacagaggagtggcttcggaacccgaagcataggagtcgctcagaggagaaccggaattccacacgattggtggataataatctgtatcatttctgtatattctctgataatgtgctggccacttcagttgttgtcaattctacagtctccaatgcaaatcaccctcaacagcttgtgtttcatgtggtcactgacagaatccattttggcgcaatgtcaacattgttcctcataaatgacttcaaaggttgtactgttgaagtccgatgcatagatgagttctcgtggttgaatgcttcttcatctcctcttgtcaggcaactatctgaggttgaaactcagggttactattactcagctggttccaagaatcctgaaagagaaataaaattccataatccaaagtttgtttctctactgaaccatttacggttctacattcctcagatacttcccaacttggagaaggtggtgtttcttgatgacgatgttgtggtgcaaaaggatttgactcagctgttctccatagagctgcatggcaatgtcattggagcagtggaaacttgtttagagtcgtttcatcggtatcacaagtatctaaatttttcgcatcctactatcagctccaagattgatccacatacttgtggatgggcttttggaatgaacatttttgacttgatagcttggaggaaggcaaacgccacatcattgtatcattattggcaagagcaaaattctgacctattgctctggagaacaggaactcttcctgcaggccttttgacattttatggcctgatggagcccctagaccgcagatggcatgtcttgggtctcgggtatgatgtagacatagatgatcgtctgattgagagtgctgctgttgtgcactataatggaaacatgaaaccctggctgaagctggctattcgccgttacaagtatatatgggaacggtatgtgaatatctcacacccgtatgttagagagtgtatgttgcattagaaagtctgcaaatctctgtatgttcttgcatggcactgaagctgcatgcttcagtttcttcacatgaggctgcttttgagcaccttatgtgccggaaagttccagaggtagaatatatactcaagggacagcatcaaagaagtcaactgttaagttttctttttgggttgggagaagattcattttgggatgaaaataattcctttgcagagtttacatacaatttggactggaaaatttagcagtctaaccagatacatctggatagatactgtaaaagagatacagttggatcaatggacattcttttttttagatttaggaaatgcaaattgtgagctcaactgtgcagggccagtggtgttggattcttttagtaatatcttgttttataccggcgaagaaggctctgcctccctcgtataagtagctcctttgtgcttattcgtacactatgaattcagttggatttcatacactatggcatccttcttttcagaggaaaatgcatgtaggtagatccagatctggtcggcaggttttcatgtgtttcgtttttcatgtgccgtctgcaatgcatgcgtgcttcatcatgatctacacatatattacgtgtgaatggaagaaagacgtctcatgtgtttgagcgacacggattgcatctccgcagctgggaacggctaaggtccctcgttcggttgttaaggattagctcggcacgattcttagccgcattgtttctataatttatataaacttttatttatcagccgaaatgatttcagatgtaatcaaagaaatctcgaaagcgttgttgcggtaatagacttggtaccgttagaactaatctattgtgatttattctaattgagttgttgaaagatggcaagagatacttcatagatgattgtactagattttgctacatgtacttgttaaaatcaaatgataaatcattacatcatttaaaatctataaagttgaggtaaataatcaattagagaaggaaattggacggttacggtctaaccgtggggatattccttaaatgagttttctgagtttttttatggaacatgatattattcgtgagagaacatcgtcattctcaccacaatttaatgagattgctgaaagaaagaaatgtgttctacctgaattagtatttacatgttagagacaatagaattatctaagtaacggtggggtgaagcaaagatgacagtgtattatattatattctaaataaagtgcccacaaagaacaaaaaattacactattcgaggaattaatggataataagagatacaagggattgtaatgtacaattttcttacctttgtttgtcactaccgatggcttggaggcataagaaattgcattggagtgatatagaaaatactagaatatgtacgataacaagtaagatactgtgcaaaattgcactagcatacagaaaattgtcccaaggacaatgcccgaaaagataaggcattcatatctgcaacaaccactagtacaatttggctctatacaagcggtagactttttacatcacaggcggttcggttagaaaaccgcctg

SEQ ID NO: 80874 - DNA, 297 bp, Zea Mays
ggtcagcaaccaatccataccatcacggggtgcaaccgaaacaagacgaagggatacgacaacaacttaagatgaaggttcaggcacacgacttgccgtgaaatttagagacagcttacaaccccatgcaggacgggaagtttgccacagagaaatcaaccatgcgcacaaagcattgcacggggtacacacatgaaatgacaacggttgttcacgattcagacatagcacgcagcaggcagcggcgaggagatggagggcgaccggcggcggggtcggtgggactgcggctgctcc

SEQ ID NO: 80875 - DNA, 1948 bp, Zea Mays
ggtcagcaaccaatccataccatcacggggtgcaaccgaaacaagacgaagggatacgacaacaacttaagatgaaggttcaggcacacgacttgccgtgaaatttagagacagcttacaaccccatgcaggacgggaagtttgccacagagaaatcaaccatgcgcacaaagcattgcacggggtacacacatgaaatgacaacggttgttcacgattcagacatagcacgcagcaggcaggggaggataactttggtgagcgcaccagcacgggccgtaaggaagttgccagtgttctgaccatcagccctgtggtagttattggtttggctggtaaccccagcagcaacctgcttggccgcatcagtctttgcagcagatggtttctcaacaggtggagcacttgcagctggtgccactgctggtttggggggctcaccgcttccaaagagataacccagagaactttgaccaccaccggcactaccaccacggctcatcttgattattgaaaagagaaactgtacaaagatctaatcaggtatcaagcattacttcgacacattgtataaaggtacaagagagacaatgcaaatcaatttaatttcaagtaccacaaataatttttaaaatactaaagtatgtttcgatctgccaccaacacttggtaaggatataattctccaagaacaaagtaaaacagagaagatatagtttgacaggatcaactctattaaactttattaggtactgtaactacaaacagatgaaaacatcaaaacatatctcgatctgtcatggaatcttggtaacgatcttattaaggatgtaacgaaccgatcttccagatatacttttactcagatactcagatagagtgatagacactgatttccttctatgttgcatgtttgtgcagaaaactgatgcaccaacaaatgtaaaactaaacagattgatagaacaatcaaggaaaataaagcatcttcggtttaactctgccaagtaacaaagttcaaaagaacatctgcctagtcatatatgacaggtccttgtacaattctatgaaaccgggaatgtggaaccatgtggggttccatggcccgatcgggaatgggaccatatggaacatcgtatggaaccatggttgggacacagccctcactcgagtaggatgtcggataaaccatcatcctgcacaagcaaggggcatgtaccttcgcggaagcggagcaccacgaggatattggaggagcagaggtcagaggactggcaaagcactaagacaaagggatcgctaaccatgtgctcatattacatgaacaaacagttaatcatgtgctcacgttgcattgaattatttttttctatacaggaatatttactagttggctgtttcaggaacctcgttccacattatagttccaaaattttacggttgacgttccggttatcgaataaaccatacaaggagccagtgatacgcaaccagtgatacgaggttacctaaacaattaggtctaacctagacacaacatgaaacgaaaaaaatcgacggatcaaccaccgaagaccgcaatgcacaacagatcttcatctttctctggagaatctaagccgcaacatactccgaagaatctaatgcgtacagccgcaacagccgcattcacggtccctagggaggggataccctgcggatcgacgacggtgagtcacaaaattcaacagatccgcgtctaccgacaagcagcggacgctcggaagccagaaatggacgcggatctcaaccttgcggctagattcgggcgcttacggcgcaaatcaggacatggaagcgagacaacgaaccgagggttgagcgggcaaaggaaagggccttaccgagaggcagcggcgaggagatggagggcgaccggcggcggggtcggtgggactgcggctgctcc

SEQ ID NO: 80876 - DNA, 1287 bp, Zea Mays
ggtcagcaaccaatccataccatcacggggtgcaaccgaaacaagacgaagggatacgacaacaacttaagatgaaggttcaggcacacgacttgccgtgaaatttagagacagcttacaaccccatgcaggacgggaagtttgccacagagaaatcaaccatgcgcacaaagcattgcacggggtacacacatgaaatgacaacggttgttcacgattcagacatagcacgcagcaggcaggggaggataactttggtgagcgcaccagcacgggcatcagttgccaccgaacaggtagcccagggaagagccaccgccaggagcagcgtggaccttggttgaaggacggtcctgcaatcattcataaacaacaaaaccaacagttaagcaggatcaagaaacaagttttgggttccagggagcgattaggtaagtgagcccaacccttcccctgttatttatttattagtttgcaacattgttccatatatgaatctgtagttttgaggaatcataatttgtgtccttgcattgcccaatcagattctgcagcatgacagaactaaaggaattttggttcaatttggtcaatagtttatggaaagacatggtctgcatattttcttcaggatatttaatttttcggcactaacaatgtgttggcatttagtgttgatgataaaatggtatatggctcatgattggtagtctaaaaggtcagcagcccagcaacaatcaagactcggtacaatttaaaaagcaataaacatgactggaagtctttccatcaacatgattctatcgggttgtaagaataagtacagacattacgtgataatgcagcacaaactaccatgatgttttctcaaaacatgattatacataatataagcaccccacaaaatatgacgtcatttctaagcatatcaatggatgatggcaacacataatatgtaaaaagcctatgtgaaatgaaagaacataaagtagcataccgtaaggaagttgccagtgttctgaccatcagccctgtggtagttattggtttggctggtaaccccagcagcaacctgcttggccgcatcagtctttgcagcagatggtttctcaacaggtggagcacttgcagctggtgccactgctggtttggggggctcaccgcttccaaagagataacccagagaactttgaccaccaccggcactaccaccacggctcatcgagaggcagcggcgaggagatggagggcgaccggcggcggggtcggtgggactgcggctgctcc

SEQ ID NO: 80877 - DNA, 2265 bp, Zea Mays
cacgtttctttaccctaaccttttcaccgctcgagccaagggacacagccgccgccgtttcttcatctcccatcttcatagtcgcgctaggcacacaggcgtcggcggcggcgctcaggctcgggatctcagctacagcaaatggcagggcaagcagggaacccagtaaaccaccctataagtccccacgtgataagtggcgctttcgttcagcaatattaccacattttacacgaacaaccagatcaagtgcacaagttttaccaagattcaagtattcttggtcgaccagattccaatggaattatggcatatgtaaccactatgcgtgatattaatgaaaaaatcatgtctatggacttcaggaactgcttaacagagatagagactgcagatgcacaattatctcacaaggatggggtgctcattgttgttactggttccttgacttcggatgaaggcgttttccgtaggtttacccagtcattcttcctagcaccacaagaaagtggtggctattttgttctcactgatgtatttagatttatttcggaaaggaaaccagctgagataaatcaagttgctactcaagaaaatgaaatcagtcagaatgttagacctgcatctgaaacatgttcagcactaccagaacctattccagctgatgggagtgtgatctcagaccatgtgacagctgatagtaatgtcacggagaagcaaataagtgatctttctgctaatgggactgccattgaaagtaatgataatacccagccacctgtgcaagtgcccaaagaggatccaaagaaggccctacttgttgctcctccccctccaactcagatggatgttactaagaaatcttatgcatccattgtcaaggtcatgaaggagggcccaccaactccagttgtcaaaacaacatcgtcagtttccaaacagaagccagctcctaaaccagtgtccacggctgtcgaaggcctagagaaaccatctgagaaacctacccaggctattggaaccggtgatgggattgttgcccaaaacaactcttctcgcaatgagcaaggctattcaattttcatcaagaatttgcctttccatgccaatattgaaatggttgaggaggaatttaagaaatttggtactataaagccaggtggtgttcaagtccggcacaataaggttgatcgatttggttttggttttgttgagtacgagtcccagcagtctatgcaagcagcaattgaggcatctccgattcgtatggcggacaaagaagtcggcattgaggcgaaaagagccaattcacgaggggagtgtaccatggtgataactttagagggcgaggaagtggctatgtggacaacacaaactacagaagcagcggcagcttcaaccgccagaatgaaggggagatgtacaaccgcaggaatgaaggggagatgtacaaccgcaggaatgaaggggacttctacaaccacaggaatgagggggagttctacaaccgacggaatgatggtggcgagaactacaaccggcgcaacgatggtggcgagaactataaccggcgcaatgatggtggcaagaacttcagccgcaggaatgacagtggtaccgagaacttcaaccgcaggaatgacggtggcggcgagaacttcagccgcaggaacgatggtgttggcgagaacttcaacgtcaggaatgacggcgttggtgagaacttcaacaggaggaacaacttcagaaatcagaatgacttccctggacgaggacggggttcacctacaccagggaacagttactaccagaacgggaatgggaggttcagtcgcgtgaacaatggcgccaagcaagctcctgtggccgcgtagaggcatcaaggcggtaggcttacatcaaactaggaagcataaggctacattcaagtgagctgagtgcaaggattattcttagtaggagcattgctgtcagacagcttggttatttttttttgtgccgtgttgggtcgctaagagattagtagttgcagtcgtccgtggatggtaggtgaattttgttgccgttgatgagcttgtcaactgggtgttggaccatggttcgtaactttgtgtcatctgccaatcaggattggtgggaggttagacactaatcttatgaagcggtgactgcaaaaatcagtgtccatgttaaatgctattattgtcatggtattcgataatgcgaagtatgtccatgtttagtgctattattattgccctggta

SEQ ID NO: 80878 - DNA, 2316 bp, Zea Mays
cacgtttctttaccctaaccttttcaccgctcgagccaagggacacagccgccgccgtttcttcatctcccatcttcatagtcgcgctaggcacacaggcgtcggcggcggcgctcaggctcgggatctcagctacagcgtcagcggcttcctctcccgcctctcgccagtcgtctcgcgccctcgcttccgatcctccgcacaccggccggtgaccctgcataagtggcgctttcgttcagcaatattaccacattttacacgaacaaccagatcaagtgcacaagttttaccaagattcaagtattcttggtcgaccagattccaatggaattatggcatatgtaaccactatgcgtgatattaatgaaaaaatcatgtctatggacttcaggaactgcttaacagagatagagactgcagatgcacaattatctcacaaggatggggtgctcattgttgttactggttccttgacttcggatgaaggcgttttccgtaggtttacccagtcattcttcctagcaccacaagaaagtggtggctattttgttctcactgatgtatttagatttatttcggaaaggaaaccagctgagataaatcaagttgctactcaagaaaatgaaatcagtcagaatgttagacctgcatctgaaacatgttcagcactaccagaacctattccagctgatgggagtgtgatctcagaccatgtgacagctgatagtaatgtcacggagaagcaaataagtgatctttctgctaatgggactgccattgaaagtaatgataatacccagccacctgtgcaagtgcccaaagaggatccaaagaaggccctacttgttgctcctccccctccaactcagatggatgttactaagaaatcttatgcatccattgtcaaggtcatgaaggagggcccaccaactccagttgtcaaaacaacatcgtcagtttccaaacagaagccagctcctaaaccagtgtccacggctgtcgaaggcctagagaaaccatctgagaaacctacccaggctattggaaccggtgatgggattgttgcccaaaacaactcttctcgcaatgagcaaggctattcaattttcatcaagaatttgcctttccatgccaatattgaaatggttgaggaggaatttaagaaatttggtactataaagccaggtggtgttcaagtccggcacaataaggttgatcgatttggttttggttttgttgagtacgagtcccagcagtctatgcaagcagcaattgaggcatctccgattcgtatggcggacaaagaagtcggcattgaggcgaaaagagccaattcacgaggtggccgtttccaatctggcaggggagtgtaccatggtgataactttagagggcgaggaagtggctatgtggacaacacaaactacagaagcagcggcagcttcaaccgccagaatgaaggggagatgtacaaccgcaggaatgaaggggagatgtacaaccgcaggaatgaaggggacttctacaaccacaggaatgagggggagttctacaaccgacggaatgatggtggcgagaactacaaccggcgcaacgatggtggcgagaactataaccggcgcaatgatggtggcaagaacttcagccgcaggaatgacagtggtaccgagaacttcaaccgcaggaatgacggtggcggcgagaacttcagccgcaggaacgatggtgttggcgagaacttcaacgtcaggaatgacggcgttggtgagaacttcaacaggaggaacaacttcagaaatcagaatgacttccctggacgaggacggggttcacctacaccagggaacagttactaccagaacgggaatgggaggttcagtcgcgtgaacaatggcgccaagcaagctcctgtggccgcgtagaggcatcaaggcggtaggcttacatcaaactaggaagcataaggctacattcaagtgagctgagtgcaaggattattcttagtaggagcattgctgtcagacagcttggttatttttttttgtgccgtgttgggtcgctaagagattagtagttgcagtcgtccgtggatggtaggtgaattttgttgccgttgatgagcttgtcaactgggtgttggaccatggttcgtaactttgtgtcatctgccaatcaggattggtgggaggttagacactaatcttatgaagcggtgactgcaaaaatcagtgtccatgttaaatgctattattgtcatggtattcgataatgcgaagtatgtccatgtttagtgctattattattgccctggta

SEQ ID NO: 80879 - DNA, 1688 bp, Zea Mays
tttttttgaacttttttttttgccaacctaggctcaacgcctcatcgccggacgaaagagcggcttgcacgtcggggcggtggcccacagcccactcaacagcaacacgtgtcggcgcggtccggccagacacgtggtcgcccccctccttgcccgcccaccaaacacccgacccagccagctaggggagccacagcaagaaatgcaggccttcccttttgctgcccaaccccaatcatagagcggaacggacggagtgggtgcaaatcggattagacggccacgtcccccccgagcctcaccaatcgccggccctccgcaggcagggaagggcggttgggcggccggccggccggagatctgattgctcttatcttctcccctcccgttcatccaatctgctgtcaccatatctgatctccctctccccctgattgcccgcggtggccattgcctcgctcgcgtctccttcgccgcgcttctaggaagattcggcggcgtgcccatttgtcggtcgtagccttaaccagttcttccccaactccgagctccttccttgcttgggagcagctgcacacacatccgcccaggatattagttagcgtggaggatggcgtccaacgcctcgcaggggagcaactctgcaagcaccacggagcaaggtattggtggaagcatgtttaaccaatccgcagacgcgaagagtccatctacctctgataatagaaatcaaaacgacatgcttcctccgaccaaagcggccgagaagccactaaacggtactgcgacagagcagcagcctcgcctacggacgcttgggtccctcacgacacggacgggcagcaccagtgacatcagaaagctcatgatggaggacatgccaatggtctcatccaaggtagaagggcccaacgccaggaggatcgacggcttcctgtacaggtacaagaaaggcgaggatgtgaggatagtgtgcgtctgccatggtagcttcctcactcccgcggagtttgttaagcacgcggggggcggtgatgtgccgaatccgcttcggcatattgtcgtcaaccctgcgcccttctcgtgaagagagagggttacgctggtgctgctatctgctgtgctgtaacatgtaggctcctttgtttctgggagttcaacggaaggtctctgtatttttacataaatcgagtgtgacagcaaattcaagagaaaaaaaatcatctgcaaatgttataggcttgtctacaaattgacaaggattcagtagcaatgctttgctagctggttttaacagttccctttccagtgacaagtctctgtatgcttcaagagggttcacatccaagataggaacagggttctagatggcattcaagtttgccatgctcaagctattcgatttcgaaggcattgaggaaacagagatatcattatgcttctctaggaggttgagctcccaaaggaatgaagcgaatgctccactctgatatggatccctgtcttcggggttgtatttctgtataaaagaagaggaatagcaggatacgaagtgtccatttccaactattgaaaaagaacatgagaaccgccaccagaatcattttccaacaaacatttttttttggagatgcttcaatgtgactaatgctgaaataatcatcaaacatgtaaacagttatagggcc

SEQ ID NO: 80880 - DNA, 4539 bp, Zea Mays
cttcagaagagcacctcctctccagtataccccaacatgtccttcaggaacttgatgtagaacacttgatgggactgagagtgaaatctacatattaccagtgcacaaggtattcaataccaaagggctcaacaatatgcgtgtatatttttactgcttagccttgattacagaaagtgggaaacatatcgactgtacactatgttttttaaatccagagtgctactccacctgatgcatttatactaacgcagaagaggaagtggtcctaattatgccaatcactgactcactggactaaaataaccacacatttatgaggcaatgttcattggcaccatcagattttcccttggaagcggatttggaagacttgggctccggcaaactgcaagctctttatttggctgaccatcattaacaggtgttggacttcagatagattagccaagcgaggattgccccatcaatcggcctgccctttctgcgaccaagcaccagaaacgatcaatcatgtgctctcttcctgcgttttggccagggaagtctggtccttggtgctgcaatggctgaatcaagttgtgcgacctccagaccctgatagcaggctcaattcttggtggtgtcggtcagtaggatcgctgcctaaggagctgcagaaggatttaactccctggtggtgctcgtctcttgggagctttggaagcatatgaatgcatgtgtatttgagagggttaggccggatgcacatgttgtggtgcaatactgcaatccatggctgcagatgggcatttgtggtgtctcgcgggggcaagagcgctacaggatttagtcatgagtgctgcccccaagaggtggtggtcgtgtgtggtttaagccagtaaagtgtgtcctgattttgtacccctgggggagcctaatctcctaggggctatctcttttctttattaatgaaatgccgtgcagttctcctgcgtggttcgagaaaaaaaaaataaaaatcacaaaaaatagcatatgcaaaataaacttcaaaccaggagcaaactatgtctgtgaactggtaaaagatcataatgcaactgactacccttaattgttaatatcaactggcacttgtaaactttagaatagggaatagcaatgaccttttaataaattaatccccaaaaggtatcacaattaatacattggttgatattgtttaacaagaataagagatatttgggtgatgcttttttcttttgaaggatcgcacacaagtgtgtttgagggttcctcacctgcattagctgtgagggcagcaataaacatgtcatccagtctcaataaggtgatgtgcatctgttttaggttagggtgttacatggaagaccatgggccagtttgcttaccgcctaacttataggtgtggaagaaaaaggctgaaataagctggtctaagacaacttataggattatataaagtgggggacatggattgtataagctggcttataagttgtggtgtttgtcgaccgatggaacttatataagctggatcatataagctagagataaacgaacaggcccaatgtgttgcaccaaacaacacatcgctgaaatacatctcttttgtgcggcagctagtgttgacagagctacatcctcctttcatgctgacttgagagtcttgccagcgacggttgcttcttccttgaagaagattgtctgtcagtctgtctgtgtttccaccagcaaaaaggtaagaacttcttgcagacttgggtcttggggacttgcagacttgcagtggtcttgacaatttcaatagttcgcccattggcagtgcatgctgtccatgccaatggaaccacagaattgatgtgtgatatcacaatagacgatgaggtgaactagagtctgaggagcttagttacagaccttgcaagggtcggagggtgtgatggctgttttagaaactacagtatagcctatgaaaaggggatgccaattggaactatgaactttcttttcgccctcggtgcctagtgccttggcaggaccgcaggatggtggtcttgagcaacactttcagattgatgtgaagaattgtcctaaaaaataacagaattctaatacttaatcccaactttcttacttcactagcttcacatgcctctgttcaaaaatgaaaataaacaaagctcataactagccgatgatccactgtgtacattgttgaaccatttttttaacttgatgatttttcttacttagcagaaactaccttgcttttaacattttttagtagtgtgatcctacatacaagcgcatgcggccatcttgttataataaaccttatgaaggatataaaggacattgcaaagtctatgacgtattatttgtcctaactatcaggacagctgtaacttatttttgcgaaattcctactacttcactttaaagtttggtcaacagtatataactagatggcaaaatgatgtatgttgaccttttgcgttctatatgagtcaaaattgattaattttcagtacaaattgttgtttaaccaaggcagggcatcaaattcaaagcatgccttcatctcggataaatgaaacatgaatttgcaacagtatcctttaaattgtccttgccaagttcaccccatagcctcagaagagggttttgcataagcgagtaccactaaaatatatttcgcactgaagacaggtaggtatatatatcaatatgtaatccagagaagtattctaaaataaaaaagaaagaggattcagaaggtaattctgttccttaatcatttgtgagaaactggggatacaaaccaactaggaagcatcctgaagtactaagatgtttcctcttctatagctgtcatagaacattgagaagtaaaggtcattgcaatagaggaagactgacaagggaaaaaagagcagtagaaataataccacatgacatgaaacagaaacttgataaagacccatgcagtcaatggttccgaccattgtataaaaacttaaaaggaaggcctcaaaggagtgatctagacatactttgaacttaaaaattattacagtgctgacattaactcaagataggtacctgctgacatgtttgattcagatagaaagcaatcagcaatatctacaaacatagcccataaagaaaatggaagcttaaaggcacataaattgaatcattttggcaaatgtaatgcgttattgagaccagctcaatgaaaaggggtagatctagtgccggaggctcccacatgagtgggttctagggaagggataaagataaactgaggcaagccttccccccgcaaatgcgaagaggctgcttgaaacccacgacctgatgactcaatgagacaactctcactactgcaggcctgtccttctttgagaccagctcaatggttggacaatataatcgatccaagcatacagtgtcatcactgaagagcactgacagaataaacaattccagccccaaggcccaagaggcaacaaacaaccatcatgcagtacaagttttttctttgtttgggagtttagtcctaaggtgatgattcagttgtcatacataaaaatatacaagtaaaatcacacggaggagtaaaatgaacacggcaaacaaaagcacaagactatgaatatagaaatataagatgaaaatgacgagttgggtcatacaatctatagttccaaactattatataaaattcccccaacaggaccaaatagatccctttggagctaaagtgtgttggttggttaggagcagcaccagcaagcagtatcaaaaaggcacattgcccctaacaaatgtggcaaaaggcagaaacatctactcattttcagcaaaagataatggataactgagataatctgctcacatcacctgcccaatgcccttgatcatcatgcgcatcacttatgcacgatgtaaccaaatatatacgttaacaacgggcgcactcaggagatcatcactggcaacgcgttccttgattaaaagcaacgccctaccattaaccctgaatcccaacctaaactataaaacaagcaacgcgttccttgattaaaagcaacgccctaccattaaccctgaatcccacagggccacgcgaatcacgccataacccagtagttccccaccgatcgagcccaggaccagccaatgaggcgtgcacccgcgactgagcatctacacacccactcgcgatcggtggaaatgatggcaagttgaaatcggcgagattagcgaggtaggagaggtcaaaagttcacgactcaccaagacgaagcagatggcgatgaaggcgaagacgccgaagacgaaggagtcggcgccgggctggggcggctggcgtccgctcggctgctgctggaagcgcggcatcgacggcgacggcgacggcgggggcggcgagcggcggctctgcgccgagtcagaggtgacgtcagacatctcgaggagggcgcgcgcggatcaccggaacccctaggcgagatcggtcaggtcttg

SEQ ID NO: 80881 - DNA, 839 bp, Zea Mays
attcgtccccgacctaaggaagcggaccccggccaacgctcctgacagattcgcccggccgacgctcccttcgattccgtcctctcgcccgcgctccgcagcaggtgtgtaagacatcttcagcataccatctggtccgtccctggaaatgtccggcgtccaggagcagttcgagatcaagttccggctgccggacggcatcgacatcgggcccaggcgcttcccgccggcgtccaccgtcgctacgctcaaggagaccatcatcgcccagtggcccaaagataaggagaaaggtcctaggactgtgaacgatcttaagcttattaacgctgggaagatactggagaacaacaaaaccctgtcagaatgcaaaagtccgatctgtgacttctctgggatgacaacgatgcatgtcgtcgtccgcgcaccgacttcaagcaaacagtctggtaaaagagcagcaacgaaagcgaaaggtttcaggttctcttctatatttatgctaccccgggtgacgtgatgaacttttcggaacggcgttctaactgatcaatttacattacgtaacaccaaaaccaattgtaatctgataactaaggaagctttggaggcagaggagcgggcgttagcaggttggtgcaaggtagtaaatatgttgacgggtcgcacaggaccggccgcgggtgcagaagccgccgaaaaatatgaaactttgtttcgaagctttgcagcttttatcgtttttaataatgagttctgttttcaataatgagttccggtaggatgtgtttttgccttcggtataaggtctcccatgttcattgcgcggctgagctcgt

SEQ ID NO: 80882 - DNA, 1752 bp, Zea Mays
attcgtccccgacctaaggaagcggaccccggccaacgctcctgacagattcgcccggccgacgctcccttcgattccgtcctctcgcccgcgctccgcagcaggtgtgtaagacatcttcagcataccatctggtccgtccctggaaatgtccggcgtccaggagcagttcgagatcaagttccggctgccggacggcatcgacatcgggcccaggcgcttcccgccggcgtccaccgtcgctacgctcaaggagaccatcatcgcccagtggcccaaagagctgtttccttatcccagagagtaggggtaacaggatgtggcatcttgtcacatggtgcggaagagtgaagtagcgaaagccgaacttacttttgaagtttcatggttctagttgaataatgcataggacaaagggatcacactatcaatctgccaatctggtaaagctcttgagtaagcggtgaacctcagggacaatttcccagtgtcgttctatccttcctacattttcatccttctttcttgctggatttcttcattttcctttaaccgtttcaacttgaatgtagtcaatgtactaaatatagtgcccatgtttgtgcacaccatcaaactgcatctcagtatatcttttgtcttattatgctaaacttgttttagtgtccttactgttcgttctcaacagataaggagaaaggtcctaggactgtgaacgatcttaagcttattaacgctgggaagatactggagaacaacaaaaccctgtcagaatgcaaaagtccgatctgtgacttctctgggatgacaacgatgcatgtcgtcgtccgcgcaccgacttcaagcaaacagtctggtaaaagagcagcaacgaaagcgaaaggtttcaggtgcggttgtgccattatgtgacagagaatgccagttttctccctttttccgctcttgctggagtgttgtatcatgtttgaggcgctttctccttttatttccttttcaagtattgtgggtaagcttaggtatacaatcactcattttggtgcaagcgtgcaatcaaactatccagagcatccaatctagatccaacggtttcatatggaagtggttaaaattaaaataggtactatgttttaggtgtaaggggttaaatataaaataacagtcatcattagatctagatcggatgcaccagatcgcttgattgcatgcttgcaccaggataagtgatggcataggatattttcccgcggttaagtgcccattaatcacgagtttgcatcgaacacaaaattggaaggcagcttgctgctaattacccttaatcttaagttatgccaagcacacacaatttgaaggcagtcattagtgtctaaactgcgatcttccatgatttcaggttctcttctatatttatgctaccccgggtgacgtgatgaacttttcggaacggcgttctaactgatcaatttacattacgtaacaccaaaaccaattgtaatctgataactaaggaagctttggaggcagaggagcgggcgttagcaggttggtgcaaggtagtaaatatgttgacgggtcgcacaggaccggccgcgggtgcagaagccgccgaaaaatatgaaactttgtttcgaagctttgcagcttttatcgtttttaataatgagttctgttttcaataatgagttccggtaggatgtgtttttgccttcggtataaggtctcccatgttcattgcgcggctgagctcgt

SEQ ID NO: 80883 - DNA, 1246 bp, Zea Mays
attcgtccccgacctaaggaagcggaccccggccaacgctcctgacagattcgcccggccgacgctcccttcgattccgtcctctcgcccgcgctccgcagcaggtgtgtaagacatcttcagcataccatctggtccgtccctggaaatgtccggcgtccaggagcagttcgagatcaagttccggctgccggacggcatcgacatcgggcccaggcgcttcccgccggcgtccaccgtcgctacgctcaaggagaccatcatcgcccagtggcccaaagagctgtttccttatcccagagagtaggggtaacaggatgtggcatcttgtcacatggtgcggaagagtgaagtagcgaaagccgaacttacttttgaagtttcatggttctagttgaataatgcataggacaaagggatcacactatcaatctgccaatctggtaaagctcttgagtaagcggtgaacctcagggacaatttcccagtgtcgttctatccttcctacattttcatccttctttcttgctggatttcttcattttcctttaaccgtttcaacttgaatgtagtcaatgtactaaatatagtgcccatgtttgtgcacaccatcaaactgcatctcagtatatcttttgtcttattatgctaaacttgttttagtgtccttactgttcgttctcaacagataaggagaaaggtcctaggactgtgaacgatcttaagcttattaacgctgggaagatactggagaacaacaaaaccctgtcagaatgcaaaagtccgatctgtgacttctctgggatgacaacgatgcatgtcgtcgtccgcgcaccgacttcaagcaaacagtctggtaaaagagcagcaacgaaagcgaaaggtttcaggttctcttctatatttatgctaccccgggtgacgtgatgaacttttcggaacggcgttctaactgatcaatttacattacgtaacaccaaaaccaattgtaatctgataactaaggaagctttggaggcagaggagcgggcgttagcaggttggtgcaaggtagtaaatatgttgacgggtcgcacaggaccggccgcgggtgcagaagccgccgaaaaatatgaaactttgtttcgaagctttgcagcttttatcgtttttaataatgagttctgttttcaataatgagttccggtaggatgtgtttttgccttcggtataaggtctcccatgttcattgcgcggctgagctcgt

SEQ ID NO: 80884 - DNA, 1507 bp, Zea Mays
attcgtccccgacctaaggaagcggaccccggccaacgctcctgacagattcgcccggccgacgctcccttcgattccgtcctctcgcccgcgctccgcagcaggtgtgtaagacatcttcagcataccatctggtccgtccctggaaatgtccggcgtccaggagcagttcgagatcaagttccggctgccggacggcatcgacatcgggcccaggcgcttcccgccggcgtccaccgtcgctacgctcaaggagaccatcatcgcccagtggcccaaagagctgtttccttatcccagagagtaggggtaacaggatgtggcatcttgtcacatggtgcggaagagtgaagtagcgaaagccgaacttacttttgaagtttcatggttctagttgaataatgcataggacaaagggatcacactatcaatctgccaatctgataaggagaaaggtcctaggactgtgaacgatcttaagcttattaacgctgggaagatactggagaacaacaaaaccctgtcagaatgcaaaagtccgatctgtgacttctctgggatgacaacgatgcatgtcgtcgtccgcgcaccgacttcaagcaaacagtctggtaaaagagcagcaacgaaagcgaaaggtttcaggtgcggttgtgccattatgtgacagagaatgccagttttctccctttttccgctcttgctggagtgttgtatcatgtttgaggcgctttctccttttatttccttttcaagtattgtgggtaagcttaggtatacaatcactcattttggtgcaagcgtgcaatcaaactatccagagcatccaatctagatccaacggtttcatatggaagtggttaaaattaaaataggtactatgttttaggtgtaaggggttaaatataaaataacagtcatcattagatctagatcggatgcaccagatcgcttgattgcatgcttgcaccaggataagtgatggcataggatattttcccgcggttaagtgcccattaatcacgagtttgcatcgaacacaaaattggaaggcagcttgctgctaattacccttaatcttaagttatgccaagcacacacaatttgaaggcagtcattagtgtctaaactgcgatcttccatgatttcaggttctcttctatatttatgctaccccgggtgacgtgatgaacttttcggaacggcgttctaactgatcaatttacattacgtaacaccaaaaccaattgtaatctgataactaaggaagctttggaggcagaggagcgggcgttagcaggttggtgcaaggtagtaaatatgttgacgggtcgcacaggaccggccgcgggtgcagaagccgccgaaaaatatgaaactttgtttcgaagctttgcagcttttatcgtttttaataatgagttctgttttcaataatgagttccggtaggatgtgtttttgccttcggtataaggtctcccatgttcattgcgcggctgagctcgt

SEQ ID NO: 80885 - DNA, 1001 bp, Zea Mays
attcgtccccgacctaaggaagcggaccccggccaacgctcctgacagattcgcccggccgacgctcccttcgattccgtcctctcgcccgcgctccgcagcaggtgtgtaagacatcttcagcataccatctggtccgtccctggaaatgtccggcgtccaggagcagttcgagatcaagttccggctgccggacggcatcgacatcgggcccaggcgcttcccgccggcgtccaccgtcgctacgctcaaggagaccatcatcgcccagtggcccaaagagctgtttccttatcccagagagtaggggtaacaggatgtggcatcttgtcacatggtgcggaagagtgaagtagcgaaagccgaacttacttttgaagtttcatggttctagttgaataatgcataggacaaagggatcacactatcaatctgccaatctgataaggagaaaggtcctaggactgtgaacgatcttaagcttattaacgctgggaagatactggagaacaacaaaaccctgtcagaatgcaaaagtccgatctgtgacttctctgggatgacaacgatgcatgtcgtcgtccgcgcaccgacttcaagcaaacagtctggtaaaagagcagcaacgaaagcgaaaggtttcaggttctcttctatatttatgctaccccgggtgacgtgatgaacttttcggaacggcgttctaactgatcaatttacattacgtaacaccaaaaccaattgtaatctgataactaaggaagctttggaggcagaggagcgggcgttagcaggttggtgcaaggtagtaaatatgttgacgggtcgcacaggaccggccgcgggtgcagaagccgccgaaaaatatgaaactttgtttcgaagctttgcagcttttatcgtttttaataatgagttctgttttcaataatgagttccggtaggatgtgtttttgccttcggtataaggtctcccatgttcattgcgcggctgagctcgt

SEQ ID NO: 80886 - DNA, 910 bp, Zea Mays
cttacctttgcaaggtaaaagagcagcaacgaaagcgaaaggtttcaggtgcggttgtgccattatgtgacagagaatgccagttttctccctttttccgctcttgctggagtgttgtatcatgtttgaggcgctttctccttttatttccttttcaagtattgtgggtaagcttaggtatacaatcactcattttggtgcaagcgtgcaatcaaactatccagagcatccaatctagatccaacggtttcatatggaagtggttaaaattaaaataggtactatgttttaggtgtaaggggttaaatataaaataacagtcatcattagatctagatcggatgcaccagatcgcttgattgcatgcttgcaccaggataagtgatggcataggatattttcccgcggttaagtgcccattaatcacgagtttgcatcgaacacaaaattggaaggcagcttgctgctaattacccttaatcttaagttatgccaagcacacacaatttgaaggcagtcattagtgtctaaactgcgatcttccatgatttcaggttctcttctatatttatgctaccccgggtgacgtgatgaacttttcggaacggcgttctaactgatcaatttacattacgtaacaccaaaaccaattgtaatctgataactaaggaagctttggaggcagaggagcgggcgttagcaggttggtgcaaggtagtaaatatgttgacgggtcgcacaggaccggccgcgggtgcagaagccgccgaaaaatatgaaactttgtttcgaagctttgcagcttttatcgtttttaataatgagttctgttttcaataatgagttccggtaggatgtgtttttgccttcggtataaggtctcccatgttcattgcgcggctgagctcgt

SEQ ID NO: 80887 - DNA, 3592 bp, Zea Mays
cgcatcgcaactcaacattctacctcgcgaaaccctatcaacgccgccgtcacccgaaccccatccacgaggaagtcgcgccagcgccggagcgtcctcaccgccgacgccgcgacgccgccgctgaagcctgcggtgatgcagaagacggcgacactcgctaccaaccatgaccctgccgtggtcttgcaagcgacagaaccaagccctccactccctttctccatcctctcgtggaagatgaagacgcaaccgtcgcacgcccgatgacagcactcacatcgttccctcttcctcttcctcccgcgcaaggtcaaccatgtcgtcaccggaacgggaacccgccacccctcgtctccgtctggaatcaggtgattcttgcagcctctgtagtatcaaagtctgtaaaagctaattttataatagagcgcgacgcatagcagctcattgagcctgcccacgttagcaaaaagaatatagaccctgcgatgaaacatcaacgatcacggaggtctcagcatgttgcctacatagactcacgctgcttctagagaggtccagcgcatggggaaaaaagaggcagactcgagttgccgtcgtcttcgctggcccttgcctatcgtccgttcgcattcatctcattcaactggtaaaattaggagcactccctcacacgctacacagcgacctggccaacatgctagccggtggctcatcgtatctggcgactctgggccactggagcttctccaaccacagtctcaactctcaagaagctcccagccgccgctccctctcccccatcctcctaccacgacgatggatcctgctaccgtcgtcgtcatcgaggagtcataccggtcctactattgcatgcggaactccaagcagtgtacggaagacaacagggcgaaagctaaattgcagaaaagaaaaggaggacatttgactgttgaacgatggtcgaaggttccaatttcggtggcatgattggtggtcatgatgatgataggaatttactagacctctccggaatataaagtaatcagccatatagtatgtggtcctggagttcatagttttgctacttttctggcgtgacgatgtggcggaggcgatgacagggcctaaaacggattggtcgtcctgctctgtgtcggaagttatgtgaattttctgcctcctagcgctagacagatgaactccttgccattgctttctactgttgtttgtttattttaatgcagcaacagagcctatgaagaagccctattttctgctgctgtttgccaactccaagtagatcgcccactgaagaagctcaccctcctcgctatagaagaaccgtgaaattttgtttcgttgccatagtggaaattgcagctgcaatgcgtgagggatggttgtcgggtgtgttttcctgactatatatgccttgagatatttccctgaggaggcaatagatccagatgtgttattgtcacttgccttctcatttaaggtgattcatgcaagtgctcacctcccgaagatatgaagaaagtaagaaaacaaatcgtcgatcacatttacccgtggatattagaatgccaagagaaaggacatgccaaagtgccatcattgggaagcaaatggatgtttaggactgcataccagttaggttcagactctgtaaacaaaggccaataccctatcagcacaactcacactgctccaggtatatgcacaatgttaccagtgaagtataatttcagacaggcattgccagaaatagctcaaaagattacacggttggagaatgagataccttgcttgattcttctggcgagacttgcacattttcttttacatactgatcttgctgaacatcacaaattggggcttgatatatctgaactggagaagaaaatcatttatgagatgatgagaccagagaggactttgttgtatttggttcctggaaggctggttagggtgagggatggttcaacagactggggatggggtgtggtgtggttgtaaatctatactactccttaacaagctaaggagggcgtccacaactccgtgcccccgcccccgtctctcgctcgcgacctcccgcacgacgcgccagggcaatctggactttgctacatactggtttttacatgcacaataaagctagctggtatcacatttactggtgatcctgctaagaataagaaagatctatttggtgctattgcaatggtattgagagttgtaggaggcaagaattcacaattatctttgcctacacgctattctctgaacacaatatttacgagcttgataggtctattttggaatacgaattatgagtttggtaggtaaataatttatacaatgattcttggacctttgaccctttctgcttcaaggattaatgtgtgactgtgtttagccttcaatccaagcgacatgccactaatctcaaaaatgcttctatgcaatatttacttgacaatttatatctctgctgttccttagagatattttcatgtaatatgttacaaggttgttcatgtgagatttttggtcataaattatattatatatgaagataatgggagtcagccctaaattcatattatctgcaatctgcagtttcttgaaaaaaatgtttgatctacatcagaattttcccaaaatatctaacagacttgttttcttcaggccaggaacccagggtctacacatcttataactgaaaaacacataagcagtatgcggttcacacttttttcttgtttgcattttataaaccattagacccttgtaacaaaaagcagattgtttagatgttatgctctcttatatggagattctcaagtatcttagaatcagttatgtgttggataaatgtcttggttatttactcttctattagtgctctaggcttgttctgtgttggataaatgtcttggttatttactcttctatcctcaagtatcttaggaataggattcatgacaatgagccattgatttctgaagttttccaagctaacctatttgctttgtaggcaagaaggtgagcaaggcatctaagatccagtggcttgtgaacccttgacccttcagaggaagcatgctagaatcattgacaagaagattgccaagaagaagtctgaggctgtcgagtaccaaaagcttcttcctataggctgaaggaatagagatcaccacaatgagagcttggccaagagaagatccaagctttctacctctgccaaggcttcctctggcacctccgcttaagaatgtcttaagaatgttcagtgcttttgagatgttttcaagacctatcttgttacagcttaagtaccttatgctgctctagctgtgttgcaactgtccctatacttgacagatttgcattagatgcttaggctatagagggtaggatcctaattgtgaccatgtactaaattatatatctgttgctaagttacagtacagacaaaataaatttagcctggccaacttgtagaaaacgactaacttgtagaaaaacgtgttattgtaactaagaatatctaaattgctcctatgttactttctatattcat

SEQ ID NO: 80888 - DNA, 5100 bp, Zea Mays
cgcatcgcaactcaacattctacctcgcgaaaccctatcaacgccgccgtcacccgaaccccatccacgaggaagtcgcgccagcgccggagcgtcctcaccgccgacgccgcgacgccgccgctgaagcctgcggtgatgcagaagacggcgacactcgctaccaaccatgaccctgccgtggtcttgcaagcgacagaaccaagccctccactccctttctccatcctctcgtggaagatgaagacgcaaccgtcgcacgcccgatgacagcactcacatcgttccctcttcctcttcctcccgcgcaaggtcaaccatgtcgtcaccggaacgggaacccgccacccctcgtctccgtctggaatcaggtgattcttgcagcctctgtagtatcaaagtctgtaaaagctaattttataatagagcgcgacgcatagcagctcattgagcctgcccacgttagcaaaaagaatatagaccctgcgatgaaacatcaacgatcacggaggtctcagcatgttgcctacatagactcacgctgcttctagagaggtccagcgcatggggaaaaaagaggcagactcgagttgccgtcgtcttcgctggcccttgcctatcgtccgttcgcattcatctcattcaactggtaaaattaggagcactccctcacacgctacacagcgacctggccaacatgctagccggtggctcatcgtatctggcgactctgggccactggagcttctccaaccacagtctcaactctcaagaagctcccagccgccgctccctctcccccatcctcctaccacgacgatggatcctgctaccgtcgtcgtcatcgaggagtcataccggtcctactattgcatgcggaactccaagcagtgtacggaagacaacagggcgaaagctaaattgcagaaaagaaaaggaggacatttgactgttgaacgatggtcgaaggttccaatttcggtggcatgattggtggtcatgatgatgataggaatttactagacctctccggaatataaagtaatcagccatatagtatgtggtcctggagttcatagttttgctacttttctggcgtgacgatgtggcggaggcgatgacagggcctaaaacggattggtcgtcctgctctgtgtcggaagttatgtgaattttctgcctcctagcgctagacagatgaactccttgccattgctttctactgttgtttgtttattttaatgcagcaacagagcctatgaagaagccctattttctgctgctgtttgccaactccaagtagatcgcccactgaagaagctcaccctcctcgctatagaagaaccgtgaaattttgtttcgttgccatagtggaaattgcagctgcaatgcgtgagggatggttgtcgggtgtgttttcctgactatatatgccttgagatatttccctgaggaggcaatagatccagatgtgttattgtcacttgccttctcatttaaggtgattcatgcaagtgctcacctcccgaagatatgaagaaagtaagaaaacaaatcgtcgatcacatttacccgtggatattagaatgccaagagaaaggacatgccaaagtgccatcattgggaagcaaatggatgtttaggacggacactggggctttgaagtagttggtggctgcgactgcgaggccgagacgggttagattgagagaggtgggcagatggcgacactgtcgtcgtcgctttgctccagctttgcctccctgcggaccgcctccatcggccaccctcgcgtcatcatgtcatctacgcccaggttagtttctccttccctgcttcctatttgcctgtgtctgagtagcgacgccctcgcgtgaggtacgaatgtagtagcaccgagcgggcgggtggccacctcttccattcagtcgcatactcgcatctcgctccttgtcagtcttagttcctagcgatctcttgtctcgttgccggcccccgacggctccgtgcggctgctgctgcgaattccattcttaaatttttgtccacctgatggcggcctccaagtggcccagtctcttaaactatgcagttgtagacaacttatatagttgcagtagtttcagtcttttgctgctgcaaacatgaaatccaattatctattgaacctgttttgcgagtttgtgcgctatggcccgacaacgaattcgtattgatttgttctatgaagaggtagattagggatctcaatcattttgaatgtgttattttccattatttttgtctctgttgattctgtgttgctgcttgccatttctctattaagataaaagaggaaaaacatttatatcgatcaacaaagtctaaagcttgcagtagagtgggcttatttgaaatgattttgattatcaattttgtggcacctcataaaaggaactcaagtgacattcagagatgagagattgcctggatttctagcaagattcatgcaacgtcgggaggtgggaaaatatttttttgtcaacctaaaagtatgcttcttattaccaactaggactgcataccagttaggttcagactctgtaaacaaaggccaataccctatcagcacaactcacactgctccaggtatatgcacaatgttaccagtgaagtataatttcagacaggtatatgcacaacgtggcacctgatagttcaaagaccatcacggaaaaaatcagtgagtatgacgagaccctgtttttcttctacgaaacaataggttctgatgcatgtgtgatattgactatgctttagatattagttctttagttcaaagatcacacattcttttctgatagttttgacatttcatcgaagataacttttttactttgtttcagtcttgcgggaaatcagttcatttgcaattcatcaattatacatggttgttcggatctgatagcaatgattaatgataattgatttcccagatggcacatatctattctttagaaactggaagttaattgtacattaatggcagagacaatgtcagtacaggtccaaaggtccaagaacaccatgagttagctctaccaatttctttcagtgtcacatgtttcgcaatatttgttttgttgtttgtgtattggctaagttactacttaatacagatggtgctttcttttacttcagctggtaattatctaagcctatgtagtattaacaccttacacgttaaatatacatgatttgactttttattgtataccaagatctataatttgaattgggtcatgtgaagcattttgcatttcatgatctgcaaagtgcaacatacaattataattccaataatatattaggtcaagtaggttttagcattgtgtataaaggttgtttgaaaaatggagctttagtgatagtaaagagattaaaagatcttgatgttaccagtgaagtataatttcagacagaaattgagttgattggccttgtcgtgcacagggtgtttataaggattttgcatgacctctaaagaacggttgcttgtatatccatatatgccaaatggtagtgttgctgaccgcttgagatgtaactcaattgtctacaacattgtttgttagttaagtctataattggcattctgcacaagtttgcattccttgtcaatattttgtgatctacaaagtgcaacaaacaattttaattccaagaatatattaagtaaaggaggttttggcattgtgtataaaggttgtttgagaaatggcttgtgtttcatatccttgatattatgaatttacataatacaatctaatctgaaagatagttttttcaggctcaagcgatagcgtgcgtgcatgagacttagatggcggcttcggaggcggcaacgacaatgttaaaaatagtttttctcacaaaattaaaataactatcttgcttttcaggcattgccagaaatagctcaaaagattacacggttggagaatgagataccttgcttgattcttctggcgaggtgtggtaatcttaattattgtattcagtattgttcttatgtgaatttatcatcctcctccctaatattagacttgcacattttcttttacatactgatcttgctgaacatcacaaattggggcttgatatatctgaactggagaagaaaatcatttatgagatgatgagaccagagaggactttgttgtatttggttcctggaaggctggttagggtgagggatggttcaacagactggggatggggtgtggtgtggttgtaaatctatactactccttaacaagctaaggagggcgtccacaactccgtgcccccgcccccgtctctcgctcgcgacctcccgcacgacgcgccagggcaatctggactttgctacatactggtttttacatgcacaataaagctagctggtatcacatttactggtgatcctgctaagaataagaaagatctatttggtgctattgcaatggtattgagagttgtaggaggccaggaacccagggtctacacatcttataactgaaaaacacataagcagcaagaaggtgagcaaggcatctaagatccagtggcttgtgaacccttgacccttcagaggaagcatgctagaatcattgacaagaagattgccaagaagaagtctgaggctgtcgagtaccaaaagcttcttcctataggctgaaggaatagagatcaccacaatgagagcttggccaagagaagatccaagctttctacctctgccaaggcttcctctggcacctccgcttaagaatgtcttaagaatgttcagtgcttttgagatgttttcaagacctatcttgttacagcttaagtaccttatgctgctctagctgtgttgcaactgtccctatacttgacagatttgcattagatgcttaggctatagagggtaggatcctaattgtgaccatgtactaaattatatatctgttgctaagttacagtacagacaaaataaatttagcctggccaacttgtagaaaacgactaacttgtagaaaaacgtgttattgtaactaagaatatctaaattgctcctatgttactttctatattcat

SEQ ID NO: 80889 - DNA, 4424 bp, Zea Mays
cgcatcgcaactcaacattctacctcgcgaaaccctatcaacgccgccgtcacccgaaccccatccacgaggaagtcgcgccagcgccggagcgtcctcaccgccgacgccgcgacgccgccgctgaagcctgcggtgatgcagaagacggcgacactcgctaccaaccatgaccctgccgtggtcttgcaagcgacagaaccaagccctccactccctttctccatcctctcgtggaagatgaagacgcaaccgtcgcacgcccgatgacagcactcacatcgttccctcttcctcttcctcccgcgcaaggtcaaccatgtcgtcaccggaacgggaacccgccacccctcgtctccgtctggaatcaggtgattcttgcagcctctgtagtatcaaagtctgtaaaagctaattttataatagagcgcgacgcatagcagctcattgagcctgcccacgttagcaaaaagaatatagaccctgcgatgaaacatcaacgatcacggaggtctcagcatgttgcctacatagactcacgctgcttctagagaggtccagcgcatggggaaaaaagaggcagactcgagttgccgtcgtcttcgctggcccttgcctatcgtccgttcgcattcatctcattcaactggtaaaattaggagcactccctcacacgctacacagcgacctggccaacatgctagccggtggctcatcgtatctggcgactctgggccactggagcttctccaaccacagtctcaactctcaagaagctcccagccgccgctccctctcccccatcctcctaccacgacgatggatcctgctaccgtcgtcgtcatcgaggagtcataccggtcctactattgcatgcgcggtgtaaggaactccaagcagtgtacggaagacaacagggcgaaagctaaattgcagaaaagaaaaggaggacatttgactgttgaacgatggtcgaaggttccaatttcggtggcatgattggtggtcatgatgatgataggaatttactagacctctccggaatataaagtaatcagccatatagtatgtggtcctggagttcatagttttgctacttttctggcgtgacgatgtggcggaggcgatgacagggcctaaaacggattggtcgtcctgctctgtgtcggaagttatgtgaattttctgcctcctagcgctagacagatgaactccttgccattgctttctactgttgtttgtttattttaatgcagcaacagagcctatgaagaagccctattttctgctgctgtttgccaactccaagtagatcgcccactgaagaagctcaccctcctcgctatagaagaaccgtgaaattttgtttcgttgccatagtggaaattgcagctgcaatgcgtgagggatggttgtcgggtgtgttttcctgactatatatgccttgagatatttccctgaggaggcaatagatccagatgtgttattgtcacttgccttctcatttaaggtgattcatgcaagtgctcacctcccgaagatatgaagaaagtaagaaaacaaatcgtcgatcacatttacccgtggatattagaatgccaagagaaaggacatgccaaagtgccatcattgggaagcaaatggatgtttaggacggacactggggctttgaagtagttggtggctgcgactgcgaggccgagacgggttagattgagagaggtgggcagatggcgacactgtcgtcgtcgctttgctccagctttgcctccctgcggaccgcctccatcggccaccctcgcgtcatcatgtcatctacgcccaggaactcaagtgacattcagagatgagagattgcctggatttctagcaagattcatgcaacgtcgggaggtgggaaaatatttttttgtcaacctaaaagtatgcttcttattaccaactaggactgcataccagttaggttcagactctgtaaacaaaggccaataccctatcagcacaactcacactgctccaggtatatgcacaatgttaccagtgaagtataatttcagacaggtatatgcacaacgtggcacctgatagttcaaagaccatcacggaaaaaatcagtgagtatgacgagaccctgtttttcttctacgaaacaataggttctgatgcatgtgtgatattgactatgctttagatattagttctttagttcaaagatcacacattcttttctgatagttttgacatttcatcgaagataacttttttactttgtttcagtcttgcgggaaatcagttcatttgcaattcatcaattatacatggttgttcggatctgatagcaatgattaatgataattgatttcccagatggcacatatctattctttagaaactggaagttaattgtacattaatggcagagacaatgtcagtacaggtccaaaggtccaagaacaccatgagttagctctaccaatttctttcagtgtcacatgtttcgcaatatttgttttgttgtttgtgtattggctaagttactacttaatacagatggtgctttcttttacttcagctggtaattatctaagcctatgtagtattaacaccttacacgttaaatatacatgatttgactttttattgtataccaagatctataatttgaattgggtcatgtgaagcattttgcatttcatgatctgcaaagtgcaacatacaattataattccaataatatattaggtcaagtaggttttagcattgtgtataaaggttgtttgaaaaatggagctttagtgatagtaaagagattaaaagatcttgatgttaccagtgaagtataatttcagacagaaattgagttgattggccttgtcgtgcacagggtgtttataaggattttgcatgacctctaaagaacggttgcttgtatatccatatatgccaaatggtagtgttgctgaccgcttgagatgtaactcaattgtctacaacattgtttgttagttaagtctataattggcattctgcacaagtttgcattccttgtcaatattttgtgatctacaaagtgcaacaaacaattttaattccaagaatatattaagtaaaggaggttttggcattgtgtataaaggttgtttgagaaatggcttgtgtttcatatccttgatattatgaatttacataatacaatctaatctgaaagatagttttttcaggctcaagcgatagcgtgcgtgcatgagacttagatggcggcttcggaggcggcaacgacaatgttaaaaatagtttttctcacaaaattaaaataactatcttgcttttcaggcattgccagaaatagctcaaaagattacacggttggagaatgagataccttgcttgattcttctggcgaggtgtggtaatcttaattattgtattcagtattgttcttatgtgaatttatcatcctcctccctaatattagacttgcacattttcttttacatactgatcttgctgaacatcacaaattggggcttgatatatctgaactggagaagaaaatcatttatgagatgatgagaccagagaggactttgttgtatttggttcctggaaggctggttagggtgagggatggttcaacagactggggatggggtgtggtgtggttgtaaatctatactactccttaacaagctaaggagggcgtccacaactccgtgcccccgcccccgtctctcgctcgcgacctcccgcacgacgcgccagggcaatctggactttgctacatactggtttttacatgcacaataaagctagctggtatcacatttactggtgatcctgctaagaataagaaagatctatttggtgctattgcaatggcaagaaggtgagcaaggcatctaagatccagtggcttgtgaacccttgacccttcagaggaagcatgctagaatcattgacaagaagattgccaagaagaagtctgaggctgtcgagtaccaaaagcttcttcctataggctgaaggaatagagatcaccacaatgagagcttggccaagagaagatccaagctttctacctctgccaaggcttcctctggcacctccgcttaagaatgtcttaagaatgttcagtgcttttgagatgttttcaagacctatcttgttacagcttaagtaccttatgctgctctagctgtgttgcaactgtccctatacttgacagatttgcattagatgcttaggctatagagggtaggatcctaattgtgaccatgtactaaattatatatctgttgctaagttacagtacagacaaaataaatttagcctggccaacttgtagaaaacgactaacttgtagaaaaacgtgttattgtaactaagaatatctaaattgctcctatgttactttctatattcat

SEQ ID NO: 80890 - DNA, 5699 bp, Zea Mays
cgcatcgcaactcaacattctacctcgcgaaaccctatcaacgccgccgtcacccgaaccccatccacgaggaagtcgcgccagcgccggagcgtcctcaccgccgacgccgcgacgccgccgctgaagcctgcggtgatgcagaagacggcgacactcgctaccaaccatgaccctgccgtggtcttgcaagcgacagaaccaagccctccactccctttctccatcctctcgtggaagatgaagacgcaaccgtcgcacgcccgatgacagcactcacatcgttccctcttcctcttcctcccgcgcaaggtcaaccatgtcgtcaccggaacgggaacccgccacccctcgtctccgtctggaatcaggtgattcttgcagcctctgtagtatcaaagtctgtaaaagctaattttataatagagcgcgacgcatagcagctcattgagcctgcccacgttagcaaaaagaatatagaccctgcgatgaaacatcaacgatcacggaggtctcagcatgttgcctacatagactcacgctgcttctagagaggtccagcgcatggggaaaaaagaggcagactcgagttgccgtcgtcttcgctggcccttgcctatcgtccgttcgcattcatctcattcaactggtaaaattaggagcactccctcacacgctacacagcgacctggccaacatgctagccggtggctcatcgtatctggcgactctgggccactggagcttctccaaccacagtctcaactctcaagaagctcccagccgccgctccctctcccccatcctcctaccacgacgatggatcctgctaccgtcgtcgtcatcgaggagtcataccggtcctactattgcatgcggaactccaagcagtgtacggaagacaacagggcgaaagctaaattgcagaaaagaaaaggaggacatttgactgttgaacgatggtcgaaggttccaatttcggtggcatgattggtggtcatgatgatgataggaatttactagacctctccggaatataaagtaatcagccatatagtatgtggtcctggagttcatagttttgctacttttctggcgtgacgatgtggcggaggcgatgacagggcctaaaacggattggtcgtcctgctctgtgtcggaagttatgtgaattttctgcctcctagcgctagacagatgaactccttgccattgctttctactgttgtttgtttattttaatgcagcaacagagcctatgaagaagccctattttctgctgctgtttgccaactccaagtagatcgcccactgaagaagctcaccctcctcgctatagaagaaccgtgaaattttgtttcgttgccatagtggaaattgcagctgcaatgcgtgagggatggttgtcgggtgtgttttcctgactatatatgccttgagatatttccctgaggaggcaatagatccagatgtgttattgtcacttgccttctcatttaaggtgattcatgcaagtgctcacctcccgaagatatgaagaaagtaagaaaacaaatcgtcgatcacatttacccgtggatattagaatgccaagagaaaggacatgccaaagtgccatcattgggaagcaaatggatgtttaggacggacactggggctttgaagtagttggtggctgcgactgcgaggccgagacgggttagattgagagaggtgggcagatggcgacactgtcgtcgtcgctttgctccagctttgcctccctgcggaccgcctccatcggccaccctcgcgtcatcatgtcatctacgcccaggttagtttctccttccctgcttcctatttgcctgtgtctgagtagcgacgccctcgcgtgaggtacgaatgtagtagcaccgagcgggcgggtggccacctcttccattcagtcgcatactcgcatctcgctccttgtcagtcttagttcctagcgatctcttgtctcgttgccggcccccgacggctccgtgcggctgctgctgcgaattccattcttaaatttttgtccacctgatggcggcctccaagtggcccagtctcttaaactatgcagttgtagacaacttatatagttgcagtagtttcagtcttttgctgctgcaaacatgaaatccaattatctattgaacctgttttgcgagtttgtgcgctatggcccgacaacgaattcgtattgatttgttctatgaagaggtagattagggatctcaatcattttgaatgtgttattttccattatttttgtctctgttgattctgtgttgctgcttgccatttctctattaagataaaagaggaaaaacatttatatcgatcaacaaagtctaaagcttgcagtagagtgggcttatttgaaatgattttgattatcaattttgtggcacctcataaaaggaactcaagtgacattcagagatgagagattgcctggatttctagcaagattcatgcaacgtcgggaggtgggaaaatatttttttgtcaacctaaaagtatgcttcttattaccaactaggactgcataccagttaggttcagactctgtaaacaaaggccaataccctatcagcacaactcacactgctccaggtatatgcacaatgttaccagtgaagtataatttcagacaggtatatgcacaacgtggcacctgatagttcaaagaccatcacggaaaaaatcagtgagtatgacgagaccctgtttttcttctacgaaacaataggttctgatgcatgtgtgatattgactatgctttagatattagttctttagttcaaagatcacacattcttttctgatagttttgacatttcatcgaagataacttttttactttgtttcagtcttgcgggaaatcagttcatttgcaattcatcaattatacatggttgttcggatctgatagcaatgattaatgataattgatttcccagatggcacatatctattctttagaaactggaagttaattgtacattaatggcagagacaatgtcagtacaggtccaaaggtccaagaacaccatgagttagctctaccaatttctttcagtgtcacatgtttcgcaatatttgttttgttgtttgtgtattggctaagttactacttaatacagatggtgctttcttttacttcagctggtaattatctaagcctatgtagtattaacaccttacacgttaaatatacatgatttgactttttattgtataccaagatctataatttgaattgggtcatgtgaagcattttgcatttcatgatctgcaaagtgcaacatacaattataattccaataatatattaggtcaagtaggttttagcattgtgtataaaggttgtttgaaaaatggagctttagtgatagtaaagagattaaaagatcttgatgttaccagtgaagtataatttcagacagaaattgagttgattggccttgtcgtgcacagggtgtttataaggattttgcatgacctctaaagaacggttgcttgtatatccatatatgccaaatggtagtgttgctgaccgcttgagatgtaactcaattgtctacaacattgtttgttagttaagtctataattggcattctgcacaagtttgcattccttgtcaatattttgtgatctacaaagtgcaacaaacaattttaattccaagaatatattaagtaaaggaggttttggcattgtgtataaaggttgtttgagaaatggcttgtgtttcatatccttgatattatgaatttacataatacaatctaatctgaaagatagttttttcaggctcaagcgatagcgtgcgtgcatgagacttagatggcggcttcggaggcggcaacgacaatgttaaaaatagtttttctcacaaaattaaaataactatcttgcttttcaggcattgccagaaatagctcaaaagattacacggttggagaatgagataccttgcttgattcttctggcgagaaaatcatttatgagatgatgagaccagagaggactttgttgtatttggttcctggaaggctggttagggtgagggatggttcaacagactggggatggggtgtggtgtggttgtaaatctatactactccttaacaagctaaggagggcgtccacaactccgtgcccccgcccccgtctctcgctcgcgacctcccgcacgacgcgccagggcaatctggactttgctacatactggtttttacatgcacaataaagctagctggtatcacatttactggtgatcctgctaagaataagaaagatctatttggtgctattgcaatggtattgagagttgtaggaggcaagaattcacaattatctttgcctacacgctattctctgaacacaatatttacgagcttgataggtctattttggaatacgaattatgagtttggtaggtaaataatttatacaatgattcttggacctttgaccctttctgcttcaaggattaatgtgtgactgtgtttagccttcaatccaagcgacatgccactaatctcaaaaatgcttctatgcaatatttacttgacaatttatatctctgctgttccttagagatattttcatgtaatatgttacaaggttgttcatgtgagatttttggtcataaattatattatatatgaagataatgggagtcagccctaaattcatattatctgcaatctgcagtttcttgaaaaaaatgtttgatctacatcagaattttcccaaaatatctaacagacttgttttcttcaggccaggaacccagggtctacacatcttataactgaaaaacacataagcagtatgcggttcacacttttttcttgtttgcattttataaaccattagacccttgtaacaaaaagcagattgtttagatgttatgctctcttatatggagattctcaagtatcttagaatcagttatgtgttggataaatgtcttggttatttactcttctattagtgctctaggcttgttctgtgttggataaatgtcttggttatttactcttctatcctcaagtatcttaggaataggattcatgacaatgagccattgatttctgaagttttccaagctaacctatttgctttgtaggcaagaaggtgagcaaggcatctaagatccagtggcttgtgaacccttgacccttcagaggaagcatgctagaatcattgacaagaagattgccaagaagaagtctgaggctgtcgagtaccaaaagcttcttcctataggctgaaggaatagagatcaccacaatgagagcttggccaagagaagatccaagctttctacctctgccaaggcttcctctggcacctccgcttaagaatgtcttaagaatgttcagtgcttttgagatgttttcaagacctatcttgttacagcttaagtaccttatgctgctctagctgtgttgcaactgtccctatacttgacagatttgcattagatgcttaggctatagagggtaggatcctaattgtgaccatgtactaaattatatatctgttgctaagttacagtacagacaaaataaatttagcctggccaacttgtagaaaacgactaacttgtagaaaaacgtgttattgtaactaagaatatctaaattgctcctatgttactttctatattcat

SEQ ID NO: 80891 - DNA, 5855 bp, Zea Mays
cgcatcgcaactcaacattctacctcgcgaaaccctatcaacgccgccgtcacccgaaccccatccacgaggaagtcgcgccagcgccggagcgtcctcaccgccgacgccgcgacgccgccgctgaagcctgcggtgatgcagaagacggcgacactcgctaccaaccatgaccctgccgtggtcttgcaagcgacagaaccaagccctccactccctttctccatcctctcgtggaagatgaagacgcaaccgtcgcacgcccgatgacagcactcacatcgttccctcttcctcttcctcccgcgcaaggtcaaccatgtcgtcaccggaacgggaacccgccacccctcgtctccgtctggaatcaggtgattcttgcagcctctgtagtatcaaagtctgtaaaagctaattttataatagagcgcgacgcatagcagctcattgagcctgcccacgttagcaaaaagaatatagaccctgcgatgaaacatcaacgatcacggaggtctcagcatgttgcctacatagactcacgctgcttctagagaggtccagcgcatggggaaaaaagaggcagactcgagttgccgtcgtcttcgctggcccttgcctatcgtccgttcgcattcatctcattcaactggtaaaattaggagcactccctcacacgctacacagcgacctggccaacatgctagccggtggctcatcgtatctggcgactctgggccactggagcttctccaaccacagtctcaactctcaagaagctcccagccgccgctccctctcccccatcctcctaccacgacgatggatcctgctaccgtcgtcgtcatcgaggagtcataccggtcctactattgcatgcgcggtgtaaggaactccaagcagtgtacggaagacaacagggcgaaagctaaattgcagaaaagaaaaggaggacatttgactgttgaacgatggtcgaaggttccaatttcggtggcatgattggtggtcatgatgatgataggaatttactagacctctccggaatataaagtaatcagccatatagtatgtggtcctggagttcatagttttgctacttttctggcgtgacgatgtggcggaggcgatgacagggcctaaaacggattggtcgtcctgctctgtgtcggaagttatgtgaattttctgcctcctagcgctagacagatgaactccttgccattgctttctactgttgtttgtttattttaatgcagcaacagagcctatgaagaagccctattttctgctgctgtttgccaactccaagtagatcgcccactgaagaagctcaccctcctcgctatagaagaaccgtgaaattttgtttcgttgccatagtggaaattgcagctgcaatgcgtgagggatggttgtcgggtgtgttttcctgactatatatgccttgagatatttccctgaggaggcaatagatccagatgtgttattgtcacttgccttctcatttaaggtgattcatgcaagtgctcacctcccgaagatatgaagaaagtaagaaaacaaatcgtcgatcacatttacccgtggatattagaatgccaagagaaaggacatgccaaagtgccatcattgggaagcaaatggatgtttaggacggacactggggctttgaagtagttggtggctgcgactgcgaggccgagacgggttagattgagagaggtgggcagatggcgacactgtcgtcgtcgctttgctccagctttgcctccctgcggaccgcctccatcggccaccctcgcgtcatcatgtcatctacgcccaggttagtttctccttccctgcttcctatttgcctgtgtctgagtagcgacgccctcgcgtgaggtacgaatgtagtagcaccgagcgggcgggtggccacctcttccattcagtcgcatactcgcatctcgctccttgtcagtcttagttcctagcgatctcttgtctcgttgccggcccccgacggctccgtgcggctgctgctgcgaattccattcttaaatttttgtccacctgatggcggcctccaagtggcccagtctcttaaactatgcagttgtagacaacttatatagttgcagtagtttcagtcttttgctgctgcaaacatgaaatccaattatctattgaacctgttttgcgagtttgtgcgctatggcccgacaacgaattcgtattgatttgttctatgaagaggtagattagggatctcaatcattttgaatgtgttattttccattatttttgtctctgttgattctgtgttgctgcttgccatttctctattaagataaaagaggaaaaacatttatatcgatcaacaaagtctaaagcttgcagtagagtgggcttatttgaaatgattttgattatcaattttgtggcacctcataaaaggaactcaagtgacattcagagatgagagattgcctggatttctagcaagattcatgcaacgtcgggaggtgggaaaatatttttttgtcaacctaaaagtatgcttcttattaccaactaggactgcataccagttaggttcagactctgtaaacaaaggccaataccctatcagcacaactcacactgctccaggtatatgcacaatgttaccagtgaagtataatttcagacaggtatatgcacaacgtggcacctgatagttcaaagaccatcacggaaaaaatcagtgagtatgacgagaccctgtttttcttctacgaaacaataggttctgatgcatgtgtgatattgactatgctttagatattagttctttagttcaaagatcacacattcttttctgatagttttgacatttcatcgaagataacttttttactttgtttcagtcttgcgggaaatcagttcatttgcaattcatcaattatacatggttgttcggatctgatagcaatgattaatgataattgatttcccagatggcacatatctattctttagaaactggaagttaattgtacattaatggcagagacaatgtcagtacaggtccaaaggtccaagaacaccatgagttagctctaccaatttctttcagtgtcacatgtttcgcaatatttgttttgttgtttgtgtattggctaagttactacttaatacagatggtgctttcttttacttcagctggtaattatctaagcctatgtagtattaacaccttacacgttaaatatacatgatttgactttttattgtataccaagatctataatttgaattgggtcatgtgaagcattttgcatttcatgatctgcaaagtgcaacatacaattataattccaataatatattaggtcaagtaggttttagcattgtgtataaaggttgtttgaaaaatggagctttagtgatagtaaagagattaaaagatcttgatgttaccagtgaagtataatttcagacagaaattgagttgattggccttgtcgtgcacagggtgtttataaggattttgcatgacctctaaagaacggttgcttgtatatccatatatgccaaatggtagtgttgctgaccgcttgagatgtaactcaattgtctacaacattgtttgttagttaagtctataattggcattctgcacaagtttgcattccttgtcaatattttgtgatctacaaagtgcaacaaacaattttaattccaagaatatattaagtaaaggaggttttggcattgtgtataaaggttgtttgagaaatggcttgtgtttcatatccttgatattatgaatttacataatacaatctaatctgaaagatagttttttcaggctcaagcgatagcgtgcgtgcatgagacttagatggcggcttcggaggcggcaacgacaatgttaaaaatagtttttctcacaaaattaaaataactatcttgcttttcaggcattgccagaaatagctcaaaagattacacggttggagaatgagataccttgcttgattcttctggcgaggtgtggtaatcttaattattgtattcagtattgttcttatgtgaatttatcatcctcctccctaatattagacttgcacattttcttttacatactgatcttgctgaacatcacaaattggggcttgatatatctgaactggagaagaaaatcatttatgagatgatgagaccagagaggactttgttgtatttggttcctggaaggctggttagggtgagggatggttcaacagactggggatggggtgtggtgtggttgtaaatctatactactccttaacaagctaaggagggcgtccacaactccgtgcccccgcccccgtctctcgctcgcgacctcccgcacgacgcgccagggcaatctggactttgctacatactggtttttacatgcacaataaagctagctggtatcacatttactggtgatcctgctaagaataagaaagatctatttggtgctattgcaatggtattgagagttgtaggaggcaagaattcacaattatctttgcctacacgctattctctgaacacaatatttacgagcttgataggtctattttggaatacgaattatgagtttggtaggtaaataatttatacaatgattcttggacctttgaccctttctgcttcaaggattaatgtgtgactgtgtttagccttcaatccaagcgacatgccactaatctcaaaaatgcttctatgcaatatttacttgacaatttatatctctgctgttccttagagatattttcatgtaatatgttacaaggttgttcatgtgagatttttggtcataaattatattatatatgaagataatgggagtcagccctaaattcatattatctgcaatctgcagtttcttgaaaaaaatgtttgatctacatcagaattttcccaaaatatctaacagacttgttttcttcaggccaggaacccagggtctacacatcttataactgaaaaacacataagcagtatgcggttcacacttttttcttgtttgcattttataaaccattagacccttgtaacaaaaagcagattgtttagatgttatgctctcttatatggagattctcaagtatcttagaatcagttatgtgttggataaatgtcttggttatttactcttctattagtgctctaggcttgttctgtgttggataaatgtcttggttatttactcttctatcctcaagtatcttaggaataggattcatgacaatgagccattgatttctgaagttttccaagctaacctatttgctttgtaggcaagaaggtgagcaaggcatctaagatccagtggcttgtgaacccttgacccttcagaggaagcatgctagaatcattgacaagaagattgccaagaagaagtctgaggctgtcgagtaccaaaagcttcttcctataggctgaaggaatagagatcaccacaatgagagcttggccaagagaagatccaagctttctacctctgccaaggcttcctctggcacctccgcttaagaatgtcttaagaatgttcagtgcttttgagatgttttcaagacctatcttgttacagcttaagtaccttatgctgctctagctgtgttgcaactgtccctatacttgacagatttgcattagatgcttaggctatagagggtaggatcctaattgtgaccatgtactaaattatatatctgttgctaagttacagtacagacaaaataaatttagcctggccaacttgtagaaaacgactaacttgtagaaaaacgtgttattgtaactaagaatatctaaattgctcctatgttactttctatattcat

SEQ ID NO: 80892 - DNA, 3464 bp, Zea Mays
cgcatcgcaactcaacattctacctcgcgaaaccctatcaacgccgccgtcacccgaaccccatccacgaggaagtcgcgccagcgccggagcgtcctcaccgccgacgccgcgacgccgccgctgaagcctgcggtgatgcagaagacggcgacactcgctaccaaccatgaccctgccgtggtcttgcaagcgacagaaccaagccctccactccctttctccatcctctcgtggaagatgaagacgcaaccgtcgcacgcccgatgacagcactcacatcgttccctcttcctcttcctcccgcgcaaggtcaaccatgtcgtcaccggaacgggaacccgccacccctcgtctccgtctggaatcaggtgattcttgcagcctctgtagtatcaaagtctgtaaaagctaattttataatagagcgcgacgcatagcagctcattgagcctgcccacgttagcaaaaagaatatagaccctgcgatgaaacatcaacgatcacggaggtctcagcatgttgcctacatagactcacgctgcttctagagaggtccagcgcatggggaaaaaagaggcagactcgagttgccgtcgtcttcgctggcccttgcctatcgtccgttcgcattcatctcattcaactggtaaaattaggagcactccctcacacgctacacagcgacctggccaacatgctagccggtggctcatcgtatctggcgactctgggccactggagcttctccaaccacagtctcaactctcaagaagctcccagccgccgctccctctcccccatcctcctaccacgacgatggatcctgctaccgtcgtcgtcatcgaggagtcataccggtcctactattgcatgcgcaacagagcctatgaagaagccctattttctgctgctgtttgccaactccaagtagatcgcccactgaagaagctcaccctcctcgctatagaagaaccgtgaaattttgtttcgttgccatagtggaaattgcagctgcaatgcgtgagggatggttgtcgggtgtgttttcctgactatatatgccttgagatatttccctgaggaggcaatagatccagatgtgttattgtcacttgccttctcatttaaggtgattcatgcaagtgctcacctcccgaagatatgaagaaagtaagaaaacaaatcgtcgatcacatttacccgtggatattagaatgccaagagaaaggacatgccaaagtgccatcattgggaagcaaatggatgtttaggacggacactggggctttgaagtagttggtggctgcgactgcgaggccgagacgggttagattgagagaggtgggcagatggcgacactgtcgtcgtcgctttgctccagctttgcctccctgcggaccgcctccatcggccaccctcgcgtcatcatgtcatctacgcccaggctcaagcgatagcgtgcgtgcatgagacttagatggcggcttcggaggcggcaacgacaatgttaaaaatagtttttctcacaaaattaaaataactatcttgcttttcaggcattgccagaaatagctcaaaagattacacggttggagaatgagataccttgcttgattcttctggcgaggtgtggtaatcttaattattgtattcagtattgttcttatgtgaatttatcatcctcctccctaatattagacttgcacattttcttttacatactgatcttgctgaacatcacaaattggggcttgatatatctgaactggagaagaaaatcatttatgagatgatgagaccagagaggactttgttgtatttggttcctggaaggctggttagggtgagggatggttcaacagactggggatggggtgtggtgtggttgtaaatctatactactccttaacaagctaaggagggcgtccacaactccgtgcccccgcccccgtctctcgctcgcgacctcccgcacgacgcgccagggcaatctggactttgctacatactggtttttacatgcacaataaagctagctggtatcacatttactggtgatcctgctaagaataagaaagatctatttggtgctattgcaatggtattgagagttgtaggaggcaagaattcacaattatctttgcctacacgctattctctgaacacaatatttacgagcttgataggtctattttggaatacgaattatgagtttggtaggtaaataatttatacaatgattcttggacctttgaccctttctgcttcaaggattaatgtgtgactgtgtttagccttcaatccaagcgacatgccactaatctcaaaaatgcttctatgcaatatttacttgacaatttatatctctgctgttccttagagatattttcatgtaatatgttacaaggttgttcatgtgagatttttggtcataaattatattatatatgaagataatgggagtcagccctaaattcatattatctgcaatctgcagtttcttgaaaaaaatgtttgatctacatcagaattttcccaaaatatctaacagacttgttttcttcaggccaggaacccagggtctacacatcttataactgaaaaacacataagcagtatgcggttcacacttttttcttgtttgcattttataaaccattagacccttgtaacaaaaagcagattgtttagatgttatgctctcttatatggagattctcaagtatcttagaatcagttatgtgttggataaatgtcttggttatttactcttctattagtgctctaggcttgttctgtgttggataaatgtcttggttatttactcttctatcctcaagtatcttaggaataggattcatgacaatgagccattgatttctgaagttttccaagctaacctatttgctttgtaggcaagaaggtgagcaaggcatctaagatccagtggcttgtgaacccttgacccttcagaggaagcatgctagaatcattgacaagaagattgccaagaagaagtctgaggctgtcgagtaccaaaagcttcttcctataggctgaaggaatagagatcaccacaatgagagcttggccaagagaagatccaagctttctacctctgccaaggcttcctctggcacctccgcttaagaatgtcttaagaatgttcagtgcttttgagatgttttcaagacctatcttgttacagcttaagtaccttatgctgctctagctgtgttgcaactgtccctatacttgacagatttgcattagatgcttaggctatagagggtaggatcctaattgtgaccatgtactaaattatatatctgttgctaagttacagtacagacaaaataaatttagcctggccaacttgtagaaaacgactaacttgtagaaaaacgtgttattgtaactaagaatatctaaattgctcctatgttactttctatattcat

SEQ ID NO: 80893 - DNA, 5109 bp, Zea Mays
cgcatcgcaactcaacattctacctcgcgaaaccctatcaacgccgccgtcacccgaaccccatccacgaggaagtcgcgccagcgccggagcgtcctcaccgccgacgccgcgacgccgccgctgaagcctgcggtgatgcagaagacggcgacactcgctaccaaccatgaccctgccgtggtcttgcaagcgacagaaccaagccctccactccctttctccatcctctcgtggaagatgaagacgcaaccgtcgcacgcccgatgacagcactcacatcgttccctcttcctcttcctcccgcgcaaggtcaaccatgtcgtcaccggaacgggaacccgccacccctcgtctccgtctggaatcaggtgattcttgcagcctctgtagtatcaaagtctgtaaaagctaattttataatagagcgcgacgcatagcagctcattgagcctgcccacgttagcaaaaagaatatagaccctgcgatgaaacatcaacgatcacggaggtctcagcatgttgcctacatagactcacgctgcttctagagaggtccagcgcatggggaaaaaagaggcagactcgagttgccgtcgtcttcgctggcccttgcctatcgtccgttcgcattcatctcattcaactggtaaaattaggagcactccctcacacgctacacagcgacctggccaacatgctagccggtggctcatcgtatctggcgactctgggccactggagcttctccaaccacagtctcaactctcaagaagctcccagccgccgctccctctcccccatcctcctaccacgacgatggatcctgctaccgtcgtcgtcatcgaggagtcataccggtcctactattgcatgcgcggtgtaaggaactccaagcagtgtacggaagacaacagggcgaaagctaaattgcagaaaagaaaaggaggacatttgactgttgaacgatggtcgaaggttccaatttcggtggcatgattggtggtcatgatgatgataggaatttactagacctctccggaatataaagtaatcagccatatagtatgtggtcctggagttcatagttttgctacttttctggcgtgacgatgtggcggaggcgatgacagggcctaaaacggattggtcgtcctgctctgtgtcggaagttatgtgaattttctgcctcctagcgctagacagatgaactccttgccattgctttctactgttgtttgtttattttaatgcagcaacagagcctatgaagaagccctattttctgctgctgtttgccaactccaagtagatcgcccactgaagaagctcaccctcctcgctatagaagaaccgtgaaattttgtttcgttgccatagtggaaattgcagctgcaatgcgtgagggatggttgtcgggtgtgttttcctgactatatatgccttgagatatttccctgaggaggcaatagatccagatgtgttattgtcacttgccttctcatttaaggtgattcatgcaagtgctcacctcccgaagatatgaagaaagtaagaaaacaaatcgtcgatcacatttacccgtggatattagaatgccaagagaaaggacatgccaaagtgccatcattgggaagcaaatggatgtttaggacggacactggggctttgaagtagttggtggctgcgactgcgaggccgagacgggttagattgagagaggtgggcagatggcgacactgtcgtcgtcgctttgctccagctttgcctccctgcggaccgcctccatcggccaccctcgcgtcatcatgtcatctacgcccaggttagtttctccttccctgcttcctatttgcctgtgtctgagtagcgacgccctcgcgtgaggtacgaatgtagtagcaccgagcgggcgggtggccacctcttccattcagtcgcatactcgcatctcgctccttgtcagtcttagttcctagcgatctcttgtctcgttgccggcccccgacggctccgtgcggctgctgctgcgaattccattcttaaatttttgtccacctgatggcggcctccaagtggcccagtctcttaaactatgcagttgtagacaacttatatagttgcagtagtttcagtcttttgctgctgcaaacatgaaatccaattatctattgaacctgttttgcgagtttgtgcgctatggcccgacaacgaattcgtattgatttgttctatgaagaggtagattagggatctcaatcattttgaatgtgttattttccattatttttgtctctgttgattctgtgttgctgcttgccatttctctattaagataaaagaggaaaaacatttatatcgatcaacaaagtctaaagcttgcagtagagtgggcttatttgaaatgattttgattatcaattttgtggcacctcataaaaggaactcaagtgacattcagagatgagagattgcctggatttctagcaagattcatgcaacgtcgggaggtgggaaaatatttttttgtcaacctaaaagtatgcttcttattaccaactaggactgcataccagttaggttcagactctgtaaacaaaggccaataccctatcagcacaactcacactgctccaggtatatgcacaatgttaccagtgaagtataatttcagacaggtatatgcacaacgtggcacctgatagttcaaagaccatcacggaaaaaatcagtgagtatgacgagaccctgtttttcttctacgaaacaataggttctgatgcatgtgtgatattgactatgctttagatattagttctttagttcaaagatcacacattcttttctgatagttttgacatttcatcgaagataacttttttactttgtttcagtcttgcgggaaatcagttcatttgcaattcatcaattatacatggttgttcggatctgatagcaatgattaatgataattgatttcccagatggcacatatctattctttagaaactggaagttaattgtacattaatggcagagacaatgtcagtacaggtccaaaggtccaagaacaccatgagttagctctaccaatttctttcagtgtcacatgtttcgcaatatttgttttgttgtttgtgtattggctaagttactacttaatacagatggtgctttcttttacttcagctggtaattatctaagcctatgtagtattaacaccttacacgttaaatatacatgatttgactttttattgtataccaagatctataatttgaattgggtcatgtgaagcattttgcatttcatgatctgcaaagtgcaacatacaattataattccaataatatattaggtcaagtaggttttagcattgtgtataaaggttgtttgaaaaatggagctttagtgatagtaaagagattaaaagatcttgatgttaccagtgaagtataatttcagacagaaattgagttgattggccttgtcgtgcacagggtgtttataaggattttgcatgacctctaaagaacggttgcttgtatatccatatatgccaaatggtagtgttgctgaccgcttgagatgtaactcaattgtctacaacattgtttgttagttaagtctataattggcattctgcacaagtttgcattccttgtcaatattttgtgatctacaaagtgcaacaaacaattttaattccaagaatatattaagtaaaggaggttttggcattgtgtataaaggttgtttgagaaatggcttgtgtttcatatccttgatattatgaatttacataatacaatctaatctgaaagatagttttttcaggctcaagcgatagcgtgcgtgcatgagacttagatggcggcttcggaggcggcaacgacaatgttaaaaatagtttttctcacaaaattaaaataactatcttgcttttcaggcattgccagaaatagctcaaaagattacacggttggagaatgagataccttgcttgattcttctggcgaggtgtggtaatcttaattattgtattcagtattgttcttatgtgaatttatcatcctcctccctaatattagacttgcacattttcttttacatactgatcttgctgaacatcacaaattggggcttgatatatctgaactggagaagaaaatcatttatgagatgatgagaccagagaggactttgttgtatttggttcctggaaggctggttagggtgagggatggttcaacagactggggatggggtgtggtgtggttgtaaatctatactactccttaacaagctaaggagggcgtccacaactccgtgcccccgcccccgtctctcgctcgcgacctcccgcacgacgcgccagggcaatctggactttgctacatactggtttttacatgcacaataaagctagctggtatcacatttactggtgatcctgctaagaataagaaagatctatttggtgctattgcaatggtattgagagttgtaggaggccaggaacccagggtctacacatcttataactgaaaaacacataagcagcaagaaggtgagcaaggcatctaagatccagtggcttgtgaacccttgacccttcagaggaagcatgctagaatcattgacaagaagattgccaagaagaagtctgaggctgtcgagtaccaaaagcttcttcctataggctgaaggaatagagatcaccacaatgagagcttggccaagagaagatccaagctttctacctctgccaaggcttcctctggcacctccgcttaagaatgtcttaagaatgttcagtgcttttgagatgttttcaagacctatcttgttacagcttaagtaccttatgctgctctagctgtgttgcaactgtccctatacttgacagatttgcattagatgcttaggctatagagggtaggatcctaattgtgaccatgtactaaattatatatctgttgctaagttacagtacagacaaaataaatttagcctggccaacttgtagaaaacgactaacttgtagaaaaacgtgttattgtaactaagaatatctaaattgctcctatgttactttctatattcat

SEQ ID NO: 80894 - DNA, 2891 bp, Zea Mays
cgcatcgcaactcaacattctacctcgcgaaaccctatcaacgccgccgtcacccgaaccccatccacgaggaagtcgcgccagcgccggagcgtcctcaccgccgacgccgcgacgccgccgctgaagcctgcggtgatgcagaagacggcgacactcgctaccaaccatgaccctgccgtggtcttgcaagcgacagaaccaagccctccactccctttctccatcctctcgtggaagatgaagacgcaaccgtcgcacgcccgatgacagcactcacatcgttccctcttcctcttcctcccgcgcaaggtcaaccatgtcgtcaccggaacgggaacccgccacccctcgtctccgtctggaatcaggtgattcttgcagcctctgtagtatcaaagtctgtaaaagctaattttataatagagcgcgacgcatagcagctcattgagcctgcccacgttagcaaaaagaatatagaccctgcgatgaaacatcaacgatcacggaggtctcagcatgttgcctacatagactcacgctgcttctagagaggtccagcgcatggggaaaaaagaggcagactcgagttgccgtcgtcttcgctggcccttgcctatcgtccgttcgcattcatctcattcaactggtaaaattaggagcactccctcacacgctacacagcgacctggccaacatgctagccggtggctcatcgtatctggcgactctgggccactggagcttctccaaccacagtctcaactctcaagaagctcccagccgccgctccctctcccccatcctcctaccacgacgatggatcctgctaccgtcgtcgtcatcgaggagtcataccggtcctactattgcatgcggaactccaagcagtgtacggaagacaacagggcgaaagctaaattgcagaaaagaaaaggaggacatttgactgttgaacgatggtcgaaggttccaatttcggtggcatgattggtggtcatgatgatgataggaatttactagacctctccggaatataaagtaatcagccatatagtatgtggtcctggagttcatagttttgctacttttctggcgtgacgatgtggcggaggcgatgacagggcctaaaacggattggtcgtcctgctctgtgtcggaagttatgtgaattttctgcctcctagcgctagacagatgaactccttgccattgctttctactgttgtttgtttattttaatgcagcaacagagcctatgaagaagccctattttctgctgctgtttgccaactccaagtagatcgcccactgaagaagctcaccctcctcgctatagaagaaccgtgaaattttgtttcgttgccatagtggaaattgcagctgcaatgcgtgagggatggttgtcgggtgtgttttcctgactatatatgccttgagatatttccctgaggaggcaatagatccagatgtgttattgtcacttgccttctcatttaaggtgattcatgcaagtgctcacctcccgaagatatgaagaaagtaagaaaacaaatcgtcgatcacatttacccgtggatattagaatgccaagagaaaggacatgccaaagtgccatcattgggaagcaaatggatgtttaggacggacactggggctttgaagtagttggtggctgcgactgcgaggccgagacgggttagattgagagaggtgggcagatggcgacactgtcgtcgtcgctttgctccagctttgcctccctgcggaccgcctccatcggccaccctcgcgtcatcatgtcatctacgcccaggctcaagcgatagcgtgcgtgcatgagacttagatggcggcttcggaggcggcaacgacaatgttaaaaatagtttttctcacaaaattaaaataactatcttgcttttcaggcattgccagaaatagctcaaaagattacacggttggagaatgagataccttgcttgattcttctggcgagaaaatcatttatgagatgatgagaccagagaggactttgttgtatttggttcctggaaggctggttagggtgagggatggttcaacagactggggatggggtgtggtgtggttgtaaatctatactactccttaacaagctaaggagggcgtccacaactccgtgcccccgcccccgtctctcgctcgcgacctcccgcacgacgcgccagggcaatctggactttgctacatactggtttttacatgcacaataaagctagctggtatcacatttactggtgatcctgctaagaataagaaagatctatttggtgctattgcaatggtattgagagttgtaggaggcaagaaggtgagcaaggcatctaagatccagtggcttgtgaacccttgacccttcagaggaagcatgctagaatcattgacaagaagattgccaagaagaagtctgaggctgtcgagtaccaaaagcttcttcctataggctgaaggaatagagatcaccacaatgagagcttggccaagagaagatccaagctttctacctctgccaaggcttcctctggcacctccgcttaagaatgtcttaagaatgttcagtgcttttgagatgttttcaagacctatcttgttacagcttaagtaccttatgctgctctagctgtgttgcaactgtccctatacttgacagatttgcattagatgcttaggctatagagggtaggatcctaattgtgaccatgtactaaattatatatctgttgctaagttacagtacagacaaaataaatttagcctggccaacttgtagaaaacgactaacttgtagaaaaacgtgttattgtaactaagaatatctaaattgctcctatgttactttctatattcat

SEQ ID NO: 80895 - DNA, 4537 bp, Zea Mays
acccgaaccccatccacgaggaagtcgcgccagcgccggagcgtcctcaccgccgacgccgcgacgccgccgctgaagcctgcggtgatgcagaagacggcgacactcgctaccaaccatgaccctgccgtggtcttgcaagcgacagaaccaagccctccactccctttctccatcctctcgtggaagatgaagacgcaaccgtcgcacgcccgatgacagcactcacatcgttccctcttcctcttcctcccgcgcaaggtcaaccatgtcgtcaccggaacgggaacccgccacccctcgtctccgtctggaatcaggtgattcttgcagcctctgtagtatcaaagtctgtaaaaggaactccaagcagtgtacggaagacaacagggcgaaagctaaattgcagaaaagaaaaggaggacatttgactgttgaacgatggtcgaaggttccaatttcggtggcatgattggtggtcatgatgatgataggaatttactagacctctccggaatataaagtaatcagccatatagtatgtggtcctggagttcatagttttgctacttttctggcgtgacgatgtggcggaggcgatgacagggcctaaaacggattggtcgtcctgctctgtgtcggaagttatgtgaattttctgcctcctagcgctagacagatgaactccttgccattgctttctactgttgtttgtttattttaatgcagcaacagagcctatgaagaagccctattttctgctgctgtttgccaactccaagtagatcgcccactgaagaagctcaccctcctcgctatagaagaaccgtgaaattttgtttcgttgccatagtggaaattgcagctgcaatgcgtgagggatggttgtcgggtgtgttttcctgactatatatgccttgagatatttccctgaggaggcaatagatccagatgtgttattgtcacttgccttctcatttaagtcctgttatattctgtccaccaggtgattcatgcaagtgctcacctcccgaagatatgaagaaagtaagaaaacaaatcgtcgatcacatttacccgtggatattagaatgccaagagaaaggacatgccaaagtgccatcattgggaagcaaatggatgtttaggacggacactggggctttgaagtagttggtggctgcgactgcgaggccgagacgggttagattgagagaggtgggcagatggcgacactgtcgtcgtcgctttgctccagctttgcctccctgcggaccgcctccatcggccaccctcgcgtcatcatgtcatctacgcccaggttagtttctccttccctgcttcctatttgcctgtgtctgagtagcgacgccctcgcgtgaggtacgaatgtagtagcaccgagcgggcgggtggccacctcttccattcagtcgcatactcgcatctcgctccttgtcagtcttagttcctagcgatctcttgtctcgttgccggcccccgacggctccgtgcggctgctgctgcgaattccattcttaaatttttgtccacctgatggcggcctccaagtggcccagtctcttaaactatgcagttgtagacaacttatatagttgcagtagtttcagtcttttgctgctgcaaacatgaaatccaattatctattgaacctgttttgcgagtttgtgcgctatggcccgacaacgaattcgtattgatttgttctatgaagaggtagattagggatctcaatcattttgaatgtgttattttccattatttttgtctctgttgattctgtgttgctgcttgccatttctctattaagataaaagaggaaaaacatttatatcgatcaacaaagtctaaagcttgcagtagagtgggcttatttgaaatgattttgattatcaattttgtggcacctcataaaaggaactcaagtgacattcagagatgagagattgcctggatttctagcaagattcatgcaacgtcgggaggtgggaaaatatttttttgtcaacctaaaagtatgcttcttattaccaactaggactgcataccagttaggttcagactctgtaaacaaaggccaataccctatcagcacaactcacactgctccaggtatatgcacaatgttaccagtgaagtataatttcagacaggtatatgcacaacgtggcacctgatagttcaaagaccatcacggaaaaaatcagtgagtatgacgagaccctgtttttcttctacgaaacaataggttctgatgcatgtgtgatattgactatgctttagatattagttctttagttcaaagatcacacattcttttctgatagttttgacatttcatcgaagataacttttttactttgtttcagtcttgcgggaaatcagttcatttgcaattcatcaattatacatggttgttcggatctgatagcaatgattaatgataattgatttcccagatggcacatatctattctttagaaactggaagttaattgtacattaatggcagagacaatgtcagtacaggtccaaaggtccaagaacaccatgagttagctctaccaatttctttcagtgtcacatgtttcgcaatatttgttttgttgtttgtgtattggctaagttactacttaatacagatggtgctttcttttacttcagctggtaattatctaagcctatgtagtattaacaccttacacgttaaatatacatgatttgactttttattgtataccaagatctataatttgaattgggtcatgtgaagcattttgcatttcatgatctgcaaagtgcaacatacaattataattccaataatatattaggtcaagtaggttttagcattgtgtataaaggttgtttgaaaaatggagctttagtgatagtaaagagattaaaagatcttgatgttaccagtgaagtataatttcagacagaaattgagttgattggccttgtcgtgcacagggtgtttataaggattttgcatgacctctaaagaacggttgcttgtatatccatatatgccaaatggtagtgttgctgaccgcttgagatgtaactcaattgtctacaacattgtttgttagttaagtctataattggcattctgcacaagtttgcattccttgtcaatattttgtgatctacaaagtgcaacaaacaattttaattccaagaatatattaagtaaaggaggttttggcattgtgtataaaggttgtttgagaaatggcttgtgtttcatatccttgatattatgaatttacataatacaatctaatctgaaagatagttttttcaggctcaagcgatagcgtgcgtgcatgagacttagatggcggcttcggaggcggcaacgacaatgttaaaaatagtttttctcacaaaattaaaataactatcttgcttttcaggcattgccagaaatagctcaaaagattacacggttggagaatgagataccttgcttgattcttctggcgaggtgtggtaatcttaattattgtattcagtattgttcttatgtgaatttatcatcctcctccctaatattagacttgcacattttcttttacatactgatcttgctgaacatcacaaattggggcttgatatatctgaactggagaagaaaatcatttatgagatgatgagaccagagaggactttgttgtatttggttcctggaaggctggttagggtgagggatggttcaacagactggggatggggtgtggtgtggttgtaaatctatactactccttaacaagctaaggagggcgtccacaactccgtgcccccgcccccgtctctcgctcgcgacctcccgcacgacgcgccagggcaatctggactttgctacatactggtttttacatgcacaataaagctagctggtatcacatttactggtgatcctgctaagaataagaaagatctatttggtgctattgcaatggcaagaaggtgagcaaggcatctaagatccagtggcttgtgaacccttgacccttcagaggaagcatgctagaatcattgacaagaagattgccaagaagaagtctgaggctgtcgagtaccaaaagcttcttcctataggctgaaggaatagagatcaccacaatgagagcttggccaagagaagatccaagctttctacctctgccaaggcttcctctggcacctccgcttaagaatgtcttaagaatgttcagtgcttttgagatgttttcaagacctatcttgttacagcttaagtaccttatgctgctctagctgtgttgcaactgtccctatacttgacagatttgcattagatgcttaggctatagagggtaggatcctaattgtgaccatgtactaaattatatatctgttgctaagttacagtacagacaaaataaatttagcctggccaacttgtagaaaacgactaacttgtagaaaaacgtgttattgtaactaagaatatctaaattgctcctatgttactttctatattcat

SEQ ID NO: 80896 - DNA, 2752 bp, Zea Mays
agcctctgtagtatcaaagtctgtaaaagcggtgtaaggaactccaagcagtgtacggaagacaacagggcgaaagctaaattgcagaaaagaaaaggaggacatttgactgttgaacgatggtcgaaggttccaatttcggtggcatgattggtggtcatgatgatgataggaatttactagacctctccggaatataaagtaatcagccatatagtatgtggtcctggagttcatagttttgctacttttctggcgtgacgatgtggcggaggcgatgacagggcctaaaacggattggtcgtcctgctctgtgtcggaagttatgtgaattttctgcctcctagcgctagacagatgaactccttgccattgctttctactgttgtttgtttattttaatgcagcaacagagcctatgaagaagccctattttctgctgctgtttgccaactccaagtagatcgcccactgaagaagctcaccctcctcgctatagaagaaccgtgaaattttgtttcgttgccatagtggaaattgcagctgcaatgcgtgagggatggttgtcgggtgtgttttcctgactatatatgccttgagatatttccctgaggaggcaatagatccagatgtgttattgtcacttgccttctcatttaaggtgattcatgcaagtgctcacctcccgaagatatgaagaaagtaagaaaacaaatcgtcgatcacatttacccgtggatattagaatgccaagagaaaggacatgccaaagtgccatcattgggaagcaaatggatgtttaggactgcataccagttaggttcagactctgtaaacaaaggccaataccctatcagcacaactcacactgctccaggtatatgcacaatgttaccagtgaagtataatttcagacaggcattgccagaaatagctcaaaagattacacggttggagaatgagataccttgcttgattcttctggcgagacttgcacattttcttttacatactgatcttgctgaacatcacaaattggggcttgatatatctgaactggagaagaaaatcatttatgagatgatgagaccagagaggactttgttgtatttggttcctggaaggctggttagggtgagggatggttcaacagactggggatggggtgtggtgtggttgtaaatctatactactccttaacaagctaaggagggcgtccacaactccgtgcccccgcccccgtctctcgctcgcgacctcccgcacgacgcgccagggcaatctggactttgctacatactggtttttacatgcacaataaagctagctggtatcacatttactggtgatcctgctaagaataagaaagatctatttggtgctattgcaatggtattgagagttgtaggaggcaagaattcacaattatctttgcctacacgctattctctgaacacaatatttacgagcttgataggtctattttggaatacgaattatgagtttggtaggtaaataatttatacaatgattcttggacctttgaccctttctgcttcaaggattaatgtgtgactgtgtttagccttcaatccaagcgacatgccactaatctcaaaaatgcttctatgcaatatttacttgacaatttatatctctgctgttccttagagatattttcatgtaatatgttacaaggttgttcatgtgagatttttggtcataaattatattatatatgaagataatgggagtcagccctaaattcatattatctgcaatctgcagtttcttgaaaaaaatgtttgatctacatcagaattttcccaaaatatctaacagacttgttttcttcaggccaggaacccagggtctacacatcttataactgaaaaacacataagcagtatgcggttcacacttttttcttgtttgcattttataaaccattagacccttgtaacaaaaagcagattgtttagatgttatgctctcttatatggagattctcaagtatcttagaatcagttatgtgttggataaatgtcttggttatttactcttctattagtgctctaggcttgttctgtgttggataaatgtcttggttatttactcttctatcctcaagtatcttaggaataggattcatgacaatgagccattgatttctgaagttttccaagctaacctatttgctttgtaggcaagaaggtgagcaaggcatctaagatccagtggcttgtgaacccttgacccttcagaggaagcatgctagaatcattgacaagaagattgccaagaagaagtctgaggctgtcgagtaccaaaagcttcttcctataggctgaaggaatagagatcaccacaatgagagcttggccaagagaagatccaagctttctacctctgccaaggcttcctctggcacctccgcttaagaatgtcttaagaatgttcagtgcttttgagatgttttcaagacctatcttgttacagcttaagtaccttatgctgctctagctgtgttgcaactgtccctatacttgacagatttgcattagatgcttaggctatagagggtaggatcctaattgtgaccatgtactaaattatatatctgttgctaagttacagtacagacaaaataaatttagcctggccaacttgtagaaaacgactaacttgtagaaaaacgtgttattgtaactaagaatatctaaattgctcctatgttactttctatattcat

SEQ ID NO: 80897 - DNA, 2320 bp, Zea Mays
atggggaaaaaagaggcagactcgagttgccgtcgtcttcgctggcccttgcctatcgtccgttcgcattcatctcattcaactggtaaaattaggagcactccctcacacgctacacagcgacctggccaacatgctagccggtggctcatcgtatctggcgactctgggccactggagcttctccaaccacagtctcaactctcaagaagctcccagccgccgctccctctcccccatcctcctaccacgacgatggatcctgctaccgtcgtcgtcatcgaggagtcataccggtcctactattgcatgcgcggtgtaaggaactccaagcagtgtacggaagacaacagggcgaaagctaaattgcagaaaagaaaaggaggacatttgactgttgaacgatggtcgaaggttccaatttcggtggcatgattggtggtcatgatgatgataggaatttactagacctctccggaatataaagtaatcagccatatagtatgtggtcctggagttcatagttttgctacttttctggcgtgacgatgtggcggaggcgatgacagggcctaaaacggattggtcgtcctgctctgtgtcggaagttatgtgaattttctgcctcctagcgctagacagatgaactccttgccattgctttctactgttgtttgtttattttaatgcagcaacagagcctatgaagaagccctattttctgctgctgtttgccaactccaagtagatcgcccactgaagaagctcaccctcctcgctatagaagaaccgtgaaattttgtttcgttgccatagtggaaattgcagctgcaatgcgtgagggatggttgtcgggtgtgttttcctgactatatatgccttgagatatttccctgaggaggcaatagatccagatgtgttattgtcacttgccttctcatttaaggtgattcatgcaagtgctcacctcccgaagatatgaagaaagtaagaaaacaaatcgtcgatcacatttacccgtggatattagaatgccaagagaaaggacatgccaaagtgccatcattgggaagcaaatggatgtttaggacggacactggggctttgaagtagttggtggctgcgactgcgaggccgagacgggttagattgagagaggtgggcagatggcgacactgtcgtcgtcgctttgctccagctttgcctccctgcggaccgcctccatcggccaccctcgcgtcatcatgtcatctacgcccaggcattgccagaaatagctcaaaagattacacggttggagaatgagataccttgcttgattcttctggcgagaaaatcatttatgagatgatgagaccagagaggactttgttgtatttggttcctggaaggctggttagggtgagggatggttcaacagactggggatggggtgtggtgtggttgtaaatctatactactccttaacaagctaaggagggcgtccacaactccgtgcccccgcccccgtctctcgctcgcgacctcccgcacgacgcgccagggcaatctggactttgctacatactggtttttacatgcacaataaagctagctggtatcacatttactggtgatcctgctaagaataagaaagatctatttggtgctattgcaatggtattgagagttgtaggaggcaagaattcacaattatctttgcctacacgctattctctgaacacaatatttacgagcttgataggtctattttggaatacgaattatgagtttggcaagaaggtgagcaaggcatctaagatccagtggcttgtgaacccttgacccttcagaggaagcatgctagaatcattgacaagaagattgccaagaagaagtctgaggctgtcgagtaccaaaagcttcttcctataggctgaaggaatagagatcaccacaatgagagcttggccaagagaagatccaagctttctacctctgccaaggcttcctctggcacctccgcttaagaatgtcttaagaatgttcagtgcttttgagatgttttcaagacctatcttgttacagcttaagtaccttatgctgctctagctgtgttgcaactgtccctatacttgacagatttgcattagatgcttaggctatagagggtaggatcctaattgtgaccatgtactaaattatatatctgttgctaagttacagtacagacaaaataaatttagcctggccaacttgtagaaaacgactaacttgtagaaaaacgtgttattgtaactaagaatatctaaattgctcctatgttactttctatattcat

SEQ ID NO: 80898 - DNA, 4832 bp, Zea Mays
atggggaaaaaagaggcagactcgagttgccgtcgtcttcgctggcccttgcctatcgtccgttcgcattcatctcattcaactggtaaaattaggagcactccctcacacgctacacagcgacctggccaacatgctagccggtggctcatcgtatctggcgactctgggccactggagcttctccaaccacagtctcaactctcaagaagctcccagccgccgctccctctcccccatcctcctaccacgacgatggatcctgctaccgtcgtcgtcatcgaggagtcataccggtcctactattgcatgcgcggtgtaaggaactccaagcagtgtacggaagacaacagggcgaaagctaaattgcagaaaagaaaaggaggacatttgactgttgaacgatggtcgaaggttccaatttcggtggcatgattggtggtcatgatgatgataggaatttactagacctctccggaatataaagtaatcagccatatagtatgtggtcctggagttcatagttttgctacttttctggcgtgacgatgtggcggaggcgatgacagggcctaaaacggattggtcgtcctgctctgtgtcggaagttatgtgaattttctgcctcctagcgctagacagatgaactccttgccattgctttctactgttgtttgtttattttaatgcagcaacagagcctatgaagaagccctattttctgctgctgtttgccaactccaagtagatcgcccactgaagaagctcaccctcctcgctatagaaggtgattcatgcaagtgctcacctcccgaagatatgaagaaagtaagaaaacaaatcgtcgatcacatttacccgtggatattagaatgccaagagaaaggacatgccaaagtgccatcattgggaagcaaatggatgtttaggacggacactggggctttgaagtagttggtggctgcgactgcgaggccgagacgggttagattgagagaggtgggcagatggcgacactgtcgtcgtcgctttgctccagctttgcctccctgcggaccgcctccatcggccaccctcgcgtcatcatgtcatctacgcccaggttagtttctccttccctgcttcctatttgcctgtgtctgagtagcgacgccctcgcgtgaggtacgaatgtagtagcaccgagcgggcgggtggccacctcttccattcagtcgcatactcgcatctcgctccttgtcagtcttagttcctagcgatctcttgtctcgttgccggcccccgacggctccgtgcggctgctgctgcgaattccattcttaaatttttgtccacctgatggcggcctccaagtggcccagtctcttaaactatgcagttgtagacaacttatatagttgcagtagtttcagtcttttgctgctgcaaacatgaaatccaattatctattgaacctgttttgcgagtttgtgcgctatggcccgacaacgaattcgtattgatttgttctatgaagaggtagattagggatctcaatcattttgaatgtgttattttccattatttttgtctctgttgattctgtgttgctgcttgccatttctctattaagataaaagaggaaaaacatttatatcgatcaacaaagtctaaagcttgcagtagagtgggcttatttgaaatgattttgattatcaattttgtggcacctcataaaaggaactcaagtgacattcagagatgagagattgcctggatttctagcaagattcatgcaacgtcgggaggtgggaaaatatttttttgtcaacctaaaagtatgcttcttattaccaactaggactgcataccagttaggttcagactctgtaaacaaaggccaataccctatcagcacaactcacactgctccaggtatatgcacaatgttaccagtgaagtataatttcagacaggtatatgcacaacgtggcacctgatagttcaaagaccatcacggaaaaaatcagtgagtatgacgagaccctgtttttcttctacgaaacaataggttctgatgcatgtgtgatattgactatgctttagatattagttctttagttcaaagatcacacattcttttctgatagttttgacatttcatcgaagataacttttttactttgtttcagtcttgcgggaaatcagttcatttgcaattcatcaattatacatggttgttcggatctgatagcaatgattaatgataattgatttcccagatggcacatatctattctttagaaactggaagttaattgtacattaatggcagagacaatgtcagtacaggtccaaaggtccaagaacaccatgagttagctctaccaatttctttcagtgtcacatgtttcgcaatatttgttttgttgtttgtgtattggctaagttactacttaatacagatggtgctttcttttacttcagctggtaattatctaagcctatgtagtattaacaccttacacgttaaatatacatgatttgactttttattgtataccaagatctataatttgaattgggtcatgtgaagcattttgcatttcatgatctgcaaagtgcaacatacaattataattccaataatatattaggtcaagtaggttttagcattgtgtataaaggttgtttgaaaaatggagctttagtgatagtaaagagattaaaagatcttgatgttaccagtgaagtataatttcagacagaaattgagttgattggccttgtcgtgcacagggtgtttataaggattttgcatgacctctaaagaacggttgcttgtatatccatatatgccaaatggtagtgttgctgaccgcttgagatgtaactcaattgtctacaacattgtttgttagttaagtctataattggcattctgcacaagtttgcattccttgtcaatattttgtgatctacaaagtgcaacaaacaattttaattccaagaatatattaagtaaaggaggttttggcattgtgtataaaggttgtttgagaaatggcttgtgtttcatatccttgatattatgaatttacataatacaatctaatctgaaagatagttttttcaggctcaagcgatagcgtgcgtgcatgagacttagatggcggcttcggaggcggcaacgacaatgttaaaaatagtttttctcacaaaattaaaataactatcttgcttttcaggcattgccagaaatagctcaaaagattacacggttggagaatgagataccttgcttgattcttctggcgaggtgtggtaatcttaattattgtattcagtattgttcttatgtgaatttatcatcctcctccctaatattagacttgcacattttcttttacatactgatcttgctgaacatcacaaattggggcttgatatatctgaactggagaagaaaatcatttatgagatgatgagaccagagaggactttgttgtatttggttcctggaaggctggttagggtgagggatggttcaacagactggggatggggtgtggtgtggttgtaaatctatactactccttaacaagctaaggagggcgtccacaactccgtgcccccgcccccgtctctcgctcgcgacctcccgcacgacgcgccagggcaatctggactttgctacatactggtttttacatgcacaataaagctagctggtatcacatttactggtgatcctgctaagaataagaaagatctatttggtgctattgcaatggtattgagagttgtaggaggcaagaattcacaattatctttgcctacacgctattctctgaacacaatatttacgagcttgataggtctattttggaatacgaattatgagtttggtaggtaaataatttatacaatgattcttggacctttgaccctttctgcttcaaggattaatgtgtgactgtgtttagccttcaatccaagcgacatgccactaatctcaaaaatgcttctatgcaatatttacttgacaatttatatctctgctgttccttagagatattttcatgtaatatgttacaaggttgttcatgtgagatttttggtcataaattatattatatatgaagataatgggagtcagccctaaattcatattatctgcaatctgcagtttcttgaaaaaaatgtttgatctacatcagaattttcccaaaatatctaacagacttgttttcttcaggccaggaacccagggtctacacatcttataactgaaaaacacataagcagcaagaaggtgagcaaggcatctaagatccagtggcttgtgaacccttgacccttcagaggaagcatgctagaatcattgacaagaagattgccaagaagaagtctgaggctgtcgagtaccaaaagcttcttcctataggctgaaggaatagagatcaccacaatgagagcttggccaagagaagatccaagctttctacctctgccaaggcttcctctggcacctccgcttaagaatgtcttaagaatgttcagtgcttttgagatgttttcaagacctatcttgttacagcttaagtaccttatgctgctctagctgtgttgcaactgtccctatacttgacagatttgcattagatgcttaggctatagagggtaggatcctaattgtgaccatgtactaaattatatatctgttgctaagttacagtacagacaaaataaatttagcctggccaacttgtagaaaacgactaacttgtagaaaaacgtgttattgtaactaagaatatctaaattgctcctatgttactttctatattcat

SEQ ID NO: 80899 - DNA, 4241 bp, Zea Mays
atggggaaaaaagaggcagactcgagttgccgtcgtcttcgctggcccttgcctatcgtccgttcgcattcatctcattcaactggtaaaattaggagcactccctcacacgctacacagcgacctggccaacatgctagccggtggctcatcgtatctggcgactctgggccactggagcttctccaaccacagtctcaactctcaagaagctcccagccgccgctccctctcccccatcctcctaccacgacgatggatcctgctaccgtcgtcgtcatcgaggagtcataccggtcctactattgcatgcggaactccaagcagtgtacggaagacaacagggcgaaagctaaattgcagaaaagaaaaggaggacatttgactgttgaacgatggtcgaaggttccaatttcggtggcatgattggtggtcatgatgatgataggaatttactagacctctccggaatataaagtaatcagccatatagtatgtggtcctggagttcatagttttgctacttttctggcgtgacgatgtggcggaggcgatgacagggcctaaaacggattggtcgtcctgctctgtgtcggaagttatgtgaattttctgcctcctagcgctagacagatgaactccttgccattgctttctactgttgtttgtttattttaatgcagcaacagagcctatgaagaagccctattttctgctgctgtttgccaactccaagtagatcgcccactgaagaagctcaccctcctcgctatagaagaaccgtgaaattttgtttcgttgccatagtggaaattgcagctgcaatgcgtgagggatggttgtcgggtgtgttttcctgactatatatgccttgagatatttccctgaggaggcaatagatccagatgtgttattgtcacttgccttctcatttaagtcctgttatattctgtccaccaggtgattcatgcaagtgctcacctcccgaagatatgaagaaagtaagaaaacaaatcgtcgatcacatttacccgtggatattagaatgccaagagaaaggacatgccaaagtgccatcattgggaagcaaatggatgtttaggacggacactggggctttgaagtagttggtggctgcgactgcgaggccgagacgggttagattgagagaggtgggcagatggcgacactgtcgtcgtcgctttgctccagctttgcctccctgcggaccgcctccatcggccaccctcgcgtcatcatgtcatctacgcccaggaactcaagtgacattcagagatgagagattgcctggatttctagcaagattcatgcaacgtcgggaggtgggaaaatatttttttgtcaacctaaaagtatgcttcttattaccaactaggactgcataccagttaggttcagactctgtaaacaaaggccaataccctatcagcacaactcacactgctccaggtatatgcacaatgttaccagtgaagtataatttcagacaggtatatgcacaacgtggcacctgatagttcaaagaccatcacggaaaaaatcagtgagtatgacgagaccctgtttttcttctacgaaacaataggttctgatgcatgtgtgatattgactatgctttagatattagttctttagttcaaagatcacacattcttttctgatagttttgacatttcatcgaagataacttttttactttgtttcagtcttgcgggaaatcagttcatttgcaattcatcaattatacatggttgttcggatctgatagcaatgattaatgataattgatttcccagatggcacatatctattctttagaaactggaagttaattgtacattaatggcagagacaatgtcagtacaggtccaaaggtccaagaacaccatgagttagctctaccaatttctttcagtgtcacatgtttcgcaatatttgttttgttgtttgtgtattggctaagttactacttaatacagatggtgctttcttttacttcagctggtaattatctaagcctatgtagtattaacaccttacacgttaaatatacatgatttgactttttattgtataccaagatctataatttgaattgggtcatgtgaagcattttgcatttcatgatctgcaaagtgcaacatacaattataattccaataatatattaggtcaagtaggttttagcattgtgtataaaggttgtttgaaaaatggagctttagtgatagtaaagagattaaaagatcttgatgttaccagtgaagtataatttcagacagaaattgagttgattggccttgtcgtgcacagggtgtttataaggattttgcatgacctctaaagaacggttgcttgtatatccatatatgccaaatggtagtgttgctgaccgcttgagatgtaactcaattgtctacaacattgtttgttagttaagtctataattggcattctgcacaagtttgcattccttgtcaatattttgtgatctacaaagtgcaacaaacaattttaattccaagaatatattaagtaaaggaggttttggcattgtgtataaaggttgtttgagaaatggcttgtgtttcatatccttgatattatgaatttacataatacaatctaatctgaaagatagttttttcaggctcaagcgatagcgtgcgtgcatgagacttagatggcggcttcggaggcggcaacgacaatgttaaaaatagtttttctcacaaaattaaaataactatcttgcttttcaggcattgccagaaatagctcaaaagattacacggttggagaatgagataccttgcttgattcttctggcgagaaaatcatttatgagatgatgagaccagagaggactttgttgtatttggttcctggaaggctggttagggtgagggatggttcaacagactggggatggggtgtggtgtggttgtaaatctatactactccttaacaagctaaggagggcgtccacaactccgtgcccccgcccccgtctctcgctcgcgacctcccgcacgacgcgccagggcaatctggactttgctacatactggtttttacatgcacaataaagctagctggtatcacatttactggtgatcctgctaagaataagaaagatctatttggtgctattgcaatggtattgagagttgtaggaggcaagaattcacaattatctttgcctacacgctattctctgaacacaatatttacgagcttgataggtctattttggaatacgaattatgagtttggtaggtaaataatttatacaatgattcttggacctttgaccctttctgcttcaaggattaatgtgtgactgtgtttagccttcaatccaagcgacatgccactaatctcaaaaatgcttctatgcaatatttacttgacaatttatatctctgctgttccttagagatattttcatgtaatatgttacaaggttgttcatgtgagatttttggtcataaattatattatatatgaagataatgggagtcagccctaaattcatattatctgcaatctgcagtttcttgaaaaaaatgtttgatctacatcagaattttcccaaaatatctaacagacttgttttcttcaggccaggaacccagggtctacacatcttataactgaaaaacacataagcagcaagaaggtgagcaaggcatctaagatccagtggcttgtgaacccttgacccttcagaggaagcatgctagaatcattgacaagaagattgccaagaagaagtctgaggctgtcgagtaccaaaagcttcttcctataggctgaaggaatagagatcaccacaatgagagcttggccaagagaagatccaagctttctacctctgccaaggcttcctctggcacctccgcttaagaatgtcttaagaatgttcagtgcttttgagatgttttcaagacctatcttgttacagcttaagtaccttatgctgctctagctgtgttgcaactgtccctatacttgacagatttgcattagatgcttaggctatagagggtaggatcctaattgtgaccatgtactaaattatatatctgttgctaagttacagtacagacaaaataaatttagcctggccaacttgtagaaaacgactaacttgtagaaaaacgtgttattgtaactaagaatatctaaattgctcctatgttactttctatattcat

SEQ ID NO: 80900 - DNA, 2424 bp, Zea Mays
atggggaaaaaagaggcagactcgagttgccgtcgtcttcgctggcccttgcctatcgtccgttcgcattcatctcattcaactggtaaaattaggagcactccctcacacgctacacagcgacctggccaacatgctagccggtggctcatcgtatctggcgactctgggccactggagcttctccaaccacagtctcaactctcaagaagctcccagccgccgctccctctcccccatcctcctaccacgacgatggatcctgctaccgtcgtcgtcatcgaggagtcataccggtcctactattgcatgcgcaacagagcctatgaagaagccctattttctgctgctgtttgccaactccaagtagatcgcccactgaagaagctcaccctcctcgctatagaaggtgattcatgcaagtgctcacctcccgaagatatgaagaaagtaagaaaacaaatcgtcgatcacatttacccgtggatattagaatgccaagagaaaggacatgccaaagtgccatcattgggaagcaaatggatgtttaggactgcataccagttaggttcagactctgtaaacaaaggccaataccctatcagcacaactcacactgctccaggtatatgcacaatgttaccagtgaagtataatttcagacaggcattgccagaaatagctcaaaagattacacggttggagaatgagataccttgcttgattcttctggcgagaaaatcatttatgagatgatgagaccagagaggactttgttgtatttggttcctggaaggctggttagggtgagggatggttcaacagactggggatggggtgtggtgtggttgtaaatctatactactccttaacaagctaaggagggcgtccacaactccgtgcccccgcccccgtctctcgctcgcgacctcccgcacgacgcgccagggcaatctggactttgctacatactggtttttacatgcacaataaagctagctggtatcacatttactggtgatcctgctaagaataagaaagatctatttggtgctattgcaatggtattgagagttgtaggaggcaagaattcacaattatctttgcctacacgctattctctgaacacaatatttacgagcttgataggtctattttggaatacgaattatgagtttggtaggtaaataatttatacaatgattcttggacctttgaccctttctgcttcaaggattaatgtgtgactgtgtttagccttcaatccaagcgacatgccactaatctcaaaaatgcttctatgcaatatttacttgacaatttatatctctgctgttccttagagatattttcatgtaatatgttacaaggttgttcatgtgagatttttggtcataaattatattatatatgaagataatgggagtcagccctaaattcatattatctgcaatctgcagtttcttgaaaaaaatgtttgatctacatcagaattttcccaaaatatctaacagacttgttttcttcaggccaggaacccagggtctacacatcttataactgaaaaacacataagcagtatgcggttcacacttttttcttgtttgcattttataaaccattagacccttgtaacaaaaagcagattgtttagatgttatgctctcttatatggagattctcaagtatcttagaatcagttatgtgttggataaatgtcttggttatttactcttctattagtgctctaggcttgttctgtgttggataaatgtcttggttatttactcttctatcctcaagtatcttaggaataggattcatgacaatgagccattgatttctgaagttttccaagctaacctatttgctttgtaggcaagaaggtgagcaaggcatctaagatccagtggcttgtgaacccttgacccttcagaggaagcatgctagaatcattgacaagaagattgccaagaagaagtctgaggctgtcgagtaccaaaagcttcttcctataggctgaaggaatagagatcaccacaatgagagcttggccaagagaagatccaagctttctacctctgccaaggcttcctctggcacctccgcttaagaatgtcttaagaatgttcagtgcttttgagatgttttcaagacctatcttgttacagcttaagtaccttatgctgctctagctgtgttgcaactgtccctatacttgacagatttgcattagatgcttaggctatagagggtaggatcctaattgtgaccatgtactaaattatatatctgttgctaagttacagtacagacaaaataaatttagcctggccaacttgtagaaaacgactaacttgtagaaaaacgtgttattgtaactaagaatatctaaattgctcctatgttactttctatattcat

SEQ ID NO: 80901 - DNA, 3654 bp, Zea Mays
atggggaaaaaagaggcagactcgagttgccgtcgtcttcgctggcccttgcctatcgtccgttcgcattcatctcattcaactggtaaaattaggagcactccctcacacgctacacagcgacctggccaacatgctagccggtggctcatcgtatctggcgactctgggccactggagcttctccaaccacagtctcaactctcaagaagctcccagccgccgctccctctcccccatcctcctaccacgacgatggatcctgctaccgtcgtcgtcatcgaggagtcataccggtcctactattgcatgcgcaacagagcctatgaagaagccctattttctgctgctgtttgccaactccaagtagatcgcccactgaagaagctcaccctcctcgctatagaagaaccgtgaaattttgtttcgttgccatagtggaaattgcagctgcaatgcgtgagggatggttgtcgggtgtgttttcctgactatatatgccttgagatatttccctgaggaggcaatagatccagatgtgttattgtcacttgccttctcatttaagtcctgttatattctgtccaccaggtgattcatgcaagtgctcacctcccgaagatatgaagaaagtaagaaaacaaatcgtcgatcacatttacccgtggatattagaatgccaagagaaaggacatgccaaagtgccatcattgggaagcaaatggatgtttaggactgcataccagttaggttcagactctgtaaacaaaggccaataccctatcagcacaactcacactgctccaggtatatgcacaatgttaccagtgaagtataatttcagacaggtatatgcacaacgtggcacctgatagttcaaagaccatcacggaaaaaatcagtgagtatgacgagaccctgtttttcttctacgaaacaataggttctgatgcatgtgtgatattgactatgctttagatattagttctttagttcaaagatcacacattcttttctgatagttttgacatttcatcgaagataacttttttactttgtttcagtcttgcgggaaatcagttcatttgcaattcatcaattatacatggttgttcggatctgatagcaatgattaatgataattgatttcccagatggcacatatctattctttagaaactggaagttaattgtacattaatggcagagacaatgtcagtacaggtccaaaggtccaagaacaccatgagttagctctaccaatttctttcagtgtcacatgtttcgcaatatttgttttgttgtttgtgtattggctaagttactacttaatacagatggtgctttcttttacttcagctggtaattatctaagcctatgtagtattaacaccttacacgttaaatatacatgatttgactttttattgtataccaagatctataatttgaattgggtcatgtgaagcattttgcatttcatgatctgcaaagtgcaacatacaattataattccaataatatattaggtcaagtaggttttagcattgtgtataaaggttgtttgaaaaatggagctttagtgatagtaaagagattaaaagatcttgatgttaccagtgaagtataatttcagacagaaattgagttgattggccttgtcgtgcacagggtgtttataaggattttgcatgacctctaaagaacggttgcttgtatatccatatatgccaaatggtagtgttgctgaccgcttgagatgtaactcaattgtctacaacattgtttgttagttaagtctataattggcattctgcacaagtttgcattccttgtcaatattttgtgatctacaaagtgcaacaaacaattttaattccaagaatatattaagtaaaggaggttttggcattgtgtataaaggttgtttgagaaatggcttgtgtttcatatccttgatattatgaatttacataatacaatctaatctgaaagatagttttttcaggctcaagcgatagcgtgcgtgcatgagacttagatggcggcttcggaggcggcaacgacaatgttaaaaatagtttttctcacaaaattaaaataactatcttgcttttcaggcattgccagaaatagctcaaaagattacacggttggagaatgagataccttgcttgattcttctggcgagacttgcacattttcttttacatactgatcttgctgaacatcacaaattggggcttgatatatctgaactggagaagaaaatcatttatgagatgatgagaccagagaggactttgttgtatttggttcctggaaggctggttagggtgagggatggttcaacagactggggatggggtgtggtgtggttgtaaatctatactactccttaacaagctaaggagggcgtccacaactccgtgcccccgcccccgtctctcgctcgcgacctcccgcacgacgcgccagggcaatctggactttgctacatactggtttttacatgcacaataaagctagctggtatcacatttactggtgatcctgctaagaataagaaagatctatttggtgctattgcaatggtattgagagttgtaggaggcaagaattcacaattatctttgcctacacgctattctctgaacacaatatttacgagcttgataggtctattttggaatacgaattatgagtttggtaggtaaataatttatacaatgattcttggacctttgaccctttctgcttcaaggattaatgtgtgactgtgtttagccttcaatccaagcgacatgccactaatctcaaaaatgcttctatgcaatatttacttgacaatttatatctctgctgttccttagagatattttcatgtaatatgttacaaggttgttcatgtgagatttttggtcataaattatattatatatgaagataatgggagtcagccctaaattcatattatctgcaatctgcagtttcttgaaaaaaatgtttgatctacatcagaattttcccaaaatatctaacagacttgttttcttcaggccaggaacccagggtctacacatcttataactgaaaaacacataagcagcaagaaggtgagcaaggcatctaagatccagtggcttgtgaacccttgacccttcagaggaagcatgctagaatcattgacaagaagattgccaagaagaagtctgaggctgtcgagtaccaaaagcttcttcctataggctgaaggaatagagatcaccacaatgagagcttggccaagagaagatccaagctttctacctctgccaaggcttcctctggcacctccgcttaagaatgtcttaagaatgttcagtgcttttgagatgttttcaagacctatcttgttacagcttaagtaccttatgctgctctagctgtgttgcaactgtccctatacttgacagatttgcattagatgcttaggctatagagggtaggatcctaattgtgaccatgtactaaattatatatctgttgctaagttacagtacagacaaaataaatttagcctggccaacttgtagaaaacgactaacttgtagaaaaacgtgttattgtaactaagaatatctaaattgctcctatgttactttctatattcat

SEQ ID NO: 80902 - DNA, 2742 bp, Zea Mays
atggggaaaaaagaggcagactcgagttgccgtcgtcttcgctggcccttgcctatcgtccgttcgcattcatctcattcaactggtaaaattaggagcactccctcacacgctacacagcgacctggccaacatgctagccggtggctcatcgtatctggcgactctgggccactggagcttctccaaccacagtctcaactctcaagaagctcccagccgccgctccctctcccccatcctcctaccacgacgatggatcctgctaccgtcgtcgtcatcgaggagtcataccggtcctactattgcatgcgcggtgtaaggaactccaagcagtgtacggaagacaacagggcgaaagctaaattgcagaaaagaaaaggaggacatttgactgttgaacgatggtcgaaggttccaatttcggtggcatgattggtggtcatgatgatgataggaatttactagacctctccggaatataaagtaatcagccatatagtatgtggtcctggagttcatagttttgctacttttctggcgtgacgatgtggcggaggcgatgacagggcctaaaacggattggtcgtcctgctctgtgtcggaagttatgtgaattttctgcctcctagcgctagacagatgaactccttgccattgctttctactgttgtttgtttattttaatgcagcaacagagcctatgaagaagccctattttctgctgctgtttgccaactccaagtagatcgcccactgaagaagctcaccctcctcgctatagaagaaccgtgaaattttgtttcgttgccatagtggaaattgcagctgcaatgcgtgagggatggttgtcgggtgtgttttcctgactatatatgccttgagatatttccctgaggaggcaatagatccagatgtgttattgtcacttgccttctcatttaagtcctgttatattctgtccaccaggtgattcatgcaagtgctcacctcccgaagatatgaagaaagtaagaaaacaaatcgtcgatcacatttacccgtggatattagaatgccaagagaaaggacatgccaaagtgccatcattgggaagcaaatggatgtttaggacggacactggggctttgaagtagttggtggctgcgactgcgaggccgagacgggttagattgagagaggtgggcagatggcgacactgtcgtcgtcgctttgctccagctttgcctccctgcggaccgcctccatcggccaccctcgcgtcatcatgtcatctacgcccaggcattgccagaaatagctcaaaagattacacggttggagaatgagataccttgcttgattcttctggcgagaaaatcatttatgagatgatgagaccagagaggactttgttgtatttggttcctggaaggctggttagggtgagggatggttcaacagactggggatggggtgtggtgtggttgtaaatctatactactccttaacaagctaaggagggcgtccacaactccgtgcccccgcccccgtctctcgctcgcgacctcccgcacgacgcgccagggcaatctggactttgctacatactggtttttacatgcacaataaagctagctggtatcacatttactggtgatcctgctaagaataagaaagatctatttggtgctattgcaatggtattgagagttgtaggaggcaagaattcacaattatctttgcctacacgctattctctgaacacaatatttacgagcttgataggtctattttggaatacgaattatgagtttggtaggtaaataatttatacaatgattcttggacctttgaccctttctgcttcaaggattaatgtgtgactgtgtttagccttcaatccaagcgacatgccactaatctcaaaaatgcttctatgcaatatttacttgacaatttatatctctgctgttccttagagatattttcatgtaatatgttacaaggttgttcatgtgagatttttggtcataaattatattatatatgaagataatgggagtcagccctaaattcatattatctgcaatctgcagtttcttgaaaaaaatgtttgatctacatcagaattttcccaaaatatctaacagacttgttttcttcaggccaggaacccagggtctacacatcttataactgaaaaacacataagcagcaagaaggtgagcaaggcatctaagatccagtggcttgtgaacccttgacccttcagaggaagcatgctagaatcattgacaagaagattgccaagaagaagtctgaggctgtcgagtaccaaaagcttcttcctataggctgaaggaatagagatcaccacaatgagagcttggccaagagaagatccaagctttctacctctgccaaggcttcctctggcacctccgcttaagaatgtcttaagaatgttcagtgcttttgagatgttttcaagacctatcttgttacagcttaagtaccttatgctgctctagctgtgttgcaactgtccctatacttgacagatttgcattagatgcttaggctatagagggtaggatcctaattgtgaccatgtactaaattatatatctgttgctaagttacagtacagacaaaataaatttagcctggccaacttgtagaaaacgactaacttgtagaaaaacgtgttattgtaactaagaatatctaaattgctcctatgttactttctatattcat

SEQ ID NO: 80903 - DNA, 3037 bp, Zea Mays
atggggaaaaaagaggcagactcgagttgccgtcgtcttcgctggcccttgcctatcgtccgttcgcattcatctcattcaactggtaaaattaggagcactccctcacacgctacacagcgacctggccaacatgctagccggtggctcatcgtatctggcgactctgggccactggagcttctccaaccacagtctcaactctcaagaagctcccagccgccgctccctctcccccatcctcctaccacgacgatggatcctgctaccgtcgtcgtcatcgaggagtcataccggtcctactattgcatgcgcggtgtaaggaactccaagcagtgtacggaagacaacagggcgaaagctaaattgcagaaaagaaaaggaggacatttgactgttgaacgatggtcgaaggttccaatttcggtggcatgattggtggtcatgatgatgataggaatttactagacctctccggaatataaagtaatcagccatatagtatgtggtcctggagttcatagttttgctacttttctggcgtgacgatgtggcggaggcgatgacagggcctaaaacggattggtcgtcctgctctgtgtcggaagttatgtgaattttctgcctcctagcgctagacagatgaactccttgccattgctttctactgttgtttgtttattttaatgcagcaacagagcctatgaagaagccctattttctgctgctgtttgccaactccaagtagatcgcccactgaagaagctcaccctcctcgctatagaagaaccgtgaaattttgtttcgttgccatagtggaaattgcagctgcaatgcgtgagggatggttgtcgggtgtgttttcctgactatatatgccttgagatatttccctgaggaggcaatagatccagatgtgttattgtcacttgccttctcatttaaggtgattcatgcaagtgctcacctcccgaagatatgaagaaagtaagaaaacaaatcgtcgatcacatttacccgtggatattagaatgccaagagaaaggacatgccaaagtgccatcattgggaagcaaatggatgtttaggactgcataccagttaggttcagactctgtaaacaaaggccaataccctatcagcacaactcacactgctccaggtatatgcacaatgttaccagtgaagtataatttcagacaggcattgccagaaatagctcaaaagattacacggttggagaatgagataccttgcttgattcttctggcgagacttgcacattttcttttacatactgatcttgctgaacatcacaaattggggcttgatatatctgaactggagaagaaaatcatttatgagatgatgagaccagagaggactttgttgtatttggttcctggaaggctggttagggtgagggatggttcaacagactggggatggggtgtggtgtggttgtaaatctatactactccttaacaagctaaggagggcgtccacaactccgtgcccccgcccccgtctctcgctcgcgacctcccgcacgacgcgccagggcaatctggactttgctacatactggtttttacatgcacaataaagctagctggtatcacatttactggtgatcctgctaagaataagaaagatctatttggtgctattgcaatggtattgagagttgtaggaggcaagaattcacaattatctttgcctacacgctattctctgaacacaatatttacgagcttgataggtctattttggaatacgaattatgagtttggtaggtaaataatttatacaatgattcttggacctttgaccctttctgcttcaaggattaatgtgtgactgtgtttagccttcaatccaagcgacatgccactaatctcaaaaatgcttctatgcaatatttacttgacaatttatatctctgctgttccttagagatattttcatgtaatatgttacaaggttgttcatgtgagatttttggtcataaattatattatatatgaagataatgggagtcagccctaaattcatattatctgcaatctgcagtttcttgaaaaaaatgtttgatctacatcagaattttcccaaaatatctaacagacttgttttcttcaggccaggaacccagggtctacacatcttataactgaaaaacacataagcagtatgcggttcacacttttttcttgtttgcattttataaaccattagacccttgtaacaaaaagcagattgtttagatgttatgctctcttatatggagattctcaagtatcttagaatcagttatgtgttggataaatgtcttggttatttactcttctattagtgctctaggcttgttctgtgttggataaatgtcttggttatttactcttctatcctcaagtatcttaggaataggattcatgacaatgagccattgatttctgaagttttccaagctaacctatttgctttgtaggcaagaaggtgagcaaggcatctaagatccagtggcttgtgaacccttgacccttcagaggaagcatgctagaatcattgacaagaagattgccaagaagaagtctgaggctgtcgagtaccaaaagcttcttcctataggctgaaggaatagagatcaccacaatgagagcttggccaagagaagatccaagctttctacctctgccaaggcttcctctggcacctccgcttaagaatgtcttaagaatgttcagtgcttttgagatgttttcaagacctatcttgttacagcttaagtaccttatgctgctctagctgtgttgcaactgtccctatacttgacagatttgcattagatgcttaggctatagagggtaggatcctaattgtgaccatgtactaaattatatatctgttgctaagttacagtacagacaaaataaatttagcctggccaacttgtagaaaacgactaacttgtagaaaaacgtgttattgtaactaagaatatctaaattgctcctatgttactttctatattcat

SEQ ID NO: 80904 - DNA, 3111 bp, Zea Mays
atggggaaaaaagaggcagactcgagttgccgtcgtcttcgctggcccttgcctatcgtccgttcgcattcatctcattcaactggtaaaattaggagcactccctcacacgctacacagcgacctggccaacatgctagccggtggctcatcgtatctggcgactctgggccactggagcttctccaaccacagtctcaactctcaagaagctcccagccgccgctccctctcccccatcctcctaccacgacgatggatcctgctaccgtcgtcgtcatcgaggagtcataccggtcctactattgcatgcgcaacagagcctatgaagaagccctattttctgctgctgtttgccaactccaagtagatcgcccactgaagaagctcaccctcctcgctatagaaggtgattcatgcaagtgctcacctcccgaagatatgaagaaagtaagaaaacaaatcgtcgatcacatttacccgtggatattagaatgccaagagaaaggacatgccaaagtgccatcattgggaagcaaatggatgtttaggacggacactggggctttgaagtagttggtggctgcgactgcgaggccgagacgggttagattgagagaggtgggcagatggcgacactgtcgtcgtcgctttgctccagctttgcctccctgcggaccgcctccatcggccaccctcgcgtcatcatgtcatctacgcccaggttagtttctccttccctgcttcctatttgcctgtgtctgagtagcgacgccctcgcgtgaggtacgaatgtagtagcaccgagcgggcgggtggccacctcttccattcagtcgcatactcgcatctcgctccttgtcagtcttagttcctagcgatctcttgtctcgttgccggcccccgacggctccgtgcggctgctgctgcgaattccattcttaaatttttgtccacctgatggcggcctccaagtggcccagtctcttaaactatgcagttgtagacaacttatatagttgcagtagtttcagtcttttgctgctgcaaacatgaaatccaattatctattgaacctgttttgcgagtttgtgcgctatggcccgacaacgaattcgtattgatttgttctatgaagaggtagattagggatctcaatcattttgaatgtgttattttccattatttttgtctctgttgattctgtgttgctgcttgccatttctctattaagataaaagaggaaaaacatttatatcgatcaacaaagtctaaagcttgcagtagagtgggcttatttgaaatgattttgattatcaattttgtggcacctcataaaaggaactcaagtgacattcagagatgagagattgcctggatttctagcaagattcatgcaacgtcgggaggtgggaaaatatttttttgtcaacctaaaagtatgcttcttattaccaactaggactgcataccagttaggttcagactctgtaaacaaaggccaataccctatcagcacaactcacactgctccaggtatatgcacaatgttaccagtgaagtataatttcagacaggcattgccagaaatagctcaaaagattacacggttggagaatgagataccttgcttgattcttctggcgagacttgcacattttcttttacatactgatcttgctgaacatcacaaattggggcttgatatatctgaactggagaagaaaatcatttatgagatgatgagaccagagaggactttgttgtatttggttcctggaaggctggttagggtgagggatggttcaacagactggggatggggtgtggtgtggttgtaaatctatactactccttaacaagctaaggagggcgtccacaactccgtgcccccgcccccgtctctcgctcgcgacctcccgcacgacgcgccagggcaatctggactttgctacatactggtttttacatgcacaataaagctagctggtatcacatttactggtgatcctgctaagaataagaaagatctatttggtgctattgcaatggtattgagagttgtaggaggcaagaattcacaattatctttgcctacacgctattctctgaacacaatatttacgagcttgataggtctattttggaatacgaattatgagtttggtaggtaaataatttatacaatgattcttggacctttgaccctttctgcttcaaggattaatgtgtgactgtgtttagccttcaatccaagcgacatgccactaatctcaaaaatgcttctatgcaatatttacttgacaatttatatctctgctgttccttagagatattttcatgtaatatgttacaaggttgttcatgtgagatttttggtcataaattatattatatatgaagataatgggagtcagccctaaattcatattatctgcaatctgcagtttcttgaaaaaaatgtttgatctacatcagaattttcccaaaatatctaacagacttgttttcttcaggccaggaacccagggtctacacatcttataactgaaaaacacataagcagcaagaaggtgagcaaggcatctaagatccagtggcttgtgaacccttgacccttcagaggaagcatgctagaatcattgacaagaagattgccaagaagaagtctgaggctgtcgagtaccaaaagcttcttcctataggctgaaggaatagagatcaccacaatgagagcttggccaagagaagatccaagctttctacctctgccaaggcttcctctggcacctccgcttaagaatgtcttaagaatgttcagtgcttttgagatgttttcaagacctatcttgttacagcttaagtaccttatgctgctctagctgtgttgcaactgtccctatacttgacagatttgcattagatgcttaggctatagagggtaggatcctaattgtgaccatgtactaaattatatatctgttgctaagttacagtacagacaaaataaatttagcctggccaacttgtagaaaacgactaacttgtagaaaaacgtgttattgtaactaagaatatctaaattgctcctatgttactttctatattcat

SEQ ID NO: 80905 - DNA, 2691 bp, Zea Mays
atggggaaaaaagaggcagactcgagttgccgtcgtcttcgctggcccttgcctatcgtccgttcgcattcatctcattcaactggtaaaattaggagcactccctcacacgctacacagcgacctggccaacatgctagccggtggctcatcgtatctggcgactctgggccactggagcttctccaaccacagtctcaactctcaagaagctcccagccgccgctccctctcccccatcctcctaccacgacgatggatcctgctaccgtcgtcgtcatcgaggagtcataccggtcctactattgcatgcgcaacagagcctatgaagaagccctattttctgctgctgtttgccaactccaagtagatcgcccactgaagaagctcaccctcctcgctatagaagaaccgtgaaattttgtttcgttgccatagtggaaattgcagctgcaatgcgtgagggatggttgtcgggtgtgttttcctgactatatatgccttgagatatttccctgaggaggcaatagatccagatgtgttattgtcacttgccttctcatttaagtcctgttatattctgtccaccaggtgattcatgcaagtgctcacctcccgaagatatgaagaaagtaagaaaacaaatcgtcgatcacatttacccgtggatattagaatgccaagagaaaggacatgccaaagtgccatcattgggaagcaaatggatgtttaggacggacactggggctttgaagtagttggtggctgcgactgcgaggccgagacgggttagattgagagaggtgggcagatggcgacactgtcgtcgtcgctttgctccagctttgcctccctgcggaccgcctccatcggccaccctcgcgtcatcatgtcatctacgcccaggttagtttctccttccctgcttcctatttgcctgtgtctgagtagcgacgccctcgcgtgaggtacgaatgtagtagcaccgagcgggcgggtggccacctcttccattcagtcgcatactcgcatctcgctccttgtcagtcttagttcctagcgatctcttgtctcgttgccggcccccgacggctccgtgcggctgctgctgcgaattccattcttaaatttttgtccacctgatggcggcctccaagtggcccagtctcttaaactatgcagttgtagacaacttatatagttgcagtagtttcagtcttttgctgctgcaaacatgaaatccaattatctattgaacctgttttgcgagtttgtgcgctatggcccgacaacgaattcgtattgatttgttctatgaagaggtagattagggatctcaatcattttgaatgtgttattttccattatttttgtctctgttgattctgtgttgctgcttgccatttctctattaagataaaagaggaaaaacatttatatcgatcaacaaagtctaaagcttgcagtagagtgggcttatttgaaatgattttgattatcaattttgtggcacctcataaaaggaactcaagtgacattcagagatgagagattgcctggatttctagcaagattcatgcaacgtcgggaggtgggaaaatatttttttgtcaacctaaaagtatgcttcttattaccaactaggactgcataccagttaggttcagactctgtaaacaaaggccaataccctatcagcacaactcacactgctccaggtatatgcacaatgttaccagtgaagtataatttcagacaggcattgccagaaatagctcaaaagattacacggttggagaatgagataccttgcttgattcttctggcgagacttgcacattttcttttacatactgatcttgctgaacatcacaaattggggcttgatatatctgaactggagaagaaaatcatttatgagatgatgagaccagagaggactttgttgtatttggttcctggaaggctggttagggtgagggatggttcaacagactggggatggggtgtgctagctggtatcacatttactggtgatcctgctaagaataagaaagatctatttggtgctattgcaatggtattgagagttgtaggaggcaagaattcacaattatctttgcctacacgctattctctgaacacaatatttacgagcttgataggtctattttggaatacgaattatgagtttggcaagaagaggaagcatgctagaatcattgacaagaagattgccaagaagaagtctgaggctgtcgagtaccaaaagcttcttcctataggctgaaggaatagagatcaccacaatgagagcttggccaagagaagatccaagctttctacctctgccaaggcttcctctggcacctccgcttaagaatgtcttaagaatgttcagtgcttttgagatgttttcaagacctatcttgttacagcttaagtaccttatgctgctctagctgtgttgcaactgtccctatacttgacagatttgcattagatgcttaggctatagagggtaggatcctaattgtgaccatgtactaaattatatatctgttgctaagttacagtacagacaaaataaatttagcctggccaacttgtagaaaacgactaacttgtagaaaaacgtgttattgtaactaagaatatctaaattgctcctatgttactttctatattcat

SEQ ID NO: 80906 - DNA, 4383 bp, Zea Mays
atggggaaaaaagaggcagactcgagttgccgtcgtcttcgctggcccttgcctatcgtccgttcgcattcatctcattcaactggtaaaattaggagcactccctcacacgctacacagcgacctggccaacatgctagccggtggctcatcgtatctggcgactctgggccactggagcttctccaaccacagtctcaactctcaagaagctcccagccgccgctccctctcccccatcctcctaccacgacgatggatcctgctaccgtcgtcgtcatcgaggagtcataccggtcctactattgcatgcggaactccaagcagtgtacggaagacaacagggcgaaagctaaattgcagaaaagaaaaggaggacatttgactgttgaacgatggtcgaaggttccaatttcggtggcatgattggtggtcatgatgatgataggaatttactagacctctccggaatataaagtaatcagccatatagtatgtggtcctggagttcatagttttgctacttttctggcgtgacgatgtggcggaggcgatgacagggcctaaaacggattggtcgtcctgctctgtgtcggaagttatgtgaattttctgcctcctagcgctagacagatgaactccttgccattgctttctactgttgtttgtttattttaatgcagcaacagagcctatgaagaagccctattttctgctgctgtttgccaactccaagtagatcgcccactgaagaagctcaccctcctcgctatagaagaaccgtgaaattttgtttcgttgccatagtggaaattgcagctgcaatgcgtgagggatggttgtcgggtgtgttttcctgactatatatgccttgagatatttccctgaggaggcaatagatccagatgtgttattgtcacttgccttctcatttaaggtgattcatgcaagtgctcacctcccgaagatatgaagaaagtaagaaaacaaatcgtcgatcacatttacccgtggatattagaatgccaagagaaaggacatgccaaagtgccatcattgggaagcaaatggatgtttagcaggacggacactggggctttgaagtagttggtggctgcgactgcgaggccgagacgggttagattgagagaggtgggcagatggcgacactgtcgtcgtcgctttgctccagctttgcctccctgcggaccgcctccatcggccaccctcgcgtcatcatgtcatctacgcccaggttagtttctccttccctgcttcctatttgcctgtgtctgagtagcgacgccctcgcgtgaggtacgaatgtagtagcaccgagcgggcgggtggccacctcttccattcagtcgcatactcgcatctcgctccttgtcagtcttagttcctagcgatctcttgtctcgttgccggcccccgacggctccgtgcggctgctgctgcgaattccattcttaaatttttgtccacctgatggcggcctccaagtggcccagtctcttaaactatgcagttgtagacaacttatatagttgcagtagtttcagtcttttgctgctgcaaacatgaaatccaattatctattgaacctgttttgcgagtttgtgcgctatggcccgacaacgaattcgtattgatttgttctatgaagaggtagattagggatctcaatcattttgaatgtgttattttccattatttttgtctctgttgattctgtgttgctgcttgccatttctctattaagataaaagaggaaaaacatttatatcgatcaacaaagtctaaagcttgcagtagagtgggcttatttgaaatgattttgattatcaattttgtggcacctcataaaaggaactcaagtgacattcagagatgagagattgcctggatttctagcaagattcatgcaacgtcgggaggtgggaaaatatttttttgtcaacctaaaagtatgcttcttattaccaactaggactgcataccagttaggttcagactctgtaaacaaaggccaataccctatcagcacaactcacactgctccaggtatatgcacaatgttaccagtgaagtataatttcagacaggtatatgcacaacgtggcacctgatagttcaaagaccatcacggaaaaaatcagtgagtatgacgagaccctgtttttcttctacgaaacaataggttctgatgcatgtgtgatattgactatgctttagatattagttctttagttcaaagatcacacattcttttctgatagttttgacatttcatcgaagataacttttttactttgtttcagtcttgcgggaaatcagttcatttgcaattcatcaattatacatggttgttcggatctgatagcaatgattaatgataattgatttcccagatggcacatatctattctttagaaactggaagttaattgtacattaatggcagagacaatgtcagtacaggtccaaaggtccaagaacaccatgagttagctctaccaatttctttcagtgtcacatgtttcgcaatatttgttttgttgtttgtgtattggctaagttactacttaatacagatggtgctttcttttacttcagctggtaattatctaagcctatgtagtattaacaccttacacgttaaatatacatgatttgactttttattgtataccaagatctataatttgaattgggtcatgtgaagcattttgcatttcatgatctgcaaagtgcaacatacaattataattccaataatatattaggtcaagtaggttttagcattgtgtataaaggttgtttgaaaaatggagctttagtgatagtaaagagattaaaagatcttgatgttaccagtgaagtataatttcagacagaaattgagttgattggccttgtcgtgcacagggtgtttataaggattttgcatgacctctaaagaacggttgcttgtatatccatatatgccaaatggtagtgttgctgaccgcttgagatgtaactcaattgtctacaacattgtttgttagttaagtctataattggcattctgcacaagtttgcattccttgtcaatattttgtgatctacaaagtgcaacaaacaattttaattccaagaatatattaagtaaaggaggttttggcattgtgtataaaggttgtttgagaaatggcttgtgtttcatatccttgatattatgaatttacataatacaatctaatctgaaagatagttttttcaggctcaagcgatagcgtgcgtgcatgagacttagatggcggcttcggaggcggcaacgacaatgttaaaaatagtttttctcacaaaattaaaataactatcttgcttttcaggcattgccagaaatagctcaaaagattacacggttggagaatgagataccttgcttgattcttctggcgaggtgtggtaatcttaattattgtattcagtattgttcttatgtgaatttatcatcctcctccctaatattagacttgcacattttcttttacatactgatcttgctgaacatcacaaattggggcttgatatatctgaactggagaagaaaatcatttatgagatgatgagaccagagaggactttgttgtatttggttcctggaaggctggttagggtgagggatggttcaacagactggggatggggtgtgctagctggtatcacatttactggtgatcctgctaagaataagaaagatctatttggtgctattgcaatggtattgagagttgtaggaggcaagaattcacaattatctttgcctacacgctattctctgaacacaatatttacgagcttgataggtctattttggaatacgaattatgagtttggcaagaagaggaagcatgctagaatcattgacaagaagattgccaagaagaagtctgaggctgtcgagtaccaaaagcttcttcctataggctgaaggaatagagatcaccacaatgagagcttggccaagagaagatccaagctttctacctctgccaaggcttcctctggcacctccgcttaagaatgtcttaagaatgttcagtgcttttgagatgttttcaagacctatcttgttacagcttaagtaccttatgctgctctagctgtgttgcaactgtccctatacttgacagatttgcattagatgcttaggctatagagggtaggatcctaattgtgaccatgtactaaattatatatctgttgctaagttacagtacagacaaaataaatttagcctggccaacttgtagaaaacgactaacttgtagaaaaacgtgttattgtaactaagaatatctaaattgctcctatgttactttctatattcat

SEQ ID NO: 80907 - DNA, 4080 bp, Zea Mays
atggggaaaaaagaggcagactcgagttgccgtcgtcttcgctggcccttgcctatcgtccgttcgcattcatctcattcaactggtaaaattaggagcactccctcacacgctacacagcgacctggccaacatgctagccggtggctcatcgtatctggcgactctgggccactggagcttctccaaccacagtctcaactctcaagaagctcccagccgccgctccctctcccccatcctcctaccacgacgatggatcctgctaccgtcgtcgtcatcgaggagtcataccggtcctactattgcatgcgcggtgtaaggaactccaagcagtgtacggaagacaacagggcgaaagctaaattgcagaaaagaaaaggaggacatttgactgttgaacgatggtcgaaggttccaatttcggtggcatgattggtggtcatgatgatgataggaatttactagacctctccggaatataaagtaatcagccatatagtatgtggtcctggagttcatagttttgctacttttctggcgtgacgatgtggcggaggcgatgacagggcctaaaacggattggtcgtcctgctctgtgtcggaagttatgtgaattttctgcctcctagcgctagacagatgaactccttgccattgctttctactgttgtttgtttattttaatgcagcaacagagcctatgaagaagccctattttctgctgctgtttgccaactccaagtagatcgcccactgaagaagctcaccctcctcgctatagaagaaccgtgaaattttgtttcgttgccatagtggaaattgcagctgcaatgcgtgagggatggttgtcgggtgtgttttcctgactatatatgccttgagatatttccctgaggaggcaatagatccagatgtgttattgtcacttgccttctcatttaaggtgattcatgcaagtgctcacctcccgaagatatgaagaaagtaagaaaacaaatcgtcgatcacatttacccgtggatattagaatgccaagagaaaggacatgccaaagtgccatcattgggaagcaaatggatgtttaggactgcataccagttaggttcagactctgtaaacaaaggccaataccctatcagcacaactcacactgctccaggtatatgcacaatgttaccagtgaagtataatttcagacaggtatatgcacaacgtggcacctgatagttcaaagaccatcacggaaaaaatcagtgagtatgacgagaccctgtttttcttctacgaaacaataggttctgatgcatgtgtgatattgactatgctttagatattagttctttagttcaaagatcacacattcttttctgatagttttgacatttcatcgaagataacttttttactttgtttcagtcttgcgggaaatcagttcatttgcaattcatcaattatacatggttgttcggatctgatagcaatgattaatgataattgatttcccagatggcacatatctattctttagaaactggaagttaattgtacattaatggcagagacaatgtcagtacaggtccaaaggtccaagaacaccatgagttagctctaccaatttctttcagtgtcacatgtttcgcaatatttgttttgttgtttgtgtattggctaagttactacttaatacagatggtgctttcttttacttcagctggtaattatctaagcctatgtagtattaacaccttacacgttaaatatacatgatttgactttttattgtataccaagatctataatttgaattgggtcatgtgaagcattttgcatttcatgatctgcaaagtgcaacatacaattataattccaataatatattaggtcaagtaggttttagcattgtgtataaaggttgtttgaaaaatggagctttagtgatagtaaagagattaaaagatcttgatgttaccagtgaagtataatttcagacagaaattgagttgattggccttgtcgtgcacagggtgtttataaggattttgcatgacctctaaagaacggttgcttgtatatccatatatgccaaatggtagtgttgctgaccgcttgagatgtaactcaattgtctacaacattgtttgttagttaagtctataattggcattctgcacaagtttgcattccttgtcaatattttgtgatctacaaagtgcaacaaacaattttaattccaagaatatattaagtaaaggaggttttggcattgtgtataaaggttgtttgagaaatggcttgtgtttcatatccttgatattatgaatttacataatacaatctaatctgaaagatagttttttcaggctcaagcgatagcgtgcgtgcatgagacttagatggcggcttcggaggcggcaacgacaatgttaaaaatagtttttctcacaaaattaaaataactatcttgcttttcaggcattgccagaaatagctcaaaagattacacggttggagaatgagataccttgcttgattcttctggcgaggtgtggtaatcttaattattgtattcagtattgttcttatgtgaatttatcatcctcctccctaatattagacttgcacattttcttttacatactgatcttgctgaacatcacaaattggggcttgatatatctgaactggagaagaaaatcatttatgagatgatgagaccagagaggactttgttgtatttggttcctggaaggctggttagggtgagggatggttcaacagactggggatggggtgtggtgtggttgtaaatctatactactccttaacaagctaaggagggcgtccacaactccgtgcccccgcccccgtctctcgctcgcgacctcccgcacgacgcgccagggcaatctggactttgctacatactggtttttacatgcacaataaagctagctggtatcacatttactggtgatcctgctaagaataagaaagatctatttggtgctattgcaatggtattgagagttgtaggaggcaagaattcacaattatctttgcctacacgctattctctgaacacaatatttacgagcttgataggtctattttggaatacgaattatgagtttggtaggtaaataatttatacaatgattcttggacctttgaccctttctgcttcaaggattaatgtgtgactgtgtttagccttcaatccaagcgacatgccactaatctcaaaaatgcttctatgcaatatttacttgacaatttatatctctgctgttccttagagatattttcatgtaatatgttacaaggttgttcatgtgagatttttggtcataaattatattatatatgaagataatgggagtcagccctaaattcatattatctgcaatctgcagtttcttgaaaaaaatgtttgatctacatcagaattttcccaaaatatctaacagacttgttttcttcaggccaggaacccagggtctacacatcttataactgaaaaacacataagcagcaagaaggtgagcaaggcatctaagatccagtggcttgtgaacccttgacccttcagaggaagcatgctagaatcattgacaagaagattgccaagaagaagtctgaggctgtcgagtaccaaaagcttcttcctataggctgaaggaatagagatcaccacaatgagagcttggccaagagaagatccaagctttctacctctgccaaggcttcctctggcacctccgcttaagaatgtcttaagaatgttcagtgcttttgagatgttttcaagacctatcttgttacagcttaagtaccttatgctgctctagctgtgttgcaactgtccctatacttgacagatttgcattagatgcttaggctatagagggtaggatcctaattgtgaccatgtactaaattatatatctgttgctaagttacagtacagacaaaataaatttagcctggccaacttgtagaaaacgactaacttgtagaaaaacgtgttattgtaactaagaatatctaaattgctcctatgttactttctatattcat

SEQ ID NO: 80908 - DNA, 2613 bp, Zea Mays
atggggaaaaaagaggcagactcgagttgccgtcgtcttcgctggcccttgcctatcgtccgttcgcattcatctcattcaactggtaaaattaggagcactccctcacacgctacacagcgacctggccaacatgctagccggtggctcatcgtatctggcgactctgggccactggagcttctccaaccacagtctcaactctcaagaagctcccagccgccgctccctctcccccatcctcctaccacgacgatggatcctgctaccgtcgtcgtcatcgaggagtcataccggtcctactattgcatgcgcggtgtaaggaactccaagcagtgtacggaagacaacagggcgaaagctaaattgcagaaaagaaaaggaggacatttgactgttgaacgatggtcgaaggttccaatttcggtggcatgattggtggtcatgatgatgataggaatttactagacctctccggaatataaagtaatcagccatatagtatgtggtcctggagttcatagttttgctacttttctggcgtgacgatgtggcggaggcgatgacagggcctaaaacggattggtcgtcctgctctgtgtcggaagttatgtgaattttctgcctcctagcgctagacagatgaactccttgccattgctttctactgttgtttgtttattttaatgcagcaacagagcctatgaagaagccctattttctgctgctgtttgccaactccaagtagatcgcccactgaagaagctcaccctcctcgctatagaagaaccgtgaaattttgtttcgttgccatagtggaaattgcagctgcaatgcgtgagggatggttgtcgggtgtgttttcctgactatatatgccttgagatatttccctgaggaggcaatagatccagatgtgttattgtcacttgccttctcatttaaggtaattcacttcttaatgctcaaattttgtgtttacatgagtgcttttttggataaatgttctcctacatgtaacatattcatgtgtttattttgattttcccatcatagcataaactaaaagttgatatgtgttgttcgttgaaaccattcccatttgttgctttttgactttgggctataacgttctctcccttttatgaaaacgaagttgccattatctggtgtacctgatttaattctcattagtgtttggattttgaatagtcaattatggtgccagcagtcctgttatattctgtccaccaggtgattcatgcaagtgctcacctcccgaagatatgaagaaagtaagaaaacaaatcgtcgatcacatttacccgtggatattagaatgccaagagaaaggacatgccaaagtgccatcattgggaagcaaatggatgtttaggacggacactggggctttgaagtagttggtggctgcgactgcgaggccgagacgggttagattgagagaggtgggcagatggcgacactgtcgtcgtcgctttgctccagctttgcctccctgcggaccgcctccatcggccaccctcgcgtcatcatgtcatctacgcccaggctcaagcgatagcgtgcgtgcatgagacttagatggcggcttcggaggcggcaacgacaatgttaaaaatagtttttctcacaaaattaaaataactatcttgcttttcaggcattgccagaaatagctcaaaagattacacggttggagaatgagataccttgcttgattcttctggcgagacttgcacattttcttttacatactgatcttgctgaacatcacaaattggggcttgatatatctgaactggagaagaaaatcatttatgagatgatgagaccagagaggactttgttgtatttggttcctggaaggctggttagggtgagggatggttcaacagactggggatggggtgtgctagctggtatcacatttactggtgatcctgctaagaataagaaagatctatttggtgctattgcaatggtattgagagttgtaggaggcaagaattcacaattatctttgcctacacgctattctctgaacacaatatttacgagcttgataggtctattttggaatacgaattatgagtttggcaagaagaggaagcatgctagaatcattgacaagaagattgccaagaagaagtctgaggctgtcgagtaccaaaagcttcttcctataggctgaaggaatagagatcaccacaatgagagcttggccaagagaagatccaagctttctacctctgccaaggcttcctctggcacctccgcttaagaatgtcttaagaatgttcagtgcttttgagatgttttcaagacctatcttgttacagcttaagtaccttatgctgctctagctgtgttgcaactgtccctatacttgacagatttgcattagatgcttaggctatagagggtaggatcctaattgtgaccatgtactaaattatatatctgttgctaagttacagtacagacaaaataaatttagcctggccaacttgtagaaaacgactaacttgtagaaaaacgtgttattgtaactaagaatatctaaattgctcctatgttactttctatattcat

SEQ ID NO: 80909 - DNA, 3622 bp, Zea Mays
atggggaaaaaagaggcagactcgagttgccgtcgtcttcgctggcccttgcctatcgtccgttcgcattcatctcattcaactggtaaaattaggagcactccctcacacgctacacagcgacctggccaacatgctagccggtggctcatcgtatctggcgactctgggccactggagcttctccaaccacagtctcaactctcaagaagctcccagccgccgctccctctcccccatcctcctaccacgacgatggatcctgctaccgtcgtcgtcatcgaggagtcataccggtcctactattgcatgcggaactccaagcagtgtacggaagacaacagggcgaaagctaaattgcagaaaagaaaaggaggacatttgactgttgaacgatggtcgaaggttccaatttcggtggcatgattggtggtcatgatgatgataggaatttactagacctctccggaatataaagtaatcagccatatagtatgtggtcctggagttcatagttttgctacttttctggcgtgacgatgtggcggaggcgatgacagggcctaaaacggattggtcgtcctgctctgtgtcggaagttatgtgaattttctgcctcctagcgctagacagatgaactccttgccattgctttctactgttgtttgtttattttaatgcagcaacagagcctatgaagaagccctattttctgctgctgtttgccaactccaagtagatcgcccactgaagaagctcaccctcctcgctatagaagaaccgtgaaattttgtttcgttgccatagtggaaattgcagctgcaatgcgtgagggatggttgtcgggtgtgttttcctgactatatatgccttgagatatttccctgaggaggcaatagatccagatgtgttattgtcacttgccttctcatttaaggtgattcatgcaagtgctcacctcccgaagatatgaagaaagtaagaaaacaaatcgtcgatcacatttacccgtggatattagaatgccaagagaaaggacatgccaaagtgccatcattgggaagcaaatggatgtttaggactgcataccagttaggttcagactctgtaaacaaaggccaataccctatcagcacaactcacactgctccaggtatatgcacaatgttaccagtgaagtataatttcagacaggtatatgcacaacgtggcacctgatagttcaaagaccatcacggaaaaaatcagtgagtatgacgagaccctgtttttcttctacgaaacaataggttctgatgcatgtgtgatattgactatgctttagatattagttctttagttcaaagatcacacattcttttctgatagttttgacatttcatcgaagataacttttttactttgtttcagtcttgcgggaaatcagttcatttgcaattcatcaattatacatggttgttcggatctgatagcaatgattaatgataattgatttcccagatggcacatatctattctttagaaactggaagttaattgtacattaatggcagagacaatgtcagtacaggtccaaaggtccaagaacaccatgagttagctctaccaatttctttcagtgtcacatgtttcgcaatatttgttttgttgtttgtgtattggctaagttactacttaatacagatggtgctttcttttacttcagctggtaattatctaagcctatgtagtattaacaccttacacgttaaatatacatgatttgactttttattgtataccaagatctataatttgaattgggtcatgtgaagcattttgcatttcatgatctgcaaagtgcaacatacaattataattccaataatatattaggtcaagtaggttttagcattgtgtataaaggttgtttgaaaaatggagctttagtgatagtaaagagattaaaagatcttgatgttaccagtgaagtataatttcagacagaaattgagttgattggccttgtcgtgcacagggtgtttataaggattttgcatgacctctaaagaacggttgcttgtatatccatatatgccaaatggtagtgttgctgaccgcttgagatgtaactcaattgtctacaacattgtttgttagttaagtctataattggcattctgcacaagtttgcattccttgtcaatattttgtgatctacaaagtgcaacaaacaattttaattccaagaatatattaagtaaaggaggttttggcattgtgtataaaggttgtttgagaaatggcttgtgtttcatatccttgatattatgaatttacataatacaatctaatctgaaagatagttttttcaggctcaagcgatagcgtgcgtgcatgagacttagatggcggcttcggaggcggcaacgacaatgttaaaaatagtttttctcacaaaattaaaataactatcttgcttttcaggcattgccagaaatagctcaaaagattacacggttggagaatgagataccttgcttgattcttctggcgaggtgtggtaatcttaattattgtattcagtattgttcttatgtgaatttatcatcctcctccctaatattagacttgcacattttcttttacatactgatcttgctgaacatcacaaattggggcttgatatatctgaactggagaagaaaatcatttatgagatgatgagaccagagaggactttgttgtatttggttcctggaaggctggttagggtgagggatggttcaacagactggggatggggtgtggtgtggttgtaaatctatactactccttaacaagctaaggagggcgtccacaactccgtgcccccgcccccgtctctcgctcgcgacctcccgcacgacgcgccagggcaatctggactttgctacatactggtttttacatgcacaataaagctagctggtatcacatttactggtgatcctgctaagaataagaaagatctatttggtgctattgcaatggtattgagagttgtaggaggcaagaattcacaattatctttgcctacacgctattctctgaacacaatatttacgagcttgataggtctattttggaatacgaattatgagtttggcaagaagaggaagcatgctagaatcattgacaagaagattgccaagaagaagtctgaggctgtcgagtaccaaaagcttcttcctataggctgaaggaatagagatcaccacaatgagagcttggccaagagaagatccaagctttctacctctgccaaggcttcctctggcacctccgcttaagaatgtcttaagaatgttcagtgcttttgagatgttttcaagacctatcttgttacagcttaagtaccttatgctgctctagctgtgttgcaactgtccctatacttgacagatttgcattagatgcttaggctatagagggtaggatcctaattgtgaccatgtactaaattatatatctgttgctaagttacagtacagacaaaataaatttagcctggccaacttgtagaaaacgactaacttgtagaaaaacgtgttattgtaactaagaatatctaaattgctcctatgttactttctatattcat

SEQ ID NO: 80910 - DNA, 3954 bp, Zea Mays
aatcggatggtataccctgtctgcccacaaacccgcaaaccccccaaatcctccatcgagtccgcttgagtctcgacctatcacaacaagcgattccccccaagtcgaagcagcagaaccaacagcgagccgccggccgccaatggcgttctcatcgccggcttccgcgcgtccgcagcgctcgcctgacgaggtggaggacatcatcctccgcaagatccttctcgtctccctcacgccgctggccaaccccgggcccgccgtcgcctacctcgagctcaccgccgccgagctcctctccgagtcgcgccctctcctagctctgcgcgacgccgccgagcgcctccttatagaccgcctctcgctcccggacccgcccgccgggtctccgacccctttcgccttcctcgtctccgctttccgccgcgccgccgacgaggcgcgtaagatctccaccatccgcgacgctgctctccgggcgcgcctcgcggcctccatcgcgcacctccgggccctcattctctcctacgcccgtatcgtcgccgggaaccccgacaccttcccctcccaacccggcgcgcaacaccccgccgccgaactcctcgtattcctcctcgctgaggcagccgacccgctagaccccaccccaggccccggggcgccgccgccgcctggcttcattgatgagttcttcagcggcgctgactatgactccatcgagacggccatgggggagctgtacgagcttcttaggcagagcgtcgataaagtttcggccctcggtgacttccagcgcccactgcgggtgctcaggcggcttgtggggatccccaattgtgccaaggccctggtgaaccatcccaagtggataccaaagaatcagatcatgttcattggggaagggagagtcatggagctctacagtgtccttggagccttcttccatgttagtgctatccgagaccgtgagtttgccagcaagcctgatgtcgggcaacaatgtttctcagaagcatcttcacgtcggccagccgacttgttgtcatcatttacaacaatcaagagtgttatgaatggcttgtatgatggccttaaggatatccttctaaccctcctaaaaaatttggatactcgagaaaaggttcttgagtatatagcagaagtgataaataaaaacgcatccagatctggcatgcaggatccaagaatctgaggttagagaggcattgaaaaggatagaaggggtaaggcgatgggctttgatggtatcccaattgatgcatggagatgtctcggggacatagctatagagatgtctcgaggacatagctatagtatgtctaaccaaattcaaccatatattctggttgaacaagatgcctaacgaatggagaagtatattggtagacccattaaaatgtgcaagttcaggtatgtttgtgaatcttagtgctgtgatgctccgtctatgcgagccttttttggataacatggaatcaaagaaggataagattgatgtcaaatacctcttttgcaacaatagaattgatttcaaggatttgacagctataaatgcgtcttcagaagaagtctcatcttggatagagagcataaataacgagcatgctcaaaataatgccagtggagaggctcgttttgtggaatcacaggaagccacaagctctggcaaaaatagtgcatcttcacaacttcggtgctcaaagaagaacttctcatttgtttgcgaatgtttcttcatgacctcaagggtacttaatctcggtttgatgaaagctatatcagacttcaaacatatttctcagcaacttgcaaggtttgaagatgatttggagtcaaacagagcagtcagagatcagggagggggttcaccacagcttgaacaagatataactcgtttggagaagattgtcgagattttatcacaggacaaattatgttatgaagctcagatactacgagatggtgcattccttcaacgagcattatctttctacagattaatgattctgtggtcagttaatctagttggcggttttaagatgcctttgccatcacaatgctccaaggagtttgcttgcattccagaacattttcttgacgatgcaatggatttacttgttctaacctctagaattccaaaggctttggaaagctttgtattggatgacttcctcagcttcataattatgttcatgggaagcacatcttacattaagaatccttacctaagagcaaagatggttgaagttttgaattgctggatgccgcaaagaagtggcttgagttctacagcctcgttgtttgaggggcaccaactgtgtcttgactatcttgttagaaatcttctaaagctttatgtggatattgaattcactggttcccatacacaattttttgacaagtttaacattcgacataatattgctgagcttctggagtatttatgggatgtccccagtcaccgaaacgcatggagacaaatagctaaagaggaggaaaagggtgtatacttaaattttcttaactttctcatcaatgatagcatctatcttcttgatgagagcttgaacaaaattttggaactgaaagaaatagaggctgaaatgactaacactgttgagtgggagcgcagacctgctcaagaaagagaggagcggctccgtgtatttcatcaatgggaaaatattgttcgatttgacatgaggctagccaatgaggatgttgggatgcttgcattcacctcggaacaaattccagcacctttccttctccctgaaatggtggaaagggtcgcgagcatgcttaattacttcctcttgcaacttgctggtccccagaggaaatctttgactgtaaaggatccagagaagtacgagttcaagccgaagcagctgttgaaacagattgccaccatctatgtccatatctcaaggggcgacaaggaatctgtcttcccagctgcaatctcgaaagatggcagagcatacaacgatcagttgtttgctagtgcagctaatattctgtggaagattgggggtgatcccaaaatcatacaggagtttatgcagcttgctggtagggcaaaagctgctgcttctgaagctatggatgctgaggcaatccttggggacattccagacgaattcctggatccaattcagtacactctgatgaaagatcctgtgacactgccatcatcgaaggtcacagtggatcggcccgtaattatcaggcatctgctgagtgattctacggatccatttaaccgctcccacctcactcaagacatgctgataccaaacacggagctcaagttgcagatcgaggaatttgtccagtcccagcagttgagaaagcgaactgctgcggtgtcagagattggccaagcggatggtgctgatgatatggccgaatgaattgtgcgagcagcagggatggacattttcttttgtggtggggaaagacggatgctaatttacgcgaaatttaccagttcatcggtccgtataaaatcggtttgccagcttgtgtcaccatttgtctccattctttgtaaatgttgtaagtgcacggttgtaattttaagtccctgtttgtttacctttgagattatggccctgtttgtccttctaggattatatagtccagcttattataagcatctattgacctgcttatgaattatcataatttaggtgtttagattacataatttatataataatttgtgttgtttgtttaccctttaacttatttagctgaattatataatttagagggaaaacaaacatgtcctatataatctagcttaataagttaagaggtaaacaaaaaacatagattattagctggattatataatctagatgtctagattatgataatccataagcagataattaggtgtctagactatgataatctataaacagg

SEQ ID NO: 80911 - DNA, 3545 bp, Zea Mays
aatcggatggtataccctgtctgcccacaaacccgcaaaccccccaaatcctccatcgagtccgcttgagtctcgacctatcacaacaagcgattccccccaagtcgaagcagcagaaccaacagcgagccgccggccgccaatggcgttctcatcgccggcttccgcgcgtccgcagcgctcgcctgacgaggtggaggacatcatcctccgcaagatccttctcgtctccctcacgccgctggccaaccccgggcccgccgtcgcctacctcgagctcaccgccgccgagctcctctccgagtcgcgccctctcctagctctgcgcgacgccgccgagcgcctccttatagaccgcctctcgctcccggacccgcccgccgggtctccgacccctttcgccttcctcgtctccgctttccgccgcgccgccgacgaggcgcgtaagatctccaccatccgcgacgctgctctccgggcgcgcctcgcggcctccatcgcgcacctccgggccctcattctctcctacgcccgtatcgtcgccgggaaccccgacaccttcccctcccaacccggcgcgcaacaccccgccgccgaactcctcgtattcctcctcgctgaggcagccgacccgctagaccccaccccaggccccggggcgccgccgccgcctggcttcattgatgagttcttcagcggcgctgactatgactccatcgagacggccatgggggagctgtacgagcttcttaggcagagcgtcgataaagtttcggccctcggtgacttccagcgcccactgcgggtgctcaggcggcttgtggggatccccaattgtgccaaggccctggtgaaccatcccaagtggataccaaagaatcagatcatgttcattggggaagggagagtcatggagctctacagtgtccttggagccttcttccatgttagtgctatccgagaccgtgagtttgccagcaagcctgatgtcgggcaacaatgtttctcagaagcatcttcacgtcggccagccgacttgttgtcatcatttacaacaatcaagagtgttatgaatggcttgtatgatggccttaaggatatccttctaaccctcctaaaaaatttggatactcgagaaaaggttcttgagtatatagcagaagtgataaataaaaacgcatccagatctggcatgcaggtagacccattaaaatgtgcaagttcaggtatgtttgtgaatcttagtgctgtgatgctccgtctatgcgagccttttttggataacatggaatcaaagaaggataagattgatgtcaaatacctcttttgcaacaatagaattgatttcaaggatttgacagctataaatgcgtcttcagaagaagtctcatcttggatagagagcataaataacgagcatgctcaaaataatgccagtggagaggctcgttttgtggaatcacaggaagccacaagctctggcaaaaatagtgcatcttcacaacttcggtgctcaaagaagaacttctcatttgtttgcgaatgtttcttcatgacctcaagggtacttaatctcggtttgatgaaagctatatcagacttcaaacatatttctcagcaacttgcaaggtttgaagatgatttggagtcaaacagagcagtcagagatcagggagggggttcaccacagcttgaacaagatataactcgtttggagaagattgtcgagattttatcacaggacaaattatgttatgaagctcagatactacgagatgacttcctcagcttcataattatgttcatgggaagcacatcttacattaagaatccttacctaagagcaaagatggttgaagttttgaattgctggatgccgcaaagaagtggcttgagttctacagcctcgttgtttgaggggcaccaactgtgtcttgactatcttgttagaaatcttctaaagctttatgtggatattgaattcactggttcccatacacaattttttgacaagtttaacattcgacataatattgctgagcttctggagtatttatgggatgtccccagtcaccgaaacgcatggagacaaatagctaaagaggaggaaaagggtgtatacttaaattttcttaactttctcatcaatgatagcatctatcttcttgatgagagcttgaacaaaattttggaactgaaagaaatagaggctgaaatgactaacactgttgagtgggagcgcagacctgctcaagaaagagaggagcggctccgtgtatttcatcaatgggaaaatattgttcgatttgacatgaggctagccaatgaggatgttgggatgcttgcattcacctcggaacaaattccagcacctttccttctccctgaaatggtggaaagggtcgcgagcatgcttaattacttcctcttgcaacttgctggtccccagaggaaatctttgactgtaaaggatccagagaagtacgagttcaagccgaagcagctgttgaaacagattgccaccatctatgtccatatctcaaggggcgacaaggaatctgtcttcccagctgcaatctcgaaagatggcagagcatacaacgatcagttgtttgctagtgcagctaatattctgtggaagattgggggtgatcccaaaatcatacaggagtttatgcagcttgctggtagggcaaaagctgctgcttctgaagctatggatgctgaggcaatccttggggacattccagacgaattcctggatccaattcagtacactctgatgaaagatcctgtgacactgccatcatcgaaggtcacagtggatcggcccgtaattatcaggcatctgctgagtgattctacggatccatttaaccgctcccacctcactcaagacatgctgataccaaacacggagctcaagttgcagatcgaggaatttgtccagtcccagcagttgagaaagcgaactgctgcggtgtcagagattggccaagcggatggtgctgatgatatggccgaatgaattgtgcgagcagcagggatggacattttcttttgtggtggggaaagacggatgctaatttacgcgaaatttaccagttcatcggtccgtataaaatcggtttgccagcttgtgtcaccatttgtctccattctttgtaaatgttgtaagtgcacggttgtaattttaagtccctgtttgtttacctttgagattatggccctgtttgtccttctaggattatatagtccagcttattataagcatctattgacctgcttatgaattatcataatttaggtgtttagattacataatttatataataatttgtgttgtttgtttaccctttaacttatttagctgaattatataatttagagggaaaacaaacatgtcctatataatctagcttaataagttaagaggtaaacaaaaaacatagattattagctggattatataatctagatgtctagattatgataatccataagcagataattaggtgtctagactatgataatctataaacagg

SEQ ID NO: 80912 - DNA, 2791 bp, Zea Mays
ggacaagaaggttgatctttcttcctgctacttaggcaacaatgtttctcagaagcatcttcacgtcggccagccgacttgttgtcatcatttacaacaatcaagagtgttatgaatggcttgtatgatggccttaaggatatccttctaaccctcctaaaaaatttggatactcgagaaaaggttcttgagtatatagcagaagtgataaataaaaacgcatccagatctggcatgcaggtagacccattaaaatgtgcaagttcaggtatgtttgtgaatcttagtgctgtgatgctccgtctatgcgagccttttttggataacatggaatcaaagaaggataagattgatgtcaaatacctcttttgcaacaatagaattgatttcaaggatttgacagctataaatgcgtcttcagaagaagtctcatcttggatagagagcataaataacgagcatgctcaaaataatgccagtggagaggctcgttttgtggaatcacaggaagccacaagctctggcaaaaatagtgcatcttcacaacttcggtgctcaaagaagaacttctcatttgtttgcgaatgtttcttcatgacctcaagggtacttaatctcggtttgatgaaagctatatcagacttcaaacatatttctcagcaacttgcaaggtttgaagatgatttggagtcaaacagagcagtcagagatcagggagggggttcaccacagcttgaacaagatataactcgtttggagaagattgtcgagattttatcacaggacaaattatgttatgaagctcagatactacgagatggtgcattccttcaacgagcattatctttctacagattaatgattctgtggtcagttaatctagttggcggttttaagatgcctttgccatcacaatgctccaaggagtttgcttgcattccagaacattttcttgacgatgcaatggatttacttgttctaacctctagaattccaaaggctttggaaagctttgtattggatgacttcctcagcttcataattatgttcatgggaagcacatcttacattaagaatccttacctaagagcaaagatggttgaagttttgaattgctggatgccgcaaagaagtggcttgagttctacagcctcgttgtttgaggggcaccaactgtgtcttgactatcttgttagaaatcttctaaagctttatgtggatattgaattcactggttcccatacacaattttttgacaagtttaacattcgacataatattgctgagcttctggagtatttatgggatgtccccagtcaccgaaacgcatggagacaaatagctaaagaggaggaaaagggtgtatacttaaattttcttaactttctcatcaatgatagcatctatcttcttgatgagagcttgaacaaaattttggaactgaaagaaatagaggctgaaatgactaacactgttgagtgggagcgcagacctgctcaagaaagagaggagcggctccgtgtatttcatcaatgggaaaatattgttcgatttgacatgaggctagccaatgaggatgttgggatgcttgcattcacctcggaacaaattccagcacctttccttctccctgaaatggtggaaagggtcgcgagcatgcttaattacttcctcttgcaacttgctggtccccagaggaaatctttgactgtaaaggatccagagaagtacgagttcaagccgaagcagctgttgaaacagattgccaccatctatgtccatatctcaaggggcgacaaggaatctgtcttcccagctgcaatctcgaaagatggcagagcatacaacgatcagttgtttgctagtgcagctaatattctgtggaagattgggggtgatcccaaaatcatacaggagtttatgcagcttgctggtagggcaaaagctgctgcttctgaagctatggatgctgaggcaatccttggggacattccagacgaattcctggatccaattcagtacactctgatgaaagatcctgtgacactgccatcatcgaaggtcacagtggatcggcccgtaattatcaggcatctgctgagtgattctacggatccatttaaccgctcccacctcactcaagacatgctgataccaaacacggagctcaagttgcagatcgaggaatttgtccagtcccagcagttgagaaagcgaactgctgcggtgtcagagattggccaagcggatggtgctgatgatatggccgaatgaattgtgcgagcagcagggatggacattttcttttgtggtggggaaagacggatgctaatttacgcgaaatttaccagttcatcggtccgtataaaatcggtttgccagcttgtgtcaccatttgtctccattctttgtaaatgttgtaagtgcacggttgtaattttaagtccctgtttgtttacctttgagattatggccctgtttgtccttctaggattatatagtccagcttattataagcatctattgacctgcttatgaattatcataatttaggtgtttagattacataatttatataataatttgtgttgtttgtttaccctttaacttatttagctgaattatataatttagagggaaaacaaacatgtcctatataatctagcttaataagttaagaggtaaacaaaaaacatagattattagctggattatataatctagatgtctagattatgataatccataagcagataattaggtgtctagactatgataatctataaacagg

SEQ ID NO: 80913 - DNA, 775 bp, Zea Mays
cacaaaacgagcgagtgctagggttacgcacttatacgagcaacaggacgacggcggcgtggcgggcaggcacgagctccgactccctccttgtgtccctccccgagcaggcgtgcgcgagcgaagcgtaggcgctaagcgagcacgcgaggccggggcgtcattcgtctagcaacagcgtgtgtggatgtgcgggcgaagtgcaagcatcatgatatgtcagcagaaatgctcaactattgagatgtgttgcttgtcttgatctcggtaattattttgccaattataatgaagataagctagttgaacttgctcaaatttatgttgatgacttcacaaaatatgattgtgtaattcttagagagcaacttgatacattcattactgaagcaagagaagattcaagtttctatcatgttgtgatcttggtaatcttgctatgaagatggttaagacagatagacacattgtatttccattgatttatagtttgattgaattggttttgattttgctttgcaacgttagaaagagtattttcaacaatgaatggtgtatgattagagatggcaatgggtacccgcgacccgatacacgatgagtatttactccattagggtatgtatgtgggctaaatattctacttgtggtctgttattaagcaaaaatctttactcaatgggtaaacgggtattagaacgttccgccttcacccatactcgttaacccgtgggtataaaatacccaatataaacttatccgaagcatgaacttg

SEQ ID NO: 80914 - DNA, 376 bp, Zea Mays
gcggcgtggcgggcaggcacgagctccgactccctccttgtgtccctccccgagcaggcgtgcgcgagcgaagcgtaggcgctaagcgagcacgcgaggccggggcgtcattcgtctagcaacagcgtgtgtggatgtgcgggcgaagtgcaagcatcatgatatgtcagcagaaatgctcaactattgagatgtgttgcttgtcttgatctcggaagtcttcatattgttgatgaaagcaacccaaacaattgatgaattgatcattgagacaaagatctaacatattcttaattagattttccaagaccatcaatgagcaaattataaacgataagatcaggctcaagtcctaattcatgtagctgtctaaaat

SEQ ID NO: 80915 - DNA, 1522 bp, Zea Mays
gggagatctacatccgaggtggaaaggggagttttgagatgtcccatcaacaagccttagcacaacaccagctttgatcacagcacagcatgccaattcttctgccaatgtggcatcagcacaggagaaaccagctctgccgtcacatgcaggtaatagcaacattgaatcaaatgaggtttcacaaggactcaaaacttctgcacccacttttgataaacctgctgacgatggatacaactggcggaagtatggccagaaggcagttaagggtggcgagtatccaaggagttactacaaatgtacccacacgagttgtccagttaagaaaaaagtggagcgctcagcagaaggacacatcactcaaataatttatagaggtcagcacaaccaccagcgtccaccaaaaaggaggtccaaagatggtggtggtccactaaatgaagcagatgttcttcatgagaatgaagacatttcaactagatcagaacctggctctcaagaacactctggaaaacatgaagggtcaaatgatggcatattagggccttctgtgtcaagaaggggaggaggagatgagcaattgtcaggctcaagtgatagtgatgaggaacaagatgatgaacaaagggctggcgacgaagaccctggctatgcaaatgcaaacaaaaggtggtttctaccatgaacagtttttaacaagcttttcaaggttcaatctataatcgctagttttattgagcagacatgtgccaactccagctcaaaggataattgtgcaaacaaacagcgaagttgatcttctggatgatggctatcggtggcgcaagtatggacagaaagtggtaaaagggaatccctacccgagaacccacaagttatggaactataacagccttccatgaatccacccacagttttagcaacaaatcaaatcattcgatacccatgtaaatcccaaacatggacatcagacacatcactgctctatggtgcagctcttagggtctggcacaatgtcacatcaatcctttatatcttttgaaagttactccataacccattaaagtcctggcgatgttgcagttgctgagaaaaactgacactttctctgatattcactacattcaccttcagttcatttctttggtgttcagttagaacctttcagattcctttttctttgggaccagaaaggatctttcagaaattgataagctttagtatctctgatccaagatatgtaattttagtacctgtgttatcaaacaattttaactttggccatcagtaaaaactacttttcacgatatatcattggtttatttaaaatgctttgtggactttgtggcgtatttttgagttcatttatactttatagcatatttttttagtacttttatttggtgaggtttgtgcatgttcaccaaatggggctttgtgaatggtagacactagctggaaagcctggacatctttaatactctcgtggaccccaaatataattccatttggccttttc

SEQ ID NO: 80916 - DNA, 1534 bp, Zea Mays
ctaataactcgtgtcatcctcgtggttgtgctcagtgctctgctcactacggaatgctgtgcactactgttcctgatgggagttttgagatgtcccatcaacaagccttagcacaagtaacagcacaagcagttcattctcagtacaatatgataaatcacacagattacagtattcctttttcgtcgacaacagcaccagctttgatcacagcacagcatgccaattcttctgccaatgtggcatcagcacaggagaaaccagctctgccgtcacatgcaggtaatagcaacattgaatcaaatgaggtttcacaaggactcaaaacttctgcacccacttttgataaacctgctgacgatggatacaactggcggaagtatggccagaaggcagttaagggtggcgagtatccaaggagttactacaaatgtacccacacgagttgtccagttaagaaaaaagtggagcgctcagcagaaggacacatcactcaaataatttatagaggtcagcacaaccaccagcgtccaccaaaaaggaggtccaaagatggtggtggtccactaaatgaagcagatgttcttcatgagaatgaagacatttcaactagatcagaacctggctctcaagaacactctggaaaacatgaagggtcaaatgatggcatattagggccttctgtgtcaagaaggggaggaggagatgagcaattgtcaggctcaagtgatagtgatgaggaacaagatgatgaacaaagggctggcgacgaagaccctggctatgcaaatgcaaacaaaagcgaagttgatcttctggatgatggctatcggtggcgcaagtatggacagaaagtggtaaaagggaatccctacccgagaacccacaagttatggaactataacagccttccatgaatccacccacagttttagcaacaaatcaaatcattcgatacccatgtaaatcccaaacatggacatcagacacatcactgctctatggtgcagctcttagggtctggcacaatgtcacatcaatcctttatatcttttgaaagttactccataacccattaaagtcctggcgatgttgcagttgctgagaaaaactgacactttctctgatattcactacattcaccttcagttcatttctttggtgttcagttagaacctttcagattcctttttctttgggaccagaaaggatctttcagaaattgataagctttagtatctctgatccaagatatgtaattttagtacctgtgttatcaaacaattttaactttggccatcagtaaaaactacttttcacgatatatcattggtttatttaaaatgctttgtggactttgtggcgtatttttgagttcatttatactttatagcatatttttttagtacttttatttggtgaggtttgtgcatgttcaccaaatggggctttgtgaatggtagacactagctggaaagcctggacatctttaatactctcgtggaccccaaatataattccatttggccttttc

SEQ ID NO: 80917 - DNA, 1885 bp, Zea Mays
gtaatctgttgcatgtctaacatttttcaggggagttttgagatgtcccatcaacaagccttagcacaagtaacagcacaagcagttcattctcagtacaatatgataaatcacacagattacagtattcctttttcgtcgacaacagcaccagctttgatcacagcacagcatgccaattcttctgccaatgtggcatcagcacaggagaaaccagctctgccgtcacatgcaggtaatagcaacattgaatcaaatgaggtttcacaaggactcaaaacttctgcacccacttttgataaacctgctgacgatggatacaactggcggaagtatggccagaaggcagttaagggtggcgagtatccaaggagttactacaaatgtacccacacgagttgtccagttaagaaaaaagtggagcgctcagcagaaggacacatcactcaaataatttatagaggtcagcacaaccaccagcgtccaccaaaaaggaggtccaaagatggtggtggtccactaaatgaagcagatgttcttcatgagaatgaagacatttcaactagatcagaacctggctctcaagaacactctggaaaacatgaagggtcaaatgatggcatattagggccttctgtgtcaagaaggggaggaggagatgagcaattgtcaggctcaagtgatagtgatgaggaacaagatgatgaacaaagggctggcgacgaagaccctggctatgcaaatgcaaacaaaaggtggtttctaccatgaacagtttttaacaagcttttcaaggttcaatctataatcgctagttttattgagcagacatgtgccaactccagctcaaaggataattgtgcaaacaaacagcgaagttgatcttctggatgatggctatcggtggcgcaagtatggacagaaagtggtaaaagggaatccctacccgaggagctactatagatgcacgtaccaaggatgcgatgtgaagaagcatatcgaaagatcatcccaagacccaaaggccgtcataacgacttacgaagggaagcacagccatgatgttccagcagtcaggaacggtagccatgctgctgccaacgccaatgggtcatcttccaccagcttaccagtaccacacagggtccacagttcagcatccagtagtcgcagagcggcagaattacaaagcgcatcctcagcttcttctatgctactaaaagaggaaaacgaaataacataggagttttggagtgtgtagccagggtaaattatatctgttctctgatccatttcctcctaggtgtgctgcttcacgctctgcgccgcagcaaaaattgggcactgcaagcccccaccattggttttagtcaagagcgagctctttcgtttgtgcccttccaaaagctgcacaccctgtttggctgcgcggtgtatgttatgttgtcattaccatttacgcccattggttgtaaatgccatcagtcgttcccccggagaactatatggatgacagcattcatcggcccaagtgtatatactcgatttaaaaaccttttttttaactgagatatggtttgttgtagatacacggcttccttcctggtctttgtaaagtgttatttcgacaggatatataaagctatagtagctgatggctgatttgccgttggcctctgaggctgtgagctcacctccagttttccaggtctactactaccatgggttagttgaagccattgagcagcatgtaatgttagaattgttcctttttatgatgtactctatgttctcgaatatttgttgtccattagttcatttttaaactaaaccgtaataaataaaaaagaacgaagtgagtataattctcagctaggaattaaac

SEQ ID NO: 80918 - DNA, 1405 bp, Zea Mays
taaaatggagccaaaaaaggcagctgatataatatagacctgaacaaaaggtactgacgcaggtcacttctctgaatgatgaacactaacagcaaattatctagtgctatccatctctgctcagaatatcatatcctcttacagaaacagcaccagattcgccctgtaacctgttacaacaaccgtacagacgtttgtttcattgcccagacaaccagagagtccgaaatcatcttcaggtgcgaaattgacgtgtcattgcttggacttgtcatcgtcatctgagccttcgtcatcgtcagacgactccactctgttaggttcttcaccaccattatcaccagttttagctcgcttctctttcttacgctgtttcttcttttgccgtttcaggcgcttcttggctgtccgctcctcagctgctttcatcctctcctccctccgcagttcgaactcagctatctcttttctcttctggtagtccgcatccattcgtgctagacggtcctgctctctcctcctcatttgccgatactgtaaattgaagagtgtttgcatagttgcagatcagaatattctcatactaattatcatgcctcaaaacactaaatgcgcaatttgttaaattggaatatcaatctataatcatattacaagattcaataaacagaattgtttagaatacatgtgtaaagaaactttaagggcatggcatggctgtaagtttcatgatttgccaatcacatcctgatatatgttcacttactgcacatctgatctcaactactccctctgttccaaattatagttcactttggcttttcctgagtccaatttctctttgaccaaatttgtacaaaaaatgcaccaatatttcattaaattctccatgaaatatgttttgatggtgcatttatttgaacttgcagatgttaatagatttttctaaaccaatgctaactactacctctgttctcgaatatttgtcgtccgctagttcatttttgaactaaacggtgacaaataaaaaagaacggagggaatataatttaagggagtgcctacctaaaatactggcagctaccaaccaacaactacacccatatatgaaagatgccaaggtttcatgttgaataaagctgacaacagatgctcaatcaaaacctcatgcaatagcaggtttgcattcaatggatagactaagtagtccagtcacattcagtgtgtttggttgcctgtattttctagtgcttgcatcgtgggatgcaatgtccatgtgattggttacctgtacagacacaatcaggctctctgtatactttgaccagatatgagatcgtgattggttccatatataagaggataccggcctgcgtatactcatgcagcctaggctttttttcta

SEQ ID NO: 80919 - DNA, 3464 bp, Zea Mays
gcgggatccacgggaggtaggggatccgcggtgggggtagtttgccgggcgcgcgcgggatccgcgggaggtaggggatccgcggcgggggtagttagctgggcgtgcgggatacgcgggaggtaggggatcaggaggtagggaatccgcggcggggggtagtttgtcgggcgcgcgcgggatccgcgggaggtaggggatggcgggggcagtctacactgtacccttaatagttagtagagatataactagtacagtgctcgtgcgttgcgacgacacataaatatttgataaaattttagcacataacaattacatgaacacaaacaatacatatattattattgacattaatattcataaattctttggtcactgacgacaatgcctccccctcgactgttcttgccccgttgcctgcaaaggcgcatggcgtggagagtcacagaagcagcgattcgaggtgcttgtcgacaggagaaggtaaaggtggtgtcccaagtggggcgcggttgcaacgacgcctccccctcctctcactcgaatgttcttgtcccgctgcctacagaggcatatggcagcgaagagtttgctcgatgtcatctatggtggtgcggaagaatctgggttaggaaggcggagacagagagagatggacagttgggagttaacataggacgacaacatcgaggaggaagcgcaacacttatagtggttgcatgcttgtttgagtatgcaataggtaaggcatgtgttcatgtaaatgtcatcacgattttaggggtgagcccttccaccaaaaaggaagaattggaaagaggcagctctctaacctatacccaatgatgatatgagccaccatggcgaggactccgacgaacactgtgctggtgttggcagacttgcgccggatggtgtgtgccgcgattttggctcccgccaccaccgcacggatccagatgctgctgccatcacgttgatacattgcggcgaccccatccctcataacgtggcagcaagcggaggaggggaggtgatctatccgcggcgtggagcagtaggatagaaagtggagaggggcgtcaagcggcgacgagcgggttgagcgaagtttattcagttttgttgggttaaactaagagacacaaaaaattgcatggcataagtaaaacgattatctacatagtccccatgtaaggaggcatgtcgcaacgataggacgaataattaattaaagagcacgtcagtcttactatgtgtgtgttgcatgaggaaatttatcttatccaggctttcatctttctcaataagtacaagtgtttttctctcccaacaggaacttcaatctgattgacaaaacattaaacataacaagtaaaccaaacaaagcaaatactacaatttctagttctagcaaagagaaaggaaatcaccagaacaatctcccatgcaaaagcaccactgtcacgagcagcaactccgcgctcgttgcttgggatagcaaaagcatcctatgagtaaacaagtaaaatcaacacaccagaaatgcaaatatattgcactgcgatataaacgaaaatatgtagcatcagatatggaaaaaaattcagagaacaaatacatggtcataagaagaaaagtgaaaacaggtatagaaaaataactgaggtatcaatgtataatgttatgtactgaaaagcacatcatgaagaaggatagggacacatatagtactcatttttgcatggcacacctacttccatatttgggagcaatcaaatagatggtttcattgaagatccagagtatcaattggctagcaatcatgcaacaatcatgatgttcattgctcctagaagggtctgaacgactaattcacagcaaagactacgaataaatatgccagtccagacaatataaaccatggttgcttgtacatcctctaatggtatgaaggtacagagagagaagaaacatgaggaggaaatcacatactgcactgctaatgaaccaccctgttccatttgattggcgctataacatacacaataaagttaaatgcctgagtagcttctgctagattcttctaatatctgttcaactatctctctctagaaagaaataagaaaatacctgatataccagaaacaaaatacatattcatttgattctacattccaagctctagtgttttaaggaagagagcagagcgcacctcttttatcacatttgttctctccatttggatggaagctatgaactcctaaagtggtaggttctgttgctgagcagcctcaaatgagaaagcagaatgtacgtgtaccttagataatatgggcgcctatcaaatgacttagagatgtcacacaaatcaacagttgcattaatctaatccatctttagtagccgacatcgatcagatggtatattatcttctgagataaagtggctctagcgcactgtcgttttattacatatattagtcgatctgctgatagacctacatcaatgtgcacataataaatggtgaaccaattgcggacaaaaaatactgtgcaacaaggactaaagaatacttggggagctgtattatcatataaacagttgtgaattaaaaactctgggactaagaagcaatagtatacaaagaaacaatgatgacaaatatgaagtctcaccataagacaacaatgaatacctacctcttccaaagagaaaggatgagattttgtgccctttggatgacaaatgatcctgaatatctttggccacagcggccaggtgagtcgtccagccctggtagcccacggtggaggactcgagggagccaatcgatgccatgggactggggtgatggtggtggtgaggagcgcatgctgggcgtgggcattgagggaggagatgaccgccttcttgcccacgcatcgctggcagcaacatttgtcgccaccgctctcctgcttgcatcggaggttggttcagaggtacccgcgcgtgctgcaggggctaagactgatgtcggagacaaccttggtgtcgccgacgaccttgtacagcagctcctgcaaccgtgccatgaaacgttcatcagcgcagtgcagattgtgggcgcagattgtggactgcctacgtggaggaatgatgagatcaatgcggcagatggaattgatcgtggagaaggtgtagaccatgatgacgatgagaccgatgcggaagttggtggggattgtggagaaagagtgcaagaaactcacgcgcaacagaatgctaggatcgtttccgtctcaggcaaatgcaagcaagcaggtgctgaaccgagccgagtgcaaagaaaaaagaagccgagtgcaaagaacaatggagccgagccgaacaatcgaagcaacggagcccgtccagaagcgctgttacagatggccatcaagcacatggcccatgaggccgacatgaagcccgtcatttag

SEQ ID NO: 80920 - DNA, 3776 bp, Zea Mays
gatccacgggaggtaggggatccgcggtgggggtagtttgccgggcgcgcgcgggatccgcgggaggtaggggatccgcggcgggggtagttagctgggcgtgcgggatacgcgggaggtaggggatcaggaggtagggaatccgcggcggggggtagtttgtcgggcgcgcgcgggatccgcgggaggtaggggatggcgggggcagtctacactgtacccttaatagttagtagagatataactagtacagtgctcgtgcgttgcgacgacacataaatatttgataaaattttagcacataacaattacatgaacacaaacaatacatatattattattgacattaatattcataaattctttggtcactgacgacaatgcctccccctcgactgttcttgccccgttgcctgcaaaggcgcatggcgtggagagtcacagaagcagcgattcgaggtgcttgtcgacaggagaaggtaaaggtggtgtcccaagtggggcgcggttgcaacgacgcctccccctcctctcactcgaatgttcttgtcccgctgcctacagaggcatatggcagcgaagagtttgctcgatgtcatctatggtggtgcggaagaatctgggttaggaaggcggagacagagagagatggacagttgggagttaacataggacgacaacatcgaggaggaagcgcaacacttatagtggttgcatgcttgtttgagtatgcaataggtaaggcatgtgttcatgtaaatgtcatcacgattttaggggtgagcccttccaccaaaaaggaagaattggaaagaggcagctctctaacctatacccaatgatgatatgagccaccatggcgaggactccgacgaacactgtgctggtgttggcagacttgcgccggatggtgtgtgccgcgattttggctcccgccaccaccgcacggatccagatgctgctgccatcacgttgatacattgcggcgaccccatccctcataacgtggcagcaagcggaggaggggaggtgatctatccgcggcgtggagcagtaggatagaaagtggagaggggcgtcaagcggcgacgagcgggttgagcgaagtttattcagttttgttgggttaaactaagagacacaaaaaattgcatggcataagtaaaacgattatctacatagtccccatgtaaggaggcatgtcgcaacgataggacgaataattaattaaagagcacgtcagtcttactatgtgtgtgttgcatgaggaaatttatcttatccaggctttcatctttctcaataagtacaagtgtttttctctcccaacaggaacttcaatctgattgacaaaacattaaacataacaagtaaaccaaacaaagcaaatactacaatttctagttctagcaaagagaaaggaaatcaccagaacaatctcccatgcaaaagcaccactgtcacgagcagcaactccgcgctcgttgcttgggatagcaaaagcatcctatgagtaaacaagtaaaatcaacacaccagaaatgcaaatatattgcactgcgatataaacgaaaatatgtagcatcagatatggaaaaaaattcagagaacaaatacatggtcataagaagaaaagtgaaaacaggtatagaaaaataactgaggtatcaatgtataatgttatgtactgaaaagcacatcatgaagaaggatagggacacatatagtactcatttttgcatggcacacctacttccatatttgggagcaatcaaatagatggtttcattgaagatccagagtatcaattggctagcaatcatgcaacaatcatgatgttcattgctcctagaagggtctgaacgactaattcacagcaaagactacgaataaatatgccagtccagacaatataaaccatggttgcttgtacatcctctaatggtatgaaggtacagagagagaagaaacatgaggaggaaatcacatactgcactgctaatgaaccaccctgttccatttgattggcgctataacatacacaataaagttaaatgcctgagtagcttctgctagattcttctaatatctgttcaactatctctctctagaaagaaataagaaaatacctgatataccagaaacaaaatacatattcatttgattctacattccaagctctagtgttttaaggaagagagcagagcgcacctcttttatcacatttgttctctccatttggatggaagctatgaactcctaaagtggtaggttctgttgctgagcagcctcaaatgagaaagcagaatgtacgtgtaccttagataatatgggcgcctatcaaatgacttagagatgtcacacaaatcaacagttgcattaatctaatccatctttagtagccgacatcgatcagatggtatattatcttctgagataaagtggctctagcgcactgtcgttttattacatatattagtcgatctgctgatagacctacatcaatgtgcacataataaatggtgaaccaattgcggacaaaaaatactgtgcaacaaggactaaagaatacttggggagctgtattatcatataaacagttgtgaattaaaaactctgggactaagaagcaatagtatacaaagaaacaatgatgacaaatatgaagtctcaccataagacaacaatgaatacctacctcttccaaagagaaaggatgagattttgtgccctttggatgacaaatgatcctgaatatctttggccacagcggccaggtgagtcgtccagccctggtagcccacggtggaggactcgagggagccaatcgatgccatgggactggggtgatggtggtggtgaggagcgcatgctgggcgtgggcattgagggaggagatgaccgccttcttgcccacggtaggcacttgggagatacgcggttggcggacacatacggccgcccaacgacgaccggtgacgtgggcttgaactggatctaggattgcacgtggccgcacgacggcatggcagtgttggcgccacgcgtcccggtgccaccccgatggctctgcttctctcgggcgcgccgcacgtgtaggggagtcagctcagttgctgccggcttcatcctaggaaccggtttcggggtccttgggggctcccgatgcgtagtcccgatagccatgacgatgtcccacgcgaactggttggcctcgacgatctcgttgagcagcatcgctggcagcaacatttgtcgccaccgctctcctgcttgcatcggaggttggttcagaggtacccgcgcgtgctgcaggggctaagactgatgtcggagacaaccttggtgtcgccgacgaccttgtacagcagctcctgcaaccgtgccatgaaacgttcatcagcgcagtgcagattgtgggcgcagattgtggactgcctacgtggaggaatgatgagatcaatgcggcagatggaattgatcgtggagaaggtgtagaccatgatgacgatgagaccgatgcggaagttggtggggattgtggagaaagagtgcaagaaactcacgcgcaacagaatgctaggatcgtttccgtctcaggcaaatgcaagcaagcaggtgctgaaccgagccgagtgcaaagaaaaaagaagccgagtgcaaagaacaatggagccgagccgaacaatcgaagcaacggagcccgtccagaagcgctgttacagatggccatcaagcacatggcccatgaggccgacatgaagcccgtcatttag

SEQ ID NO: 80921 - DNA, 956 bp, Zea Mays
gtcgatgttataaagacaatgatattgggctctcaagggtgtagatcccaaccagatgtcatcctagaaccggacctgtgtgccgtcctgtaccttaaaagctctaaaactgaaaaactcatgtttgatcttcattaggccacacaaaaaatatgaatctccctgcctccattctgcttgggatagagggattgatctaaggtatttatttcgaagcaattgttgccatattccatctgagttcagaagattgaagagccatttaccaagcatagttgtgtttttaatcctcaaatcgtggagacctaaaccactttggttcctaggttggaaaggcatcatatacattggcaggcaagtgagcaccgagttgattagtgtcaatctgcccccgatagagagatgtttgcctttccaactactcaggcgcttttcaaatcgttcctcaactcgccttcaatccgagttccttaacttcttaaactgaatgggaataccaagataattgctcgaaggtaagaagggcaagaagggcgggcctggtgcagcggtagagcctaccgtctataaccggaaggtcccgggtttgagtcccagcctctgcatattatgcgggtaaggattgacgcttatctataatcggaaggtcccgggtttgagtcccagcctctgcatattatgcggaggatgaggaaaggaggcagatggaaagtggaaaaaggtagaagtttgcatactcaagacttgaaagtggaacaagaaggcgaagatcatgcattttgtggtcttagcgatgcttgcttcagtacattcggacaggagcttgcacagtcggcgagtgcttagtgatgcagtacaagatgcatgtcttgttacaccattgttaattttctaattttctttgaattttcgaatctggaatcttaaatttcttaattattgaatctgaaatcttg

SEQ ID NO: 80922 - DNA, 426 bp, Zea Mays
ccgagttccttaacttcttaaactgaatgggaataccaagataattgctcgaaggtaagaagggcaagaagggcgggcctggtgcagcggtagagcctaccgtctataaccggaaggtcccgggtttgagtcccagcctctgcatattatgcggaggatgaggaaaggaggcagatggaaagtggaaaaaggtagaagtttgcatactcaagacttgaaagtggaacaagaaggcgaagatcatgcattttgtggtcttagcgatgcttgcttcagtacattcggacaggagcttgcacagtcggcgagtgcttagtgatgcagtacaagatgcatgtcttgttacaccattgttaattttctaattttctttgaattttcgaatctggaatcttaaatttcttaattattgaatctgaaatcttg

SEQ ID NO: 80923 - DNA, 1076 bp, Zea Mays
gcttcgtcttccatcgtttcgtccttacgacatcatccgctttgagaaattcgtcgctttcttcatcggctccgcttcttcctcgagttgtcaaattagaaaaaggttcgctttcctttttcccccaagttgtgtgcttgcggcggatctgccttcttccgcttcggctgtctccccagtttcccatcttattattccctcggcacccccatggccccacattccctttgggcagcacacaagctccacacatctgacctgttgggtttgtgttctattcggtgtttgccaagtcccattacccattttcacttatcccaaatcggccagaggataggttctgtgctttccttttatttttcccaatttctccattcccccccccttctatagtctccttagatcaggttctgcagataaaagcaccagaaaatgaacatccaagcaactcattgacaaacaaaactgaactttcttcgtttttaaccatgttgagaagtacccttgctccttaaggactacaccagcgaggtccctcatccacttgaaggacgtcgtcattggttcactaatgaaaacattgtgtatggttgttaagtctgttacgttctcagatgtagacaacactatggcaaagacttttttaccatccaatactcctgaaagttccgccaacacattagaaagccctgcaaaaagtgggtacttccaatacatgtcctttaattatggatggttgacagtctcgaagacgtttttagctcagcgtggactggccttgataggttgctaaatctattgcatttttagatgatgtcaataccatgtaagtgtatttacattacatttttttcatctcactattacgtgcttctagatactcttatttagtagcattcacttttgtgttacaaaagcataaatcaataaaaaaactcaaacagatgctaaatcttcacattaggtatgctttatgaacttaatacaacaagttcatattccaccatacttaattgttcaatcaagcctcatcgtaggccacaggtattttaccatctaatattcctaaaagttcc

SEQ ID NO: 80924 - DNA, 1086 bp, Zea Mays
cgacgacaaagaaatatctcattgtttgtccaagggtgacacaagtacacagcggctactggttaacccctaacgctactaatcgatcatacataatttgggaatggagcacacacaactcgatcacgagctgcagaaagagcaagtgaatgaatggagaagcacacacaactcaatcgatcgcatgtttattggtgctaccacgcacgaacgtacgaatcgaaggacctaagccatacaaacatacaaatcgagtgagggacaggcatggcaggcagagatggttcctgggctggagttgatcagtcagttggtgtagttgttgacgcaggcgtgcggctcggcggccctggcggcgggcgtgggctcgacggtgggggagggcgggacgggcgtgcagagcaggtccctgggcaggtccgggatgccccggaggtagaaggtgtagaagatcttgaaggggaagacgatctggtggagcttgacctggccgtaggcgccctcgaagacgccggagccgcccgtgacggccaggtacgactcctcgtaggtcaggtacgcgccctgcaccgagatgtggccgtagtcgccgaagtagaagctgtagatggcctcgcaccgatcaagcaaaagcaaaagcaaaagcaaaagcaaagcaaggaacacaacgacgacggaccttgtttgtgaaggggaccaggtcgcccagcgcgttctccgtctgcttggcgctgaggcgcaggtacgcggggctctcgcggtcccgctcgttcatctcgtacacgtacagctcctgcaccttggtcggccgcgcgtccttggccgccgcgggcttgggcgagaacagcgacgcccgcacggccacggggccgacacggctccgcggatgctgccggaacccgcccaccgcgactctggacgcctggcgcaccttggaggcggcggcggggctcgagaccttggccgaggccggggacctgagcgcggcggccatggagacctagcagaggtggctggctggcctggctctcgatgcgatgggggaagggaatggggaattcgtgagtgaattggtggtggtgtgtt

SEQ ID NO: 80925 - DNA, 594 bp, Zea Mays
cgagcacaaacacgccgccctcgatcgtctctctttctctcgctctcgctttgcccgggcaagaaaccgaaatgcacaagcaagctcaagcccaccccgtctctggctcccttccccctccaaaccaagacagcaagaaaccatccatggcgtgccggcaaggcgccggcgacgcccgcacccacatcggcgccgaagatcgtctggcgcccgacgacgacttcgagttctgcatactctcgtccggcggtctcgcgccggtcggggacgacgcgcccggcatgtgcgtggccgacgaggtcttctacggcggcaagctcctcccgctccgcctctcctcggccgacgcggccgcactgctgctgctgcgctcggactcgctggacggcgccgcgacggcgtccgcgtccgcgtccacgaccaccagcagcggcttcagctcccgctccgtcagccgcggcagcagcagcagcagctgctgcagatcggcgacggagcagagtgggaagggcactgctcggaggagcaggattctcgagtggctcgacgacctctccgtttccaagtagttttagatggatagagagatcctag

SEQ ID NO: 80926 - DNA, 3886 bp, Zea Mays
cttgaaacatctaatttttacccaaatataccataagtatgatgtggcaagtaaaccaaggattgaaatcagcttagtgttgcataagtagcatgatatgttgtattatttgtcatgtacgaagcaaggttcacatttccacaagggatgcagagtctggttggaagaaaagaaaaggttctgtattataaggtgttgatgcaaaacgaattaagatatagtgctatctagcatctgatccagcggccaataagtttaattaagctttggtttttctgaaagacagcgaccaactggtcaagtacttttatgcaatgagctataggatctaaggtcatatctcattgtagcactgtgatttattgtgaaacattactacctactattccctccgttccaaaataatagtagttttagctcttgatttttatgtctatgttcaaacggatggggatgaatctagacacacatataaaacacatgcatcaagaattatatgaacctactaattccctaaaacgactactattttgggacggatggagtatttaattaccaaagtaatatgttgttgtcaacttgttaaccaacctaaataatatatggaatccaagctttttcaagacatgcttgtagcgattgtgccatagctataaaaaaataggcctgagagatcaccgaaggaaagtgactcctggaaaagccaacgcgacgccaaatccattcttcactcttccacaggctgaggaccgaacacccaagccaggcagccagccgaggaagccagggtgccaggcgacaggcgacgccaagtcgagaacaccctaggtggtcgctcgcaggctgcaagtgagagccgtggcagagtcgccgtccttgcccacggaggaggacacagccgccggcgcagtgggatggcgacgccgacgcccatgcccggaagcgaggggacgctcgtggcggtgatgccgcggtccccgtccccgacgccggcggaggcggggacatcggcgaccgagacgcccgtgctgatattcctttacttccacaaggcgatccgcgcggagctcgaggcgctgcacggcgtcgccgtgctcctggccaccgagcgcaccggcgatgtcgcggcgctcgccgagcgctgccgctttttcttcagtatctacaaacaccactgcgaccgagacctccgtcctctgtttttgtgtttctggccattttcccctgtcacttcctgttgggcggggggccttgacccgcggtcaccgttgcggctccactctacctcatacatacccttccctcccttacctagttcccgccgccgccacccaagcaggcacaaccgaggaggagcaggacccaacaagcccgccgggctggaggggcgctagggttggacggaatcgacgaggacggaggtgtttgtgcgaacgtggcggcggcacgacgggcgatggggagatgaggaaagaggagtggttgagagtggaggcgcggatctgcggggaaacgcgaagggtgggatggcgggtggagaaacgcgtagctcgacgcgagaggggcggggacacagagctcatggcgaggagatctgcggggaaacgcgtagctcggcgcgagaggttggcaaggctcatggcgaggagatcaagctggaggttggcgcggagctcggccggtcgagatcatcgcggcgaggagggtggaagttgcagagcgcatcgaggacgaggaagggctggtgggcgggggggagagcgatgcggagatcgtgggagggtgggcgtcggtggaggactggagagagcgcgcatcggacgggggaggagctccacggcatattggacgatcgagatagctagatggcagaacggcagaacagagggaggcagactactcttacatacttaataagtagtatagatttgacgccagacagttcatttttgaattaaaaacgacaagtaaaaaaatggagaaagtactattctataaatgaccatagattaacttattatgtagccactttgagctacgattattgctgtaataattgacgagactatagtgacttccgcctaaattgtctactacaatattataataaagtttagcatgaatttagtgttgctcctttacagagaaaattcatgtgtgacacttcatacttgcatgttcactagtacttcatagttaagggtttatttatgtaccctcagcttattacataatccaaaatttatatacataataaaaatttatgccactccacaatatcgtgatatataaggtaatggacctaaaatatacatgctcacttactataggttaaactatttatcgaacacttaagttgtgtccaccagatcgtgtatatgattatgtaaaacactattttgcgttgtaaactgtattgttcacagagcgaagtttgaaatatgagataagatgggagatatgatgagtaaaatgctaaagacaacctataaggtagtgtttggttgaggagccaagtagaacggagtcgttccatccctgattctaggaacggagccgctctattctgtgtttggtaatctggaacggagtgattctgttttttgtttggttgcagagtgaacggaacggagcgtgactgcgcgagtgggctgggaacggagcggctccgtccgattgattttttggagcaggatggttccagatctgaggagaatattccctaattggagccactccgttctagttactttgtaaccaaacaacaacaaaactgagacagaacggctccgttctacttggctcttcaatcaaacactacctaagagatggggagaaagaccattgtttttttaaagaaggtcctaagttggtaggtatgttttgtttgtggtggcttatctctcctagatttacggtgagcaaggtgtcctttttaggatgtatggtggctatcactctttatgcctctgattcataagggcaagatgactttcagacattaattcactttttaggtggatacatatcaatctgcttggaacttggatacttgccctttagagatttatttggactactgttttctctcattctgatttgatgttgcacatggctgaaacttgtaagattagacatggttaactgcacaactcatatacatgtacattgtataaatgtgtatctcctcttctaaaatgttgattgtgttaatttggatttagaccctaaccttgtcgtgtagcctttttcctcttattgcagtggataaatctcattgtgtaaaactcatattactccctctatttcgaaatataagacatgatttaatttggagcatacatttatactatgaaaactaaaataagtgttgttattgctttaggacgttagcgaagtatgtgaaagatatgctatgtgaaatactacacatatgggagaagcgctagattcgtagactttaggatctagccaatttccctctgtgacctatcctagttcttagcgatagatagatttactcatgtaatggaacgatgaggtagaagaagatgtgggacgagtatatggtctatacctttgagctcgaggtggatgacgaaagtcggtgtcggtgtcaagtccatgcgtagagcgccaccgtttagacttgtttctccttctccttatgaatctaggagctggggtggcacgtcagtagccgatgaggtagaaccattagtgtctaccggcgccctagagagtttgacattttttgtcactcaagggctaaaggagatcagatcgtctaggaactatggcggctagggttacggatgatcaaccctttcctttgactcatatagcacctcagggacacatctatgaatatagtcatgtccccgat

SEQ ID NO: 80927 - DNA, 1710 bp, Zea Mays
atttttttaaataaaaaaaaacatgaggtgttttcccccaaacaccgctccacctccttcctcctcgttgcgctccggatccatccccattccccagtcgccgcccaagtcaaaaggagggaagcttcttccactacagtccttgaggccgcccatcaacgactagacgctggtcaagctgcaccaaccctagccccataaccctaggtccctcctccacgcccccttccagagaggcgaggaaggaggcgaaaggaaccatggattcctccggcggcggcggtggagcgcagatcaagggtatggcgacgcacgggggccgctacgtgctgtacaacgtgtacggaaacctcttcgaggtctcctccaagtacgccccacccatccgccccatcggtcgcggcgcctacggcattgtctgtcaggggaggaggttgcgatcaagaaggttggcaatgcgttcgacaaccacatcgacgccaagcggacgctcagggaaatcaagctgctgcgccacatggaccatgagaacatccttgccttaaaggatgtaattcggcccccaactagagagaactttaatgacgtgtacattgttactgagttaatggatacagatctccatcagatcgtacgctcaaatcagccattgactgatgatcattgccagtacttcttgtatcagttgttacgagggctaaaatatgtgcactcagcaaatatattgcaccgcgatctgaagccgagcaatttgttcctaaatgcaaattgtgacctcaagattgcagactttgggcttgcaaggaccacttcagagacagatctcatgacagagtatgtggtcactcgttggtaccgggcaccagagctgctgttgaactgttcacagtatactgctgccattgatgtctggtcagttggatgcatactaggtgaaatcgttactcgtcaacccctgtttcctggacgggattacatccagcaattaaaattgatcactgagctcataggctctccagatgatgcaagcctgggatttcttcgaagtgataatgcaaaaagatacatgaaacaactaccacagtttccaagacaggacttccgcctgcgtttccgcaacatgtctcctggcgcagtcgatttgttggaaaggatgcttgtgtttgatccaagcagacggattacagttgatgaggctctgcatcatccatacttggcttcacttcatgagatcaatgatgaacctacctgccctgcacctttcagctttgattttgagcaaccatcctttacagaagcgcatataaaagaactcatctggagggaatctttagcatttaacccagagcctccctactaatatcaaaaggatgatgagttatctgctagaggcatatgaagatctctaggtccagcggacgcaagaacttatgtctgtgtcagtgtgcgttgattatttacgtgcggtttgttgggcatacgggcatgggttggtgctgcaattgcaactctattatggcttgtgagagcaaacaaacgtctgtattcattttcagatgcctgaacccaggcttgtattataccgcttgactccataaattattcttgtgtatctatgcttgtaattttgcagacaattacttgaacgccccttgtatatctgagttgacatctcttttccaatgaaaaagcaaaactggaaaaaaaaca

SEQ ID NO: 80928 - DNA, 2120 bp, Zea Mays
ccacgacgctctcccgtgactaaacagtgtctcattggctttctcctccccctctctgctatcctccattgcaagttgtttggagcttaagcgaacagcatatcccggtgggaactcgagcaaggcgagatcgaggcgggatccagaggctaagctacggtttccgacgcggatccggcggttctcggtcgctgcgcgccagatgagaatcgccgttgttgctcggtaaaatgtcgggcctaatgtgggagcatgggagaagatgctataactattttatggtgtcacaaacttcgattcatgaatatgtatatggaatggacccacaccacatctagatgcttcgaacttgtctggatattatgactccggctgaatatatggggcggagggctccatgtggcgaggtatggcccaagccataccttggcccagcccattagcatctaggtaagtcgaagacctacgtctgtgtcaagcatctgtgcatctgtttcttcaccgccgctcgcaaggcagtccgcacgccgctcatcttctctacgtagctgcgctcaccggctcgcatgctcgcctcgccatcgctcgcctcgagtccgcctctgcgcacacgccatcgttcgactctacacgctcgccgtcgctcggctcgcgcgcacacgctcgaatccgcctctgcgcgctgctctgtgcgccgagtgcctacgcggccgctgccacgactccatagacggcagtattattagtgtccggcacttgaagcgacaaccactacgaccagatcaaagtcctgaggatttgcaacgttggaagccggctcccggacgcgcaactgcgcggacttttcctgcaagcttcttctgcaaccgaagcaactcttcaatccagaagtggctgctccagggcggcatggcgccaaaagtctccagcccgttcctcctcggcctaccctgggtcgtcgcgcacgttggatccatcaaatcttccaatgcacgctgcgccggcccgggtcgtcacgcaagagagctcccttcttgctagcgagtagcgactagcgagaggtcgccggcgcggcaaaaatccgaaaggcgagccgagatggcggggtcgcagtcgcaggcgatgctggagaagatggagctgcggcagagctaccgcaacgtctggcacaccgacctcaccaacgccgtcgccgcggacctcccgtggtgctgcctgtctctgtggtgcggcccgtgcgtgtcctacatgctgcgcagacgcgcgctctacaatgacatgtcaaggtacgtgtgctgcgccgggtacatgccgtgcagcggcaagtgcggcgagagccagtgcccggaagtatgccttgcaaccgaggtgttctgctgcttcggcaactcggtagcttcaacccggttcctgctgcaggacgagttcaacatccagacaacgcagtgcgacaactgcatcatcgccttcatgttcttcctgcagcagctggcctgcatctgctccctggtcgcctgcatcgtcggcaacagcgagctctcggaggccgcgcacgtcatctcctgcatgtcgaatctggtctactggacggtttgctcgtgcatgcagacgcagcacaaggtggagatggacaagagggacggcacgttgaacaccatgtctgcgcctccgatgcagcagatgtcgcgttggtaggtgcgagtgagattatgtgccgacctcgatacggaggagggtagctgctggagctggaggctatcagcaatctcctactctggttaggacggtccatttttcagatttgggtgagataccatggctagtgtgtaaaccatgtcccgtttgtttgggcaaattttcgtgtttaatgagttgtgcatttttcacaacttctgttatacctcttacggctagatgccgaaattagatatcctaataatttattttaattgactacaatagtatgtgcacttgtattttatttagaaatgagacgagagcaacgagtgtagaggctcaacttatcctccgggtgctttgtgcctattgagtatcaaatttggcactttccctactattttttttatctcttcggctctacatcgtttgaaagcgttttg

SEQ ID NO: 80929 - DNA, 2485 bp, Zea Mays
ctcccgtgactaaacagtgtctcattggctttctcctccccctctctgctatcctccattgcaagttgtttggagcttaagcgaacagcatatcccggtgagtttggggcagatcctggcgaccgagcatcgattttcgatgagaacccgacgaatctcatcggtcgcagccgctgcgcgctaggtgggaactcgagcaaggcgagatcgaggcgggatccagaggctaagctacggtttccgacgcggatccggcggttctcggtcgctgcgcgccagatgagaatcgccgttgttgctcggtaaccgtcgtgttgtgtgtagaatctggttgtttgtcgacgagaacctctaccgcagtgaagagagaaaggttgttttaggcattgttgtgtgatgtaatagcatatttataagtttattttgtgtgctatatattttagttagatgcttttttgacagcactgtttagtgaagaaggtttgttatgttagtgaggcatgcatggtttattccgtgtgcatatatgattacacagtatcgtacgagtaatctagtgtatgataaatggtttattgtgtcagtgaactaggcatggatggttaagcaacgagtagatcgagcaaggttatatgttttttttgttagttacaagtttctggttgatatatttctttgctggtacttcttggttgttagttcaaagcttgaaactaattgttacatgaccgagaaacttaatagttggtattattgtcgtaggtgctatcgttacattacatggacaattgatactttttagttgatatttttaatgtagtttataattatttgcattgttgtaggtaaaatgtcgggcctaatgtgggagcatgggagaagatgctataactattttatggtgtcacaaacttcgattcatgtgcttctgcagccttcccgttgtgttccatttgcttcatcattaaatatttatttattgctcatattatctagttaattttattttataactgtataggaatatgtatatggaatggacccacaccacatctagatgcttcgaacttgtctggatattatgactccggctgaatatatgtattattagtgtccggcacttgaagcgacaaccactacgaccagatcaaagtcctgaggatttgcaacgttggaagccggctcccggacgcgcaactgcgcggacttttcctgcaagcttcttctgcaaccgaagcaactcttcaatccagaagtggctgctccagggcggcatggcgccaaaagtctccagcccgttcctcctcggcctaccctgggtcgtcgcgcacgttggatccatcaaatcttccaatgcacgctgcgccggcccgggtcgtcacgcaagagagctcccttcttgctagcgagtagcgactagcgagaggtcgccggcgcggcaaaaatccgaaaggcgagccgagatggcggggtcgcagtcgcaggcgatgctggagaagatggagctgcggcagagctaccgcaacgtctggcacaccgacctcaccaacgccgtcgccgcggacctcccgtggtgctgcctgtctctgtggtgcggcccgtgcgtgtcctacatgctgcgcagacgcgcgctctacaatgacatgtcaaggtacgtgtgctgcgccgggtacatgccgtgcagcggcaagtgcggcgagagccagtgcccggaagtatgccttgcaaccgaggtgttctgctgcttcggcaactcggtagcttcaacccggttcctgctgcaggacgagttcaacatccagacaacgcagtgcgacaactgcatcatcgccttcatgttcttcctgcagcagctggcctgcatctgctccctggtcgcctgcatcgtcggcaacagcgagctctcggaggccgcgcacgtcatctcctgcatgtcgaatctggtctactggacggtttgctcgtgcatgcagacgcagcacaaggtggagatggacaagagggacggcacgttgaacaccatgtctgcgcctccgatgcagcagatgtcgcgttggtaggtgcgagtgagattatgtgccgacctcgatacggaggagggtagctgctggagctggaggctatcagcaatctcctactctggttaggacggtccatttttcagatttgggtgagataccatggctagtgtgtaaaccatgtcccgtttgtttgggcaaattttcgtgtttaatgagttgtgcatttttcacaacttctgttatacctcttacggctagatgccgaaattagatatcctaataatttattttaattgactacaatagtatgtgcacttgtattttatttagaaatgagacgagagcaacgagtgtagaggctcaacttatcctccgggtgctttgtgcctattgagtatcaaatttggcactttccctactattttttttatctcttcggctctacatcgtttgaaagcgttttg

SEQ ID NO: 80930 - DNA, 2455 bp, Zea Mays
ctcccgtgactaaacagtgtctcattggctttctcctccccctctctgctatcctccattgcaagttgtttggagcttaagcgaacagcatatcccggtgggaactcgagcaaggcgagatcgaggcgggatccagaggctaagctacggtttccgacgcggatccggcggttctcggtcgctgcgcgccagatgagaatcgccgttgttgctcggtaaccgtcgtgttgtgtgtagaatctggttgtttgtcgacgagaacctctaccgcagtgaagagagaaaggtaaaatgtcgggcctaatgtgggagcatgggagaagatgctataactattttatggtgtcacaaacttcgattcatgtgcttctgcagccttcccgttgtgttccatttgcttcatcattaaatatttatttattgctcatattatctagttaattttattttataactgtataggaatatgtatatggaatggacccacaccacatctagatgcttcgaacttgtctggatattatgactccggctgaatatatggtacatacatgatttccggtttgtgtgaagaattatgttatgaaaatctttacatgcaggggcggagggctccatgtggcgaggtatggcccaagccataccttggcccagcccattagcatctaggtaagtcgaagacctacgtctgtgtcaagcatctgtgcatctgtttcttcaccgccgctcgcaaggcagtccgcacgccgctcatcttctctacgtagctgcgctcaccggctcgcatgctcgcctcgccatcgctcgcctcgagtccgcctctgcgcacacgccatcgttcgactctacacgctcgccgtcgctcggctcgcgcgcacacgctcgaatccgcctctgcgcgctgctctgtgcgccgagtgcctacgcggccgctgccacgactccatagacggcagtattattagtgtccggcacttgaagcgacaaccactacgaccagatcaaagtcctgaggatttgcaacgttggaagccggctcccggacgcgcaactgcgcggacttttcctgcaagcttcttctgcaaccgaagcaactcttcaatccagaagtggctgctccagggcggcatggcgccaaaagtctccagcccgttcctcctcggcctaccctgggtcgtcgcgcacgttggatccatcaaatcttccaatgcacgctgcgccggcccgggtcgtcacgcaagagagcagagctcccttcttgctagcgagtagcgactagcgagaggtcgccggcgcggcaaaaatccgaaaggcgagccgagatggcggggtcgcagtcgcaggcgatgctggagaagatggagctgcggcagagctaccgcaacgtctggcacaccgacctcaccaacgccgtcgccgcggacctcccgtggtgctgcctgtctctgtggtgcggcccgtgcgtgtcctacatgctgcgcagacgcgcgctctacaatgacatgtcaaggtacgtgtgctgcgccgggtacatgccgtgcagcggcaagtgcggcgagagccagtgcccggaagtatgccttgcaaccgaggtgttctgctgcttcggcaactcggtagcttcaacccggttcctgctgcaggacgagttcaacatccagacaacgcagtgcgacaactgcatcatcgtgcgtagtcgcggccggccacgcgcgcctcgatccgtctcctgatgacttgatctgatcttccgaatcagctgactcgactgacgctactcatcttcctcgtcgttgcaggccttcatgttcttcctgcagcagctggcctgcatctgctccctggtcgcctgcatcgtcggcaacagcgagctctcggaggccgcgcacgtcatctcctgcatgtcgaatctggtctactggacggtttgctcgtgcatgcagacgcagcacaaggtggagatggacaagagggacggcacgttgaacaccatgtctgcgcctccgatgcagcagatgtcgcgttggtaggtgcgagtgagattatgtgccgacctcgatacggaggagggtagctgctggagctggaggctatcagcaatctcctactctggttaggacggtccatttttcagatttgggtgagataccatggctagtgtgtaaaccatgtcccgtttgtttgggcaaattttcgtgtttaatgagttgtgcatttttcacaacttctgttatacctcttacggctagatgccgaaattagatatcctaataatttattttaattgactacaatagtatgtgcacttgtattttatttagaaatgagacgagagcaacgagtgtagaggctcaacttatcctccgggtgctttgtgcctattgagtatcaaatttggcactttccctactattttttttatctcttcggctctacatcgtttgaaagcgttttg

SEQ ID NO: 80931 - DNA, 2096 bp, Zea Mays
gactaaacagtgtctcattggctttctcctccccctctctgctatcctccattgcaagttgtttggagcttaagcgaacagcatatcccggtgagtttggggcagatcctggcgaccgagcatcgattttcgatgagaacccgacgaatctcatcggtcgcagccgctgcgcgctaggtgggaactcgagcaaggcgagatcgaggcgggatccagaggctaagctacggtttccgacgcggatccggcggttctcggtcgctgcgcgccagatgagaatcgccgttgttgctcggtaaaatgtcgggcctaatgtgggagcatgggagaagatgctataactattttatggtgtcacaaacttcgattcatgtgcttctgcagccttcccgttgtgttccatttgcttcatcattaaatatttatttattgctcatattatctagttaattttattttataactgtataggaatatgtatatggaatggacccacaccacatctagatgcttcgaacttgtctggatattatgactccggctgaatatatgtattattagtgtccggcacttgaagcgacaaccactacgaccagatcaaagtcctgaggatttgcaacgttggaagccggctcccggacgcgcaactgcgcggacttttcctgcaagcttcttctgcaaccgaagcaactcttcaatccagaagtggctgctccagggcggcatggcgccaaaagtctccagcccgttcctcctcggcctaccctgggtcgtcgcgcacgttggatccatcaaatcttccaatgcacgctgcgccggcccgggtcgtcacgcaagaggtaatgcgacgccgacgcgcacccattaaaagcaacccgtcacttagcgtctgagcgtgcgtgccagagcagagctcccttcttgctagcgagtagcgactagcgagaggtcgccggcgcggcaaaaatccgaaaggcgagccgagatggcggggtcgcagtcgcaggcgatgctggagaagatggagctgcggcagagctaccgcaacgtctggcacaccgacctcaccaacgccgtcgccgcggacctcccgtcggcccgtgcgtgtcctacatgctgcgcagacgcgcgctctacaatgacatgtcaaggtacgtgtgctgcgccgggtacatgccgtgcagcggcaagtgcggcgagagccagtgcccggaagtatgccttgcaaccgaggtgttctgctgcttcggcaactcggtagcttcaacccggttcctgctgcaggacgagttcaacatccagacaacgcagtgcgacaactgcatcatcgtgcgtagtcgcggccggccacgcgcgcctcgatccgtctcctgatgacttgatctgatcttccgaatcagctgactcgactgacgctactcatcttcctcgtcgttgcaggccttcatgttcttcctgcagcagctggcctgcatctgctccctggtcgcctgcatcgtcggcaacagcgagctctcggaggccgcgcacgtcatctcctgcatgtcgaatctggtctactggacggtttgctcgtgcatgcagacgcagcacaaggtggagatggacaagagggacggcacgttgaacaccatgtctgcgcctccgatgcagcagatgtcgcgttggtaggtgcgagtgagattatgtgccgacctcgatacggaggagggtagctgctggagctggaggctatcagcaatctcctactctggttaggacggtccatttttcagatttgggtgagataccatggctagtgtgtaaaccatgtcccgtttgtttgggcaaattttcgtgtttaatgagttgtgcatttttcacaacttctgttatacctcttacggctagatgccgaaattagatatcctaataatttattttaattgactacaatagtatgtgcacttgtattttatttagaaatgagacgagagcaacgagtgtagaggctcaacttatcctccgggtgctttgtgcctattgagtatcaaatttggcactttccctactattttttttatctcttcggctctacatcgtttgaaagcgttttg

SEQ ID NO: 80932 - DNA, 2792 bp, Zea Mays
gactaaacagtgtctcattggctttctcctccccctctctgctatcctccattgcaagttgtttggagcttaagcgaacagcatatcccggtgagtttggggcagatcctggcgaccgagcatcgattttcgatgagaacccgacgaatctcatcggtcgcagccgctgcgcgctaggtgggaactcgagcaaggcgagatcgaggcgggatccagaggctaagctacggtttccgacgcggatccggcggttctcggtcgctgcgcgccagatgagaatcgccgttgttgctcggtaaccgtcgtgttgtgtgtagaatctggttgtttgtcgacgagaacctctaccgcagtgaagagagaaaggttgttttaggcattgttgtgtgatgtaatagcatatttataagtttattttgtgtgctatatattttagttagatgcttttttgacagcactgtttagtgaagaaggtttgttatgttagtgaggcatgcatggtttattccgtgtgcatatatgattacacagtatcgtacgagtaatctagtgtatgataaatggtttattgtgtcagtgaactaggcatggatggttaagcaacgagtagatcgagcaaggttatatgttttttttgttagttacaagtttctggttgatatatttctttgctggtacttcttggttgttagttcaaagcttgaaactaattgttacatgaccgagaaacttaatagttggtattattgtcgtaggtgctatcgttacattacatggacaattgatactttttagttgatatttttaatgtagtttataattatttgcattgttgtaggtaaaatgtcgggcctaatgtgggagcatgggagaagatgctataactattttatggtgtcacaaacttcgattcatgaatatgtatatggaatggacccacaccacatctagatgcttcgaacttgtctggatattatgactccggctgaatatatggtacatacatgatttccggtttgtgtgaagaattatgttatgaaaatctttacatgcaggggcggagggctccatgtggcgaggtatggcccaagccataccttggcccagcccattagcatctaggtaagtcgaagacctacgtctgtgtcaagcatctgtgcatctgtttcttcaccgccgctcgcaaggcagtccgcacgccgctcatcttctctacgtagctgcgctcaccggctcgcatgctcgcctcgccatcgctcgcctcgagtccgcctctgcgcacacgccatcgttcgactctacacgctcgccgtcgctcggctcgcgcgcacacgctcgaatccgcctctgcgcgctgctctgtgcgccgagtgcctacgcggccgctgccacgactccatagacggcagtattattagtgtccggcacttgaagcgacaaccactacgaccagatcaaagtcctgaggatttgcaacgttggaagccggctcccggacgcgcaactgcgcggacttttcctgcaagcttcttctgcaaccgaagcaactcttcaatccagaagtggctgctccagggcggcatggcgccaaaagtctccagcccgttcctcctcggcctaccctgggtcgtcgcgcacgttggatccatcaaatcttccaatgcacgctgcgccggcccgggtcgtcacgcaagagagctcccttcttgctagcgagtagcgactagcgagaggtcgccggcgcggcaaaaatccgaaaggcgagccgagatggcggggtcgcagtcgcaggcgatgctggagaagatggagctgcggcagagctaccgcaacgtctggcacaccgacctcaccaacgccgtcgccgcggacctcccgtggtgctgcctgtctctgtggtgcggcccgtgcgtgtcctacatgctgcgcagacgcgcgctctacaatgacatgtcaaggtacgtgtgctgcgccgggtacatgccgtgcagcggcaagtgcggcgagagccagtgcccggaagtatgccttgcaaccgaggtgttctgctgcttcggcaactcggtagcttcaacccggttcctgctgcaggacgagttcaacatccagacaacgcagtgcgacaactgcatcatcgccttcatgttcttcctgcagcagctggcctgcatctgctccctggtcgcctgcatcgtcggcaacagcgagctctcggaggccgcgcacgtcatctcctgcatgtcgaatctggtctactggacggtttgctcgtgcatgcagacgcagcacaaggtggagatggacaagagggacggcacgttgaacaccatgtctgcgcctccgatgcagcagatgtcgcgttggtaggtgcgagtgagattatgtgccgacctcgatacggaggagggtagctgctggagctggaggctatcagcaatctcctactctggttaggacggtccatttttcagatttgggtgagataccatggctagtgtgtaaaccatgtcccgtttgtttgggcaaattttcgtgtttaatgagttgtgcatttttcacaacttctgttatacctcttacggctagatgccgaaattagatatcctaataatttattttaattgactacaatagtatgtgcacttgtattttatttagaaatgagacgagagcaacgagtgtagaggctcaacttatcctccgggtgctttgtgcctattgagtatcaaatttggcactttccctactattttttttatctcttcggctctacatcgtttgaaagcgttttg

SEQ ID NO: 80933 - DNA, 2079 bp, Zea Mays
gactaaacagtgtctcattggctttctcctccccctctctgctatcctccattgcaagttgtttggagcttaagcgaacagcatatcccggtgggaactcgagcaaggcgagatcgaggcgggatccagaggctaagctacggtttccgacgcggatccggcggttctcggtcgctgcgcgccagatgagaatcgccgttgttgctcggtaaaatgtcgggcctaatgtgggagcatgggagaagatgctataactattttatggtgtcacaaacttcgattcatgaatatgtatatggaatggacccacaccacatctagatgcttcgaacttgtctggatattatgactccggctgaatatatggtacatacatgatttccggtttgtgtgaagaattatgttatgaaaatctttacatgcaggggcggagggctccatgtggcgaggtatggcccaagccataccttggcccagcccattagcatctaggtaagtcgaagacctacgtctgtgtcaagcatctgtgcatctgtttcttcaccgccgctcgcaaggcagtccgcacgccgctcatcttctctacgtagctgcgctcaccggctcgcatgctcgcctcgccatcgctcgcctcgagtccgcctctgcgcacacgccatcgttcgactctacacgctcgccgtcgctcggctcgcgcgcacacgctcgaatccgcctctgcgcgctgctctgtgcgccgagtgcctacgcggccgctgccacgactccatagacggcagtattattagtgtccggcacttgaagcgacaaccactacgaccagatcaaagtcctgaggatttgcaacgttggaagccggctcccggacgcgcaactgcgcggacttttcctgcaagcttcttctgcaaccgaagcaactcttcaatccagaagtggctgctccagggcggcatggcgccaaaagtctccagcccgttcctcctcggcctaccctgggtcgtcgcgcacgttggatccatcaaatcttccaatgcacgctgcgccggcccgggtcgtcacgcaagaggtaatgcgacgccgacgcgcacccattaaaagcaacccgtcacttagcgtctgagcgtgcgtgccagagcagagctcccttcttgctagcgagtagcgactagcgagaggtcgccggcgcggcaaaaatccgaaaggcgagccgagatggcggggtcgcagtcgcaggcgatgctggagaagatggagctgcggcagagctaccgcaacgtctggcacaccgacctcaccaacgccgtcgccgcggacctcccgtgccttcatgttcttcctgcagcagctggcctgcatctgctccctggtcgcctgcatcgtcggcaacagcgagctctcggaggccgcgcacgtcatctcctgcatgtcgaatctggtctactggacggtttgctcgtgcatgcaggtaaattgcacatccacttttcatggtattcaggtaattcccccttcctgatttgacgctagaaggctcacaatctggcattgccatctctgcatacttcagacgcagcacaaggtggagatggacaagagggacggcacgttgaacaccatgtctgcgcctccgatgcagcagatgtcgcgttggtaggtgcgagtgagattatgtgccgacctcgatacggaggagggtagctgctggagctggaggctatcagcaatctcctactctggttaggacggtccatttttcagatttgggtgagataccatggctagtgtgtaaaccatgtcccgtttgtttgggcaaattttcgtgtttaatgagttgtgcatttttcacaacttctgttatacctcttacggctagatgccgaaattagatatcctaataatttattttaattgactacaatagtatgtgcacttgtattttatttagaaatgagacgagagcaacgagtgtagaggctcaacttatcctccgggtgctttgtgcctattgagtatcaaatttggcactttccctactattttttttatctcttcggctctacatcgtttgaaagcgttttg

SEQ ID NO: 80934 - DNA, 2214 bp, Zea Mays
gactaaacagtgtctcattggctttctcctccccctctctgctatcctccattgcaagttgtttggagcttaagcgaacagcatatcccggtgggaactcgagcaaggcgagatcgaggcgggatccagaggctaagctacggtttccgacgcggatccggcggttctcggtcgctgcgcgccagatgagaatcgccgttgttgctcggtaaccgtcgtgttgtgtgtagaatctggttgtttgtcgacgagaacctctaccgcagtgaagagagaaaggtaaaatgtcgggcctaatgtgggagcatgggagaagatgctataactattttatggtgtcacaaacttcgattcatgaatatgtatatggaatggacccacaccacatctagatgcttcgaacttgtctggatattatgactccggctgaatatatggtacatacatgatttccggtttgtgtgaagaattatgttatgaaaatctttacatgcaggggcggagggctccatgtggcgaggtatggcccaagccataccttggcccagcccattagcatctaggtaagtcgaagacctacgtctgtgtcaagcatctgtgcatctgtttcttcaccgccgctcgcaaggcagtccgcacgccgctcatcttctctacgtagctgcgctcaccggctcgcatgctcgcctcgccatcgctcgcctcgagtccgcctctgcgcacacgccatcgttcgactctacacgctcgccgtcgctcggctcgcgcgcacacgctcgaatccgcctctgcgcgctgctctgtgcgccgagtgcctacgcggccgctgccacgactccatagacggcagtattattagtgtccggcacttgaagcgacaaccactacgaccagatcaaagtcctgaggatttgcaacgttggaagccggctcccggacgcgcaactgcgcggacttttcctgcaagcttcttctgcaaccgaagcaactcttcaatccagaagtggctgctccagggcggcatggcgccaaaagtctccagcccgttcctcctcggcctaccctgggtcgtcgcgcacgttggatccatcaaatcttccaatgcacgctgcgccggcccgggtcgtcacgcaagagagctcccttcttgctagcgagtagcgactagcgagaggtcgccggcgcggcaaaaatccgaaaggcgagccgagatggcggggtcgcagtcgcaggcgatgctggagaagatggagctgcggcagagctaccgcaacgtctggcacaccgacctcaccaacgccgtcgccgcggacctcccgtggtgctgcctgtctctgtggtgcggcccgtgcgtgtcctacatgctgcgcagacgcgcgctctacaatgacatgtcaaggtacgtgtgctgcgccgggtacatgccgtgcagcggcaagtgcggcgagagccagtgcccggaagtatgccttgcaaccgaggtgttctgctgcttcggcaactcggtagcttcaacccggttcctgctgcaggacgagttcaacatccagacaacgcagccttcatgttcttcctgcagcagctggcctgcatctgctccctggtcgcctgcatcgtcggcaacagcgagctctcggaggccgcgcacgtcatctcctgcatgtcgaatctggtctactggacggtttgctcgtgcatgcagacgcagcacaaggtggagatggacaagagggacggcacgttgaacaccatgtctgcgcctccgatgcagcagatgtcgcgttggtaggtgcgagtgagattatgtgccgacctcgatacggaggagggtagctgctggagctggaggctatcagcaatctcctactctggttaggacggtccatttttcagatttgggtgagataccatggctagtgtgtaaaccatgtcccgtttgtttgggcaaattttcgtgtttaatgagttgtgcatttttcacaacttctgttatacctcttacggctagatgccgaaattagatatcctaataatttattttaattgactacaatagtatgtgcacttgtattttatttagaaatgagacgagagcaacgagtgtagaggctcaacttatcctccgggtgctttgtgcctattgagtatcaaatttggcactttccctactattttttttatctcttcggctctacatcgtttgaaagcgttttg

SEQ ID NO: 80935 - DNA, 1416 bp, Zea Mays
cgaggataaaccgctcgcgcaatcgcgccagccttctttatttggcctctcacccctggtcccctctctcttcttttttaccctcgctggcgggtcgcctcacccgttcactccgtccatgacgaaacggcaagcgtcgccctctccaccgccaccagtccacctcctcgtcctcctccggtcacgcacgcagctagcttacccgccccgccactataaaaatccacctccaccccaccgcgcgtctacagttccacacacgcgtgcacgggcgggcaagcaccagaaaggaaaggcggaggccgcgcggcgggcgccagctgcagccaagagcccactagtagtagtagtagctagttcaccaccgcctgcttgcctcctttactttgccatatttgctagcgtttcctggattggggacgcttccgtttcgggaagccgtgaagggatcggccacgacgatggtgcgggggaagacggagctgaagcggatagagaacgcgacgagccggcaggtgaccttctcgaagcgccgcaacgggctgctcaagaaggccttcgagctctccgtgctctgcgatgctgaggtcgggctcgtcgtcttctccccgcgcggcaagctctacgagttcgccagcgccgccagcctccagaaaacaattgaccgctacaggacatacacaagggaaaatgtcaataacaagactgttcaacaagatatacagcaagtcaaagcagatgccgtaagcttggcaagtagactcgaagccctagaaaagaccaaacgaatgtttctgggtgaaaatttagaagaatgctccattgaagaactgcataatctggaggttaaactggcgaagagccttcacgtcatcagagggaagaagacacaactgctggagcagcagatatccaagctgaaggagaaggagaggaccctgctccaagacaacaaagagttgcgggataagcgcaacctccagtctccaccggaggcgccaccggacctgaaccgctgtgtccctccttggccgcgtagcctgccggcaccgagcaatgacatggacgtggagacggagctgtacataggattacccggcagggagcgctcctccaaccgggactctgattgaaccacggattttcagttcgatcggctaaaaggaataagctccctgaaattaaagcatcgaagggcacacgtcaatggttttatttgcaacttttgtatgcaaacttgtacttgaaaagtaaaaaaaataaaaataaatctgtagtatgtggatgcaagaaacggctggttagctagctgcaagccttctggggcctgaaaatgaaatccacccatggatacacccaaccaagcttgatgcgctacttttcttatacgcagctgccgaagtctttagagttcac

SEQ ID NO: 80936 - DNA, 867 bp, Zea Mays
ctgctcatgggccatggctacaaacggagaagcgtcgtcatgtgacttctggtcgcttggcttgttcctccggcctgccaaagccacttttttcttgcctccagaaaacaattgaccgctacaggacatacacaagggaaaatgtcaataacaagactgttcaacaagatatacagcaagtcaaagcagatgccgtaagcttggcaagtagactcgaagccctagaaaagaccaaacgaatgtttctgggtgaaaatttagaagaatgctccattgaagaactgcataatctggaggttaaactggcgaagagccttcacgtcatcagagggaagaagacacaactgctggagcagcagatatccaagctgaaggagaaggagaggaccctgctccaagacaacaaagagttgcgggataagcgcaacctccagtctccaccggaggcgccaccggacctgaaccgctgtgtccctccttggccgcgtagcctgccggcaccgagcaatgacatggacgtggagacggagctgtacataggattacccggcagggagcgctcctccaaccgggactctgattgaaccacggattttcagttcgatcggctaaaaggaataagctccctgaaattaaagcatcgaagggcacacgtcaatggttttatttgcaacttttgtatgcaaacttgtacttgaaaagtaaaaaaaataaaaataaatctgtagtatgtggatgcaagaaacggctggttagctagctgcaagccttctggggcctgaaaatgaaatccacccatggatacacccaaccaagcttgatgcgctacttttcttatacgcagctgccgaagtctttagagttcac

SEQ ID NO: 80937 - DNA, 859 bp, Zea Mays
tatttcggaaacaatcctttcttgtagtggtggtgccgattgacttttcttgcttgcgttatccaatcacatcatcagttccggacgagcctccagaaaacaattgaccgctacaggacatacacaagggaaaatgtcaataacaagactgttcaacaagatatacagcaagtcaaagcagatgccgtaagcttggcaagtagactcgaagccctagaaaagaccaaacgaatgtttctgggtgaaaatttagaagaatgctccattgaagaactgcataatctggaggttaaactggcgaagagccttcacgtcatcagagggaagaagacacaactgctggagcagcagatatccaagctgaaggagaaggagaggaccctgctccaagacaacaaagagttgcgggataagcgcaacctccagtctccaccggaggcgccaccggacctgaaccgctgtgtccctccttggccgcgtagcctgccggcaccgagcaatgacatggacgtggagacggagctgtacataggattacccggcagggagcgctcctccaaccgggactctgattgaaccacggattttcagttcgatcggctaaaaggaataagctccctgaaattaaagcatcgaagggcacacgtcaatggttttatttgcaacttttgtatgcaaacttgtacttgaaaagtaaaaaaaataaaaataaatctgtagtatgtggatgcaagaaacggctggttagctagctgcaagccttctggggcctgaaaatgaaatccacccatggatacacccaaccaagcttgatgcgctacttttcttatacgcagctgccgaagtctttagagttcac

SEQ ID NO: 80938 - DNA, 794 bp, Zea Mays
cagaagcttaaagccacagtttcgcctccagaaaacaattgaccgctacaggacatacacaagggaaaatgtcaataacaagactgttcaacaagatatacagcaagtcaaagcagatgccgtaagcttggcaagtagactcgaagccctagaaaagaccaaacgaatgtttctgggtgaaaatttagaagaatgctccattgaagaactgcataatctggaggttaaactggcgaagagccttcacgtcatcagagggaagaagacacaactgctggagcagcagatatccaagctgaaggagaaggagaggaccctgctccaagacaacaaagagttgcgggataagcgcaacctccagtctccaccggaggcgccaccggacctgaaccgctgtgtccctccttggccgcgtagcctgccggcaccgagcaatgacatggacgtggagacggagctgtacataggattacccggcagggagcgctcctccaaccgggactctgattgaaccacggattttcagttcgatcggctaaaaggaataagctccctgaaattaaagcatcgaagggcacacgtcaatggttttatttgcaacttttgtatgcaaacttgtacttgaaaagtaaaaaaaataaaaataaatctgtagtatgtggatgcaagaaacggctggttagctagctgcaagccttctggggcctgaaaatgaaatccacccatggatacacccaaccaagcttgatgcgctacttttcttatacgcagctgccgaagtctttagagttcac

SEQ ID NO: 80939 - DNA, 1247 bp, Zea Mays
cgctaatttgcattgctaaccgttgcaccggccatctccatctctcatagcctcacagtcacaagggtgaggagtggagagacgtcggtgagtttcaccatatggcggtggggaagggaggagggctgctggtcctcgtcgttgtaggtctgctcctgcacggcacccgtgtcgccgacgcgcagtctctccgggttgggtactacagccagacgtgcggcagcgccgagtccatcgtcgccgacgaggtccagaaggcgtcgtacagggataggggcgtcctggccagcctcatccggctgcacttccacgactgcttcgtcaatggctgcgacgggtcggtgctgttggaggccagtgaccggcaggcggagaagaacgccaagcccaacctgagcctgcgagggttcgacgtcatcgagaggatcaagcagaggctggaggccgcgtgcgcgctgacggtctcgtgcgcggacattgtggccttcgccgccagggacagcgttaagctgagcggtggcctttggtacgccgttcccggcgggcggcaggacggcacggtgtcgcgggcgagcatgaccggcgacctcccgcctccgaaccagcgcaacgtggacctgctcgcgcagtacttctaccgcaagggcctgacgctggacgaaatggtcctcctctcagcgcgcacacggtgggcatcgcgcactgcagctcgttcgactaccggctgacgagcgaccaggacaagggcatggacccggccttccgcaacagcctacggagccagtgccagtacaaccccagcaactacgtgcccttggacgccggcagccagtacgcgttcgacaccggctacttctccaacgtgctggccaaccgcaccgtgctcgactccgacgccgccctcgcctcgccgcgcacagcagacaaggtcaagcagtggaagaacaacccggactggttcaagaacagcttcgcggccgccatggtcaagatgggcagcatccgcggcagctaccccggcaaggtccgactcaattgcaccagggtcaggatgtgagggccattgccgtagacatgaggagccgttacgtcgatatatagcactcaccattcaatccaattactccttccgtagtgatatattttcttgtgttcttgcatttctaattagtgcgtgtaccttctatatatatatatatatctacgtatatgtgcaatactgaaatttatcacatgttagcaaccag

SEQ ID NO: 80940 - DNA, 3972 bp, Zea Mays
agcacccctttgcgcgagcctgtccatgcaccgtcccccgtgatcccactcccccacgtcttgcaacactgtagacaagttccacggagggaacgcccgatcctgcacacgtgtccccgccagcctcctacggatccggtcactgcccgatgggcgtcacccccggcgctccaccccgcgtcgcggacccccgacccgccccccgcctcgtcctgttcgcgtccccctttccccgcgtgtgcgttggccggctggttccggatgagggggttgctgtcggtggaggccgctggcgcggcgtcgtcgtcggcctcggcctcggtgctcaacggcgccgtggactggtggcgcgacgtcaacgagtcgccgctgtggcaggaccgcatcttccacgcgctcgccgtgctctacggcatcgtctccgccgtcgcgctggtccaattgatcagaatcgagtgcagggtgccagagtatgggtggacgacgcagaaagtgttccatttcctaaacttcctcgtgaacggcgtgaggtctgccgtgttcgtgctgcggcggaatgtgcaactcgtagagcctgagataatacagcatgtgcttctagatatgcctgggcttgcattcttcacaacatatgcacttctagtgctcttctgggcagagatttattatcaggcacgtgcaatgtccactgatgggcttagaccaactttctattggatcaatagcgtggtttatgcaattcaggtgataaacttgtcatttaactaataagtcaggttggacttcagaacgatatatgctgcggtaatttaatactgtatatatcaatgtgcactttatagtgttgagctgtgtacattgatcacatctaaagttttaatagtctatgaaagagacaggcaggcaccaggctagtcctaggattcccgagcatccttccaggcttccacatgcttgtctatcatggttattagcctgcagaactaccaaatccttttggacgccaaggaccgtgataccttcctattaccaatgaggaaaaatgtcatggaaacatatttagtgcatattaactgtcattagggtacgcacaattgataaattctaggccacaaagctaagtagtacatgccatacttgtcaactctgatttcttggtgaaaattggaaaaagccacttttttctctgaatacacaggagagctacatatcattatattaagaagaaattagggaagggtaaagaccctattacatagaggacacacacaactgtcacctgatacaatcaaacactaccacgaccaacacactaaaagcctaaccaccgacctggagagaggagagagctttagcgtcggccatagaccagtacacaagcccctccttagccattctaacagcagaaataacactaggacgacacttatcaaacacacacttattcctatgcttccaaatgatccaaacgcccaagatgaccatggagttgagacagttcttcaggtggactgcaactctagaacaactattcttccaccaggtttcgaaggagagatcaacttgttggggagacagttcctgcagatttgctagcgtgaggaactcaaaccaaatttttttggcaaagacaaaccaccagcaagtgattgatggtttccgaagcttgatcacaaagaggatatcgctctggatgagacagacctctcatagctagcctatctgcagtccaacatctgttatgctcaacaagccaaatgaagaatctacattttccaggagcccaagtattccacaccctcctagccggttcaaaatccactgacccaaagaacatagcacgataggccgagctagcataagatccggaggtgttaaacctccatgtgtgcttatcttgtaccccatgatgaagaactatattagagagtgattcgcattgatccaagaattctgccaacactgttacaatgagagcaccttttaaatcagcgacccactgaaaattgggtagggcctcactaaccaaccttttactaactagtcgggtaggcaccaactgaaacaatgaagggccacatctttaacacacttgccttacagaaaccgatctttccaaaatagggtgttagaaccatccccaatttgagtaaggactgccacactaaacagatttcgaacctccttacaagcctgaataggataatcagtccatggcttgctcaagtcgctttttggagccacaaccagcaaactctcaaagcctagccatgaaatcgaaggtcaatcaagcctaaactgcataggttttttggccgagtcaccttaggtcaagctagaaggcaatgtcctcctctggcatttttttcttcctttccacaagaaccctcttcgaagcttgtcaatagctttgatggcccacgtaggaaggtctagagcggtagctgcataaatcagttttgatgtgatcacaaactgaacatgaatagacctcccaacccttgacataagctccgctttccagccaggcaagagagaggctacccggtcaacaatagcttgaacttggtctctgggtagcttcttaattgagaggcaaaccaagatatttgcaaggaaaactcaaaacggaacatggcaacaactcttggacacatgccagattaatagattatcatcattacagcggatagggagcacattactttttttgcacgttggtcttaaggcccgaggccacgccaaagagagtaagaatgtccaaggctaagttgatatccgaggcaactggctttagaaacaacactgcatcatctgcatagagggagagccgatgttgcatactcctggaagacaaaggctgcaagcctgcaacagcctctctgctgacttgctgaggcatgcatgatcagcctgttgaggacattcacaaccaagataaaaagcatgaaaatagtcacactgggcttgttgtgaatgcatttttatttgatacacgtaaaataggaacattctggtttctggactcatttgacaccaatgaatttcagataatcctatggttggttttgtggtggaaaccagttcgaattatggtcatcttgtcaaagatgttctttgcaggtgtatcactatttgcagccctcgggtttgttctctatggaggaaggttgttcatgatgttgcagcgttttcctgtagaatcaaaaggaagacgaaagaaattgcaggaggttgggtatgtgactaccatatgcttttcttgtttcttgatcagatgcgtcatgatgtgccttaatgcgtttgataaagcagcagatcttgatgttctgaaccatccaatcctgaacttcttctattacctgctggttgagatagtgccttcagctctggtgctcttcattctacggaaactgcctccaaagcgtgggatcacacaataccacccgatccattagagagcaggccttgggaacaggcaaaggttttctggtggatagtgttacacaacgtggtaaatacagaagggagagtgaaaagtaccactcgagctttgcccagctttttatacggaagtctttagaatcccaggttgaaattgtgtgtaaaattgcgatctctttcactaagatttagaaaatgtaacttatataactttgttattctcagtgcgtatcatctgttcacattgcattaattgtttgcatgtttcttttgggtctctgcctcaactttgctgaacaagagcagctaatgctcctggagtgcatggatgatgtgattcgctcaccatccgtatgtttggttgttaggacgagtagagcctggttcaagaccatatgcaggttgagtatatgcagactgagttgatgtaattatacagtagcatgcgtgtttggttggctgattctaattagccaggatcaacacaacctatgtttggtttacaaaaatatgcggactgagttgatg

SEQ ID NO: 80941 - DNA, 4223 bp, Zea Mays
agcacccctttgcgcgagcctgtccatgcaccgtcccccgtgatcccactcccccacgtcttgcaacactgtagacaagttccacggagggaacgcccgatcctgcacacgtgtccccgccagcctcctacggatccggtcactgcccgatgggcgtcacccccggcgctccaccccgcgtcgcggacccccgacccgccccccgcctcgtcctgttcgcgtccccctttccccgcgtgtgcgttggccggctggttccggatgagggggttgctgtcggtggaggccgctggcgcggcgtcgtcgtcggcctcggcctcggtgctcaacggcgccgtggactggtggcgcgacgtcaacgagtcgccgctgtggcaggaccgcatcttccacgcgctcgccgtgctctacggcatcgtctccgccgtcgcgctggtccaattgatcagaatcgagtgcagggtgccagagtatgggtggacgacgcagaaagtgttccatttcctaaacttcctcgtgaacggcgtgaggtctgccgtgttcgtgctgcggcggaatgtgcaactcgtagagcctgagataatacagcatgtgcttctagatatgcctgggcttgcattcttcacaacatatgcacttctagtgctcttctgggcagagatttattatcaggcacgtgcaatgtccactgatgggcttagaccaactttctattggatcaatagcgtggtttatgcaattcaggtgataaacttgtcatttaactaataagtcaggttggacttcagaacgatatatgctgcggtaatttaatactgtatatatcaatgtgcactttatagtgttgagctgtgtacattgatcacatctaaagttttaatagtctatgaaagagacaggcaggcaccaggctagtcctaggattcccgagcatccttccaggcttccacatgcttgtctatcatggttattagcctgcagaactaccaaatccttttggacgccaaggaccgtgataccttcctattaccaatgaggaaaaatgtcatggaaacatatttagtgcatattaactgtcattagggtacgcacaattgataaattctaggccacaaagctaagtagtacatgccatacttgtcaactctgatttcttggtgaaaattggaaaaagccacttttttctctgaatacacaggagagctacatatcattatattaagaagaaattagggaagggtaaagaccctattacatagaggacacacacaactgtcacctgatacaatcaaacactaccacgaccaacacactaaaagcctaaccaccgacctggagagaggagagagctttagcgtcggccatagaccagtacacaagcccctccttagccattctaacagcagaaataacactaggacgacacttatcaaacacacacttattcctatgcttccaaatgatccaaacgcccaagatgaccatggagttgagacagttcttcaggtggactgcaactctagaacaactattcttccaccaggtttcgaaggagagatcaacttgttggggagacagttcctgcagatttgctagcgtgaggaactcaaaccaaatttttttggcaaagacaaaccaccagcaagtgattgatggtttccgaagcttgatcacaaagaggatatcgctctggatgagacagacctctcatagctagcctatctgcagtccaacatctgttatgctcaacaagccaaatgaagaatctacattttccaggagcccaagtattccacaccctcctagccggttcaaaatccactgacccaaagaacatagcacgataggccgagctagcataagatccggaggtgttaaacctccatgtgtgcttatcttgtaccccatgatgaagaactatattagagagtgattcgcattgatccaagaattctgccaacactgttacaatgagagcaccttttaaatcagcgacccactgaaaattgggtagggcctcactaaccaaccttttactaactagtcgggtaggcaccaactgaaacaatgaagggccacatctttaacacacttgccttacagaaaccgatctttccaaaatagggtgttagaaccatccccaatttgagtaaggactgccacactaaacagatttcgaacctccttacaagcctgaataggataatcagtccatggcttgctcaagtcgctttttggagccacaaccagcaaactctcaaagcctagccatgaaatcgaaggtcaatcaagcctaaactgcataggttttttggccgagtcaccttaggtcaagctagaaggcaatgtcctcctctggcatttttttcttcctttccacaagaaccctcttcgaagcttgtcaatagctttgatggcccacgtaggaaggtctagagcggtagctgcataaatcagttttgatgtgatcacaaactgaacatgaatagacctcccaacccttgacataagctccgctttccagccaggcaagagagaggctacccggtcaacaatagcttgaacttggtctctgggtagcttcttaattgagaggcaaaccaagatatttgcaaggaaaactcaaaacggaacatggcaacaactcttggacacatgccagattaatagattatcatcattacagcggatagggagcacattactttttttgcacgttggtcttaaggcccgaggccacgccaaagagagtaagaatgtccaaggctaagttgatatccgaggcaactggctttagaaacaacactgcatcatctgcatagagggagagccgatgttgcatactcctggaagacaaaggctgcaagcctgcaacagcctctctgctgacttgctgaggcatgcatgatcagcctgttgaggacattcacaaccaagataaaaagcatgaaaatagtcacactgggcttgttgtgaatgcatttttatttgatacacgtaaaataggaacattctggtttctggactcatttgacaccaatgaatttcagataatcctatggttggttttgtggtggaaaccagttcgaattatggtcatcttgtcaaagatgttctttgcaggtgtatcactatttgcagccctcgggtttgttctctatggaggaagtgggtcttactatacactgtcctgatagagcatatcaaatgccttcttttgcttagatggtagtagagttctgacccaatttccactaaaagatccagagcaagacttgcattctgtaaccgccattttacaagcagaatcaggatacgtagaagtggttttctacacttatcatgactcataaatatccattgctatactaggatgcgagtgagatctccccagcgcataacttatacccttgcttcttggttgttcatgatgttgcagcgttttcctgtagaatcaaaaggaagacgaaagaaattgcaggaggttgggtatgtgactaccatatgcttttcttgtttcttgatcagatgcgtcatgatgtgccttaatgcgtttgataaagcagcagatcttgatgttctgaaccatccaatcctgaacttcttctattacctgctggttgagatagtgccttcagctctggtgctcttcattctacggaaactgcctccaaagcgtgggatcacacaataccacccgatccattagagagcaggccttgggaacaggcaaaggttttctggtggatagtgttacacaacgtggtaaatacagaagggagagtgaaaagtaccactcgagctttgcccagctttttatacggaagtctttagaatcccaggttgaaattgtgtgtaaaattgcgatctctttcactaagatttagaaaatgtaacttatataactttgttattctcagtgcgtatcatctgttcacattgcattaattgtttgcatgtttcttttgggtctctgcctcaactttgctgaacaagagcagctaatgctcctggagtgcatggatgatgtgattcgctcaccatccgtatgtttggttgttaggacgagtagagcctggttcaagaccatatgcaggttgagtatatgcagactgagttgatgtaattatacagtagcatgcgtgtttggttggctgattctaattagccaggatcaacacaacctatgtttggtttacaaaaatatgcggactgagttgatg

SEQ ID NO: 80942 - DNA, 1975 bp, Zea Mays
gtgatcccactcccccacgtcttgcaacactgtagacaagttccacggagggaacgcccgatcctgcacacgtgtccccgccagcctcctacggatccggtcactgcccgatgggcgtcacccccggcgctccaccccgcgtcgcggacccccgacccgccccccgcctcgtcctgttcgcgtccccctttccccgcgtgtgcgttggccggctggttccggatgagggggttgctgtcggtggaggccgctggcgcggcgtcgtcgtcggcctcggcctcggtgctcaacggcgccgtggactggtggcgcgacgtcaacgagtcgccgctgtggcaggaccgcatcttccacgcgctcgccgtgctctacggcatcgtctccgccgtcgcgctggtccaattgatcagaatcgagtgcagggtgccagagtatgggtggacgacgcagaaagtgttccatttcctaaacttcctcgtgaacggcgtgaggtctgccgtgttcgtgctgcggcggaatgtgcaactcgtagagcctgagataatacagcatgtgcttctagatatgcctgggcttgcattcttcacaacatatgcacttctagtgctcttctgggcagagatttattatcaggcacgtgcaatgtccactgatgggcttagaccaactttctattggatcaatagcgtggtttatgcaattcagataatcctatggttggttttgtggtggaaaccagttcgaattatggtcatcttgtcaaagatgttctttgcaggtgtatcactatttgcagccctcgggtttgttctctatggaggaagtgggtcttactatacactgtcctgatagagcatatcaaatgccttcttttgcttagatggtagtagagttctgacccaatttccactaaaagatccagagcaagacttgcattctgtaaccgccattttacaagcagaatcaggatacgtagaagtggttttctacacttatcatgactcataaatatccattgctatactaggatgcgagtgagatctccccagcgcataacttatacccttgcttcttggtttgtaggcatattttatcatcctagctatgcatgtagtacagtttaaccctttcatttattgagatgacttttgatgttctgtctgtttctgtaggttgttcatgatgttgcagcgttttcctgtagaatcaaaaggaagacgaaagaaattgcaggaggttgggtatgtgactaccatatgcttttcttgtttcttgatcagatgcgtcatgatgtgccttaatgcgtttgataaagcagcagatcttgatgttctgaaccatccaatcctgaacttcttctattacctgctggttgagatagtgccttcagctctggtgctcttcattctacggaaactgcctccaaagcgtgggatcacacaataccacccgatccattagagagcaggccttgggaacaggcaaaggttttctggtggatagtgttacacaacgtggtaaatacagaagggagagtgaaaagtaccactcgagctttgcccagctttttatacggaagtctttagaatcccaggttgaaattgtgtgtaaaattgcgatctctttcactaagatttagaaaatgtaacttatataactttgttattctcagtgcgtatcatctgttcacattgcattaattgtttgcatgtttcttttgggtctctgcctcaactttgctgaacaagagcagctaatgctcctggagtgcatggatgatgtgattcgctcaccatccgtatgtttggttgttaggacgagtagagcctggttcaagaccatatgcaggttgagtatatgcagactgagttgatgtaattatacagtagcatgcgtgtttggttggctgattctaattagccaggatcaacacaacctatgtttggtttacaaaaatatgcggactgagttgatg

SEQ ID NO: 80943 - DNA, 2892 bp, Zea Mays
ccggtcactgcccgatgggcgtcacccccggcgctccaccccgcgtcgcggacccccgacccgccccccgcctcgtcctgttcgcgtccccctttccccgcgtgtgcgttggccggctggttccggatgagggggttgctgtcggtggaggccgctggcgcggcgtcgtcgtcggcctcggcctcggtgctcaacggcgccgtggactggtggcgcgacgtcaacgagtcgccgctgtggcaggaccgcatcttccacgcgctcgccgtgctctacggcatcgtctccgccgtcgcgctggtccaattgatcagaatcgagtgcagggtgccagagtatgggtggacgacgcagaaagtgttccatttcctaaacttcctcgtgaacggcgtgaggtctgccgtgttcgtgctgcggcggaatgtgcaactcgtagagcctgagatatgcctgggcttgcattcttcacaacatatgcacttctagtgctcttctgggcagagatttattatcaggcacgtgcaatgtccactgatgggcttagaccaactttctattggatcaatagcgtggtttatgcaattcaggtgataaacttgtcatttaactaataagtcaggttggacttcagaacgatatatgctgcggtaatttaatactgtatatatcaatgtgcactttatagtgttgagctgtgtacattgatcacatctaaagttttaatagtctatgaaagagacaggcaggcaccaggctagtcctaggattcccgagcatccttccaggcttccacatgcttgtctatcatggttattagcctgcagaactaccaaatccttttggacgccaaggaccgtgataccttcctattaccaatgaggaaaaatgtcatggaaacatatttagtgcatattaactgtcattagggtacgcacaattgataaattctaggccacaaagctaagtagtacatgccatacttgtcaactctgatttcttggtgaaaattggaaaaagccacttttttctctgaatacacaggagagctacatatcattatattaagaagaaattagggaagggtaaagaccctattacatagaggacacacacaactgtcacctgatacaatcaaacactaccacgaccaacacactaaaagcctaaccaccgacctggagagaggagagagctttagcgtcggccatagaccagtacacaagcccctccttagccattctaacagcagaaataacactaggacgacacttatcaaacacacacttattcctatgcttccaaatgatccaaacgcccaagatgaccatggagttgagacagttcttcaggtggactgcaactctagaacaactattcttccaccaggtttcgaaggagagatcaacttgttggggagacagttcctgcagatttgctagcgtgaggaactcaaaccaaatttttttggcaaagacaaaccaccagcaagtgattgatggtttccgaagcttgatcacaaagaggatatcgctctggatgagacagacctctcatagctagcctatctgcagtccaacatctgttatgctcaacaagccaaatgaagaatctacattttccaggagcccaagtattccacaccctcctagccggttcaaaatccactgacccaaagaacatagcacgataggccgagctagcataagatccggaggtgttaaacctccatgtgtgcttatcttgtaccccatgatgaagaactatattagagagtgattcgcattgatccaagaattctgccaacactgttacaatgagagcaccttttaaatcagcgacccactgaaaattgggtagggcctcactaaccaaccttttactaactagtcgggtaggcaccaactgaaacaatgaagggccacatctttaacacacttgccttacagaaaccgatctttccaaaatagggtgttagaaccatccccaatttgagtaaggactgccacactaaacagatttcgaacctccttacaagcctgaataggataatcagtccatggcttgctcaagtcgctttttggagccacaaccagcaaactctcaaagcctagccatgaaatcgaaggtcaatcaagcctaaactgcataggttttttggccgagtcaccttaggtcaagctagaaggcaatgtcctcctctggcatttttttcttcctttccacaagaaccctcttcgaagcttgtcaatagctttgatggcccacgtaggaaggtctagagcggtagctgcataaatcagttttgatgtgatcacaaactgaacatgaatagacctcccaacccttgacataagctccgctttccagccaggcaagagagaggctacccggtcaacaatagcttgaacttggtctctgggtagcttcttaattgagaggcaaaccaagatatttgcaaggaaaactcaaaacggaacatggcaacaactcttggacacatgccagattaatagattatcatcattacagcggatagggagcacattactttttttgcacgttggtcttaaggcccgaggccacgccaaagagagtaagaatgtccaaggctaagttgatatccgaggcaactggctttagaaacaacactgcatcatctgcatagagggagagccgatgttgcatactcctggaagacaaaggctgcaagcctgcaacagcctctctgctgacttgctgaggcatgcatgatcagcctgttgaggacattcacaaccaagataaaaagcatgaaaatagtcacactgggcttgttgtgaatgcatttttatttgatacacgtaaaataggaacattctggtttctggactcatttgacaccaatgaatttca

SEQ ID NO: 80944 - DNA, 1870 bp, Zea Mays
ccggtcactgcccgatgggcgtcacccccggcgctccaccccgcgtcgcggacccccgacccgccccccgcctcgtcctgttcgcgtccccctttccccgcgtgtgcgttggccggctggttccggatgagggggttgctgtcggtggaggccgctggcgcggcgtcgtcgtcggcctcggcctcggtgctcaacggcgccgtggactggtggcgcgacgtcaacgagtcgccgctgtggcaggaccgcatcttccacgcgctcgccgtgctctacggcatcgtctccgccgtcgcgctggtccaattgatcagaatcgagtgcagggtgccagagtatgggtggacgacgcagaaagtgttccatttcctaaacttcctcgtgaacggcgtgaggtctgccgtgttcgtgctgcggcggaatgtgcaactcgtagagcctgagcatgtgcttctagatatgcctgggcttgcattcttcacaacatatgcacttctagtgctcttctgggcagagatttattatcaggcacgtgcaatgtccactgatgggcttagaccaactttctattggatcaatagcgtggtttatgcaattcagataatcctatggttggttttgtggtggaaaccagttcgaattatggtcatcttgtcaaagatgttctttgcaggtgtatcactatttgcagccctcgggtttgttctctatggaggaagtgggtcttactatacactgtcctgatagagcatatcaaatgccttcttttgcttagatggtagtagagttctgacccaatttccactaaaagatccagagcaagacttgcattctgtaaccgccattttacaagcagaatcaggatacgtagaagtggttttctacacttatcatgactcataaatatccattgctatactaggatgcgagtgagatctccccagcgcataacttatacccttgcttcttggtttgtaggcatattttatcatcctagctatgcatgtagtacagtttaaccctttcatttattgagatgacttttgatgttctgtctgtttctgtaggttgttcatgatgttgcagcgttttcctgtagaatcaaaaggaagacgaaagaaattgcaggaggttgggtatgtgactaccatatgcttttcttgtttcttgatcagatgcgtcatgatgtgccttaatgcgtttgataaagcagcagatcttgatgttctgaaccatccaatcctgaacttcttctattacctgctggttgagatagtgccttcagctctggtgctcttcattctacggaaactgcctccaaagcgtgggatcacacaataccacccgatccattagagagcaggccttgggaacaggcaaaggttttctggtggatagtgttacacaacgtggtaaatacagaagggagagtgaaaagtaccactcgagctttgcccagctttttatacggaagtctttagaatcccaggttgaaattgtgtgtaaaattgcgatctctttcactaagatttagaaaatgtaacttatataactttgttattctcagtgcgtatcatctgttcacattgcattaattgtttgcatgtttcttttgggtctctgcctcaactttgctgaacaagagcagctaatgctcctggagtgcatggatgatgtgattcgctcaccatccgtatgtttggttgttaggacgagtagagcctggttcaagaccatatgcaggttgagtatatgcagactgagttgatgtaattatacagtagcatgcgtgtttggttggctgattctaattagccaggatcaacacaacctatgtttggtttacaaaaatatgcggactgagttgatg

SEQ ID NO: 80945 - DNA, 387 bp, Zea Mays
ttaatttctctcttgagccaaaacaacctaacattgtggttttttgaactcataaacacttctctgttgaacccagattcaaagacttccattgcatatgatctatcctcatctgtcagcccatcaattgtatccaactcctctagacactttttaatagagaaatcttcatcatgcttcttcttttcttcaagagcttcgagcgttttggctgcggtgctcctcttgaattccacgaaactttcaatagctgctccagtttcgctttgctcttcagagaggaatgaaagtatagcagggagaagaagaaagaaaaactcttcatcgtcttcttcctcatccaacaaaagctgcctagcttggccctcccaagaacccatatctggg

SEQ ID NO: 80946 - DNA, 4204 bp, Zea Mays
gcacggttctgcctccagtccgccgcccgcgcgactgctccaacgaaggaaagtctgatcccgccatggcgccatctccacccccgcttacctctctcggccgccatcatggaaggtccgaccccgccatcgctgtccccacgcggttgctccaaggaaggaaactctgatcccgctatccccgcccccgctctctctcgccatctccgtgcggctgctccaaggaaggaaggtccgaccccgccatcgccatccccgcgtggctgccttcccctctcgccatccccgcgcggctgctccaaggaaggaaggtccgaccccgccatcgccatccccgcgcgcccggtcgagcgccaccagccgcataagtctgggctagcgccgccggccaccattggctcggtcgagcacctcatgcccacgacggtcagtcgccgccttcatggctcagagtcgtcggtccctgcccaccaaggtcaccatgggctcgacgacgatggcaacaaggtcaaggtcgtcatcacaacccaagatctagccccggctcctcgccggcacaaaccacgtgcgcgccctcgacccatggcatccccaaatcccgcccccggttcctctcccttcccgttcgcggacgacgcttccgcgcgttgacgtacgcgtccccaaatccccggttcccctcccttcctgttcgcggatggcgcttccgagccctcgacccatggcgtccccaaatcccaggttcctctcccttcccgttcgcggacggcgcttccgcgcgtcgacgttcgtgtccccaattcctgccccggttcggcgcttccccacatcgaggcaccacaccatcgccatggggtatcgacaacgtcgacagcgtgtggccccatcgttcgcagaccaacccggccacggttgccctgctgctgacggataaggacctggagtcggaggagagcatgtacgagcggtggagcagcgtgcacaccgtgtcgcgggacctcacggagaagcagagcaggttcgaggcgttcaaggcgaactctaggcacatcggcgagttcaacaagatgaaagacgttccctacaagctcggcctcaacaaggaaagttgagaagattgaaaatgactatgccaaatgcaagttcgttgcccaatgttttatatatgaaaaaatcatcttctacgattcagagaaattatgtgaagcttcaatttgactccatgcaacaggtttagctattgacaacctcgattacattttcacagtgggagctccttcgattattaaccacaggacagcatatgttcgtgcattgcaaccgataaataaagatgaagaggtatctataagctacattgagactgcggcagtcaccaagaagagaaacaatgatctgaaacagtacttcttcacctgcacatgtccacgctgtgtaaagggttttgatgaggatgcactacttgaggggttcaggtgcaagagccaagcatgtgatggctttctgctgcccaactcaggtaaaaaggcttatacatgccaaaaatgtggtgcttctagagatgtggaagagataaaaaatatgagaagcaaaatactacagttatcggataaagcatcttcatttctttcatcaggaaataaggctgaagcaggttctatctacaagataatcaaacagttagagagaaatctgtaccatgctttctcaactactttgctgcacacgtgcgaaacactattgaagatatatctggaattacaagattggtggactgcgttgacatactgtagattgacaattcctgtttatgaaagagtttatccaccttttcatccgatgattggattacaattctatacttgtggaaagcttgaatggtatggactattagcccttacctatttacctcacacaaggacaacaatcatatgagtttattccttatccggtataaatgtttgctgttaatgtcttatgctttactaatatagctgttattgattctgacaaaagttgattttggatttgacactgatagtatagggtcaataagagcaactctaaaagcctctgtaaatttcaatctctatatctaacatttggagagccattcaatgaatattatttttgtatatctctcttatctgcaacaggttttccaatatttgttctctatacttcgatagcttatcatattttttctttgttgaaaaacaagaaaactaaatgtagccgcctcttcaaaaatggagtgaaggaaggatggttttggagagtggtttagagaagtttatctattggagtttttttatttgttttctaaattttgttataaagaaacatgtagaatgtcttagagattctctaagaaaaatgctagctatgaacttttataaagagaagttcagaatcagttctttttattctctaatatatatgttgttcgtttccatgtaattattatgtactaacatttatcgaataatttttacgccgtcgcaacgcacggacacacacctatatagatatatgatggtcatgtttcgcccggacgcagggactggttcggagggagacggcccctcactctctgccctcctgctgcctgcctactgctatactgttctcttgtgttcatgttcatataaaattcagtttcatgttcatattttcataactgtatatgttcatcttatcatacagtttgggtccttgaactttggaacactgaatccctactactctccccccataaaggtgtgtgacctcatatgatgcggagctgttttggtctcgagtcataaggataggaaggaacacaaaagggtcaaatcaatacccttatgtctccccttctggaccaggctccgccgccggtgccgtggcctgcatcgcatgcccgacgctctacgcctacctgaagaagacagaccccggagtgcccgcgcagctgctggagtacgacgagcggttcgggcagtacggctgcgacttcaccttctacgactacaaccgaccggaggagctgccggcggcgatgaagcacgcctaccgagtcatcgttgccgaccctccctatctggtactgtttctaccctaccagagattgcctattaaaaagtgtttgatcagttcttaacatttgagatgagaggaaatatcgaggagaaatggctattattcattggttgatgatgtagagtaaggagtgcttggaaaaggttgccaaaacagtatctttcctcgcacgacctgaaggttcattcctgctgctgctcacaggggaagttcggatggaccgggcattggagctgctgaatgttcgtccctgcggtttcaggcctcgccactcgaacaaactaggcaacgagttccggctgttcacgaattaagatcctgctgacagacttggtggttgggagcaaagtgatgcctgcacactggcgggcaggtcgtgaaggcacccaccatcgagcagaacctgtcgtgcaaccttgagtagctgtacaagggcatcaccaagaagttgaatatttctagggaaattgttgacgcaagtgggcgacgcttctccttcagacgctcaaccagtcaagaaggagtccgagagccaggcatggctcggattaggaccgaatgccgtcaagtccaacctgaacctgagctagcacacaacgacacagccaaataagacagcacagcaacctcaccaaagcctttgcaggacgatctgaaaatatgctttgccactagagtaccgaaaccataaatatcctctcgttatcgtgttttagtgttctgtttaggccgtggtcctacgccctcttgtcacatagtctggatgtaaagataagtagccagccatgactgagagaagttttttgggggggggggtgttaacacacggccactctgaattggccatgctaaggaaaatgatagtagtgcaaagagaagtatatgtcttttttctttttctttttctgaaagccagatcgtttggctctagccttgatgtatgcagaacaagtgattgtaatggattctgagtatcctcatcgtcttgctgttgcttcaccaacccaagtttgtttggattcttgccattcctgctgcagcaaatctctggtagtttatggtagcaactctagcaatctaaggtaaaaaaatagagggagaatttattatatcctttttgttc

SEQ ID NO: 80947 - DNA, 3864 bp, Zea Mays
cacggttctgcctccagtccgccgcccgcgcgactgctccaacgaaggaaagtctgatcccgccatggcgccatctccacccccgcttacctctctcggccgccatcatggaaggtccgaccccgccatcgctgtccccacgcggttgctccaaggaaggaaactctgatcccgctatccccgcccccgctctctctcgccatctccgtgcggctgctccaaggaaggaaggtccgaccccgccatcgccatccccgcgtggctgccttcccctctcgccatccccgcgcggctgctccaaggaaggaaggtccgaccccgccatcgccatccccgcgcgcccggtcgagcgccaccagccgcataagtctgggctagcgccgccggccaccattggctcggtcgagcacctcatgcccacgacggtcagtcgccgccttcatggctcagagtcgtcggtccctgcccaccaaggtcaccatgggctcgacgacgatggcaacaaggtcaaggtcgtcatcacaacccaagaaaaaatcatcttctacgattcagagaaattatgtgaagcttcaatttgactccatgcaacaggtttagctattgacaacctcgattacattttcacagtgggagctccttcgattattaaccacagttgtgtaccaaatgcagttttgatatttgatggtaggacagcatatgttcgtgcattgcaaccgataaataaagatgaagaggtatctataagctacattgagactgcggcagtcaccaagaagagaaacaatgatctgaaacagtacttcttcacctgcacatgtccacgctgtgtaaagggttttgatgaggatgcactacttgaggggttcaggtgcaagagccaagcatgtgatggctttctgctgcccaactcaggtaaaaaggcttatacatgccaaaaatgtggtgcttctagagatgtggaagagataaaaaatatgagaagcaaaatactacagttatcggataaagcatcttcatttctttcatcaggaaataaggctgaagcaggttctatctacaagataatcaaacagttagagagaaatctgtaccatgctttctcaactactttgctgcacacgtgcgaaacactattgaagatatatctggaattacaagattggtggactgcgttgacatactgtagattgacaattcctgtttatgaaagagtttatccaccttttcatccgatgattggattacaattctatacttgtggaaagcttgaatggtatggactattagcccttacctatttacctcacacaaggacaacaatcatatgagtttattccttatccggtataaatgtttgctgttaatgtcttatgctttactaatatagctgttattgattctgacaaaagttgattttggatttgacactgatagtatagggtcaataagagcaactctaaaagcctctgtaaatttcaatctctatatctaacatttggagagccattcaatgaatattatttttgtatatctctcttatctgcaacaggttttccaatatttgttctctatacttcgatagcttatcatattttttctttgttgaaaaacaagaaaactaaatgtagccgcctcttcaaaaatggagtgaaggaaggatggttttggagagtggtttagagaagtttatctattggagtttttttatttgttttctaaattttgttataaagaaacatgtagaatgtcttagagattctctaagaaaaatgctagctatgaacttttataaagagaagttcagaatcagttctttttattctctaatatatatgttgttcgtttccatgtaattattatgtactaacatttatcgaataatttttacgccgtcgcaacgcacggacacacacctatatagatatatgatggtcatgtttcgcccggacgcagggactggttcggagggagacggcccctcactctctgccctcctgctgcctgcctactgctatactgttctcttgtgttcatgttcatataaaattcagtttcatgttcatattttcataactgtatatgttcatcttatcatacagtttgggtccttgaactttggaacactgaatccctactactctccccccataaaggtgtgtgacctcatatgatgcggagctgttttggtctcgagtcataagggtattgatttggagataatgctgctcgggcttctttgaactgaactgattaagtcagcaacatatccaatattaatgtgtgttcatacatcagataggaaggaacacaaaagggtcaaatcaatacccttatgtctccccttctggaccaggctccgccgccggtgccgtggcctgcatcgcatgcccgacgctctacgcctacctgaagaagacagaccccggagtgcccgcgcagctgctggagtacgacgagcggttcgggcagtacggctgcgacttcaccttctacgactacaaccgaccggaggagctgccggcggcgatgaagcacgcctaccgagtcatcgttgccgaccctccctatctggggaagttcggatggaccgggcattggagctgctgaatgttcgtccctgcggtttcaggcctcgccactcgaacaaactaggcaacgagttccggctgttcacgaattaagatcctgctgacagacttggtggttgggagcaaagtgatggtgcccccatttaactataaactaatacaatttttgttctagagctgttccatctttatgaacatgttgcatctttgatccacagctcactgatccctccaatttaaattgtagtgacaattatttgaggaatctgtgtgctatgatgtatgattaatcaaacatttacactgttagtgtacctcattttaatttcattttaaaatacactgttagtgtatgtttcattttaatttcatcagtattctttagaatgtctcgttggcttattcagatttatagccaaaatgacattatcttggggatagttcatcagtattttttaatttcattatctcgttcggcggcggcatcccggacgggcacagcctgcacactggcgggcaggtcgtgaaggcacccaccatcgagcagaacctgtcgtgcaaccttgagtagctgtacaagggcatcaccaagaagttgaatatttctagggaaattgttgacgcaagtgggcgacgcttctccttcagacgctcaaccagtcaagaaggagtccgagagccaggcatggctcggattaggaccgaatgccgtcaagtccaacctgaacctgagctagcacacaacgacacagccaaataagacagcacagcaacctcaccaaagcctttgcaggacgatctgaaaatatgctttgccactagagtaccgaaaccataaatatcctctcgttatcgtgttttagtgttctgtttaggccgtggtcctacgccctcttgtcacatagtctggatgtaaagataagtagccagccatgactgagagaagttttttgggggggggggtgttaacacacggccactctgaattggccatgctaaggaaaatgatagtagtgcaaagagaagtatatgtcttttttctttttctttttctgaaagccagatcgtttggctctagccttgatgtatgcagaacaagtgattgtaatggattctgagtatcctcatcgtcttgctgttgcttcaccaacccaagtttgtttggattcttgccattcctgctgcagcaaatctctggtagtttatggtagcaactctagcaatctaaggtaaaaaaatagagggagaatttattatatcctttttgttc

SEQ ID NO: 80948 - DNA, 3409 bp, Zea Mays
gttctgcctccagtccgccgcccgcgcgactgctccaacgaaggaaagtctgatcccgccatggcgccatctccacccccgcttacctctctcggccgccatcatggaaggtccgaccccgccatcgctgtccccacgcggttgctccaaggaaggaaactctgatcccgctatccccgcccccgctctctctcgccatctccgtgcggctgctccaaggaaggaaggtccgaccccgccatcgccatccccgcgtggctgccttcccctctcgccatccccgcgcggctgctccaaggaaggaaggtccgaccccgccatcgccatccccgcgcgcccggtcgagcgccaccagccgcataagtctgggctagcgccgccggccaccattggctcggtcgagcacctcatgcccacgacggtcagtcgccgccttcatggctcagagtcgtcggtccctgcccaccaaggtcaccatgggctcgacgacgatggcaacaaggtcaaggtcgtcatcacaacccaaggttcgaggcgttcaaggcgaactctaggcacatcggcgagttcaacaagatgaaagacgttccctacaagctcggcctcaacaagaaaaaatcatcttctacgattcagagaaattatgtgaagcttcaatttgactccatgcaacaggtttagctattgacaacctcgattacattttcacagtgggagctccttcgattattaaccacaggtcgtatgctaaactattagctatatattcgtttatctattatctttaccagattagatcaattaatatatcaccaccttctctattcatccatttttttgggtatatttagttgtgtaccaaatgcagttttgatatttgatggtaggacagcatatgttcgtgcattgcaaccgataaataaagatgaagaggtatctataagctacattgagactgcggcagtcaccaagaagagaaacaatgatctgaaacagtacttcttcacctgcacatgtccacgctgtgtaaagggttttgatgaggatgcactacttgaggggttcaggtgcaagagccaagcatgtgatggctttctgctgcccaactcaggtaaaaaggcttatacatgccaaaaatgtggtgcttctagagatgtggaagagataaaaaatatgagaagcaaaatactacagttatcggataaagcatcttcatttctttcatcaggaaataaggctgaagcaggttctatctacaagataatcaaacagttagagagaaatctgtaccatgctttctcaactactttgctgcacacgtgcgaaacactattgaagatatatctggaattacaagattggtggactgcgttgacatactgtagattgacaattcctgtttatgaaagagtttatccaccttttcatccgatgattggattacaattctatacttgtggaaagcttgaatgatatatgatggtcatgtttcgcccggacgcagggactggttcggagggagacggcccctcactctctgccctcctgctgcctgcctactgctatactgttctcttgtgttcatgttcatataaaattcagtttcatgttcatattttcataactgtatatgttcatcttatcatacagtttgggtccttgaactttggaacactgaatccctactactctccccccataaaggctccgccgccggtgccgtggcctgcatcgcatgcccgacgctctacgcctacctgaagaagacagaccccggagtgcccgcgcagctgctggagtacgacgagcggttcgggcagtacggctgcgacttcaccttctacgactacaaccgaccggaggagctgccggcggcgatgaagcacgcctaccgagtcatcgttgccgaccctccctatctggtactgtttctaccctaccagagattgcctattaaaaagtgtttgatcagttcttaacatttgagatgagaggaaatatcgaggagaaatggctattattcattggttgatgatgtagagtaaggagtgcttggaaaaggttgccaaaacagtatctttcctcgcacgacctgaaggttcattcctgctgctgctcacaggggaagttcggatggaccgggcattggagctgctgaatgttcgtccctgcggtttcaggcctcgccactcgaacaaactaggcaacgagttccggctgttcacgaattaagatcctgctgacagacttggtggttgggagcaaagtgatggtgcccccatttaactataaactaatacaatttttgttctagagctgttccatctttatgaacatgttgcatctttgatccacagctcactgatccctccaatttaaattgtagtgacaattatttgaggaatctgtgtgctatgatgtatgattaatcaaacatttacactgttagtgtacctcattttaatttcattttaaaatacactgttagtgtatgtttcattttaatttcatcagtattctttagaatgtctcgttggcttattcagatttatagccaaaatgacattatcttggggatagttcatcagtattttttaatttcattatctcgttcggcggcggcatcccggacgggcacagcctgcacactggcgggcaggtcgtgaaggcacccaccatcgagcagaacctgtcgtgcaaccttgagtagctgtacaagggcatcaccaagaagttgaatatttctagggaaattgttgacgcaagtgggcgacgcttctccttcagacgctcaaccagtcaagaaggagtccgagagccaggcatggctcggattaggaccgaatgccgtcaagtccaacctgaacctgagctagcacacaacgacacagccaaataagacagcacagcaacctcaccaaagcctttgcaggacgatctgaaaatatgctttgccactagagtaccgaaaccataaatatcctctcgttatcgtgttttagtgttctgtttaggccgtggtcctacgccctcttgtcacatagtctggatgtaaagataagtagccagccatgactgagagaagttttttgggggggggggtgttaacacacggccactctgaattggccatgctaaggaaaatgatagtagtgcaaagagaagtatatgtcttttttctttttctttttctgaaagccagatcgtttggctctagccttgatgtatgcagaacaagtgattgtaatggattctgagtatcctcatcgtcttgctgttgcttcaccaacccaagtttgtttggattcttgccattcctgctgcagcaaatctctggtagtttatggtagcaactctagcaatctaaggtaaaaaaatagagggagaatttattatatcctttttgttc

SEQ ID NO: 80949 - DNA, 3428 bp, Zea Mays
ctccagtccgccgcccgcgcgactgctccaacgaaggaaagtctgatcccgccatggcgccatctccacccccgcttacctctctcggccgccatcatggaaggtccgaccccgccatcgctgtccccacgcggttgctccaaggaaggaaactctgatcccgctatccccgcccccgctctctctcgccatctccgtgcggctgctccaaggaaggaaggtccgaccccgccatcgccatccccgcgtggctgccttcccctctcgccatccccgcgcggctgctccaaggaaggaaggtccgaccccgccatcgccatccccgcgcgcccggtcgagcgccaccagccgcataagtctgggctagcgccgccggccaccattggctcggtcgagcacctcatgcccacgacggtcagtcgccgccttcatggctcagagtcgtcggtccctgcccaccaaggtcaccatgggctcgacgacgatggcaacaaggtcaaggtcgtcatcacaacccaaggttcgaggcgttcaaggcgaactctaggcacatcggcgagttcaacaagatgaaagacgttccctacaagctcggcctcaacaagaaaaaatcatcttctacgattcagagaaattatgtgaagcttcaatttgactccatgcaacaggtttagctattgacaacctcgattacattttcacagtgggagctccttcgattattaaccacaggtcgtatgctaaactattagctatatattcgtttatctattatctttaccagattagatcaattaatatatcaccaccttctctattcatccatttttttgggtatatttagttgtgtaccaaatgcagttttgatatttgatggtaggacagcatatgttcgtgcattgcaaccgataaataaagatgaagaggtatctataagctacattgagactgcggcagtcaccaagaagagaaacaatgatctgaaacagtacttcttcacctgcacatgtccacgctgtgtaaagggttttgatgaggatgcactacttgaggggttcaggtgcaagagccaagcatgtgatggctttctgctgcccaactcaggtaaaaaggcttatacatgccaaaaatgtggtgcttctagagatgtggaagagataaaaaatatgagaagcaaaatactacagttatcggataaagcatcttcatttctttcatcaggaaataaggctgaagcaggttctatctacaagataatcaaacagttagagagaaatctgtaccatgctttctcaactactttgctgcacacgtgcgaaacactattgaagatatatctggaattacaagattggtggactgcgttgacatactgtagattgacaattcctgtttatgaaagagtttatccaccttttcatccgatgattggattacaattctatacttgtggaaagcttgaatgggactggttcggagggagacggcccctcactctctgccctcctgctgcctgcctactgctatactgttctcttgtgttcatgttcatataaaattcagtttcatgttcatattttcataactgtatatgttcatcttatcatacagtttgggtccttgaactttggaacactgaatccctactactctccccccataaagataggaaggaacacaaaagggtcaaatcaatacccttatgtctccccttctggaccaggctccgccgccggtgccgtggcctgcatcgcatgcccgacgctctacgcctacctgaagaagacagaccccggagtgcccgcgcagctgctggagtacgacgagcggttcgggcagtacggctgcgacttcaccttctacgactacaaccgaccggaggagctgccggcggcgatgaagcacgcctaccgagtcatcgttgccgaccctccctatctggtactgtttctaccctaccagagattgcctattaaaaagtgtttgatcagttcttaacatttgagatgagaggaaatatcgaggagaaatggctattattcattggttgatgatgtagagtaaggagtgcttggaaaaggttgccaaaacagtatctttcctcgcacgacctgaaggttcattcctgctgctgctcacaggggaagttcggatggaccgggcattggagctgctgaatgttcgtccctgcggtttcaggcctcgccactcgaacaaactaggcaacgagttccggctgttcacgaattaagatcctgctgacagacttggtggttgggagcaaagtgatggtgcccccatttaactataaactaatacaatttttgttctagagctgttccatctttatgaacatgttgcatctttgatccacagctcactgatccctccaatttaaattgtagtgacaattatttgaggaatctgtgtgctatgatgtatgattaatcaaacatttacactgttagtgtacctcattttaatttcattttaaaatacactgttagtgtatgtttcattttaatttcatcagtattctttagaatgtctcgttggcttattcagatttatagccaaaatgacattatcttggggatagttcatcagtattttttaatttcattatctcgttcggcggcggcatcccggacgggcacagcctgcacactggcgggcaggtcgtgaaggcacccaccatcgagcagaacctgtcgtgcaaccttgagtagctgtacaagggcatcaccaagaagttgaatatttctagggaaattgttgacgcaagtgggcgacgcttctccttcagacgctcaaccagtcaagaaggagtccgagagccaggcatggctcggattaggaccgaatgccgtcaagtccaacctgaacctgagctagcacacaacgacacagccaaataagacagcacagcaacctcaccaaagcctttgcaggacgatctgaaaatatgctttgccactagagtaccgaaaccataaatatcctctcgttatcgtgttttagtgttctgtttaggccgtggtcctacgccctcttgtcacatagtctggatgtaaagataagtagccagccatgactgagagaagttttttgggggggggggtgttaacacacggccactctgaattggccatgctaaggaaaatgatagtagtgcaaagagaagtatatgtcttttttctttttctttttctgaaagccagatcgtttggctctagccttgatgtatgcagaacaagtgattgtaatggattctgagtatcctcatcgtcttgctgttgcttcaccaacccaagtttgtttggattcttgccattcctgctgcagcaaatctctggtagtttatggtagcaactctagcaatctaaggtaaaaaaatagagggagaatttattatatcctttttgttc

SEQ ID NO: 80950 - DNA, 3956 bp, Zea Mays
cgcgactgctccaacgaaggaaagtctgatcccgccatggcgccatctccacccccgcttacctctctcggccgccatcatggaaggtccgaccccgccatcgctgtccccacgcggttgctccaaggaaggaaactctgatcccgctatccccgcccccgctctctctcgccatctccgtgcggctgctccaaggaaggaaggtccgaccccgccatcgccatccccgcgtggctgccttcccctctcgccatccccgcgcggctgctccaaggaaggaaggtccgaccccgccatcgccatccccgcgcgcccggtcgagcgccaccagccgcataagtctgggctagcgccgccggccaccattggctcggtcgagcacctcatgcccacgacggtcagtcgccgccttcatggctcagagtcgtcggtccctgcccaccaaggtcaccatgggctcgacgacgatggcaacaaggtcaaggtcgtcatcacaacccaaggtagtagctcttcagttcccccgccattccccaccacccctccaccgtctccaccgcacacagcatgcccgactctattctcctccccgaaatccccgtggcgcgcagatctagccccggctcctcgccggcacaaaccacgtgcgcgccctcgacccatggcatccccaaatcccgcccccggttcctctcccttcccgttcgcggacgacgcttccgcgcgttgacgtacgcgtccccaaatccccggttcccctcccttcctgttcgcggatggcgcttccgagccctcgacccatggcgtccccaaatcccaggttcctctcccttcccgttcgcggacggcgcttccgcgcgtcgacgttcgtgtccccaattcctgccccggttcggcgcttccccacatcgaggcaccacaccatcgccatggggtatcgacaacgtcgacagcgtgtggccccatcgttcgcagaccaacccggccacggttgccctgctgctgacggataaggacctggagtcggaggagagcatgtacgagcggtggagcagcgtgcacaccgtgtcgcgggacctcacggagaagcagagcaggttcgaggcgttcaaggcgaactctaggcacatcggcgagttcaacaagatgaaagacgttccctacaagctcggcctcaacaagaacaaaaggaaagttgagaagattgaaaatgactatgccaaatgcaagttcgttgcccaatgttttatatatggtgatagtttcagctctggaatttagctgaagttgaatgcttcatatgtttagactgaaattttggtactaaactggtagattattgttatttaaatatataaaaaaaatcatcttctacgattcagagaaattatgtgaagcttcaatttgactccatgcaacaggtttagctattgacaacctcgattacattttcacagtgggagctccttcgattattaaccacagttgtgtaccaaatgcagttttgatatttgatggtaggacagcatatgttcgtgcattgcaaccgataaataaagatgaagaggtatctataagctacattgagactgcggcagtcaccaagaagagaaacaatgatctgaaacagtacttcttcacctgcacatgtccacgctgtgtaaagggttttgatgaggatgcactacttgaggggttcaggtgcaagagccaagcatgtgatggctttctgctgcccaactcaggtaaaaaggcttatacatgccaaaaatgtggtgcttctagagatgtggaagagataaaaaatatgagaagcaaaatactacagttatcggataaagcatcttcatttctttcatcaggaaataaggctgaagcaggttctatctacaagataatcaaacagttagagagaaatctgtaccatgctttctcaactactttgctgcacacgtgcgaaacactattgaagatatatctggaattacaagattggtggactgcgttgacatactgtagattgacaattcctgtttatgaaagagtttatccaccttttcatccgatgattggattacaattctatacttgtggaaagcttgaatgggactggttcggagggagacggcccctcactctctgccctcctgctgcctgcctactgctatactgttctcttgtgttcatgttcatataaaattcagtttcatgttcatattttcataactgtatatgttcatcttatcatacagtttgggtccttgaactttggaacactgaatccctactactctccccccataaaggctccgccgccggtgccgtggcctgcatcgcatgcccgacgctctacgcctacctgaagaagacagaccccggagtgcccgcgcagctgctggagtacgacgagcggttcgggcagtacggctgcgacttcaccttctacgactacaaccgaccggaggagctgccggcggcgatgaagcacgcctaccgagtcatcgttgccgaccctccctatctgagtaaggagtgcttggaaaaggttgccaaaacagtatctttcctcgcacgacctgaaggttcattcctgctgctgctcacaggggaagttcggatggaccgggcattggagctgctgaatgttcgtccctgcggtttcaggcctcgccactcgaacaaactaggcaacgagttccggctgttcacgaattaagatcctgctgacagacttggtggttgggagcaaagtgatggtgcccccatttaactataaactaatacaatttttgttctagagctgttccatctttatgaacatgttgcatctttgatccacagctcactgatccctccaatttaaattgtagtgacaattatttgaggaatctgtgtgctatgatgtatgattaatcaaacatttacactgttagtgtacctcattttaatttcattttaaaatacactgttagtgtatgtttcattttaatttcatcagtattctttagaatgtctcgttggcttattcagatttatagccaaaatgacattatcttggggatagttcatcagtattttttaatttcattatctcgttcggcggcggcatcccggacgggcacagcctgcacactggcgggcaggtcgtgaaggcacccaccatcgagcagaacctgtcgtgcaaccttgagtagctgtacaagggcatcaccaagaagttgaatatttctagggaaattgttgacgcaagtggctaaccagatggaccagtccctgtcagatttatgcttggttaatttctgctcgcccggtgcaggcgacgcttctccttcagacgctcaaccagtcaagaaggagtccgagagccaggcatggctcggattaggaccgaatgccgtcaagtccaacctgaacctgagctagcacacaacgacacagccaaataagacagcacagcaacctcaccaaagcctttgcaggacgatctgaaaatatgctttgccactagagtaccgaaaccataaatatcctctcgttatcgtgttttagtgttctgtttaggccgtggtcctacgccctcttgtcacatagtctggatgtaaagataagtagccagccatgactgagagaagttttttgggggggggggtgttaacacacggccactctgaattggccatgctaaggaaaatgatagtagtgcaaagagaagtatatgtcttttttctttttctttttctgaaagccagatcgtttggctctagccttgatgtatgcagaacaagtgattgtaatggattctgagtatcctcatcgtcttgctgttgcttcaccaacccaagtttgtttggattcttgccattcctgctgcagcaaatctctggtagtttatggtagcaactctagcaatctaaggtaaaaaaatagagggagaatttattatatcctttttgttc

SEQ ID NO: 80951 - DNA, 3362 bp, Zea Mays
cgcgactgctccaacgaaggaaagtctgatcccgccatggcgccatctccacccccgcttacctctctcggccgccatcatggaaggtccgaccccgccatcgctgtccccacgcggttgctccaaggaaggaaactctgatcccgctatccccgcccccgctctctctcgccatctccgtgcggctgctccaaggaaggaaggtccgaccccgccatcgccatccccgcgtggctgccttcccctctcgccatccccgcgcggctgctccaaggaaggaaggtccgaccccgccatcgccatccccgcgcgcccggtcgagcgccaccagccgcataagtctgggctagcgccgccggccaccattggctcggtcgagcacctcatgcccacgacggtcagtcgccgccttcatggctcagagtcgtcggtccctgcccaccaaggtcaccatgggctcgacgacgatggcaacaaggtcaaggtcgtcatcacaacccaaggttcgaggcgttcaaggcgaactctaggcacatcggcgagttcaacaagatgaaagacgttccctacaagctcggcctcaacaagaacaaaaggaaagttgagaagattgaaaatgactatgccaaatgcaagttcgttgcccaatgttttatatatggtgatagtttcagctctggaatttagctgaagttgaatgcttcatatgtttagactgaaattttggtactaaactggtagattattgttatttaaatatataaaaaaaatcatcttctacgattcagagaaattatgtgaagcttcaatttgactccatgcaacaggtttagctattgacaacctcgattacattttcacagtgggagctccttcgattattaaccacagttgtgtaccaaatgcagttttgatatttgatggtaggacagcatatgttcgtgcattgcaaccgataaataaagatgaagaggtatctataagctacattgagactgcggcagtcaccaagaagagaaacaatgatctgaaacagtacttcttcacctgcacatgtccacgctgtgtaaagggttttgatgaggatgcactacttgaggggttcaggtgcaagagccaagcatgtgatggctttctgctgcccaactcaggtaaaaaggcttatacatgccaaaaatgtggtgcttctagagatgtggaagagataaaaaatatgagaagcaaaatactacagttatcggataaagcatcttcatttctttcatcaggaaataaggctgaagcaggttctatctacaagataatcaaacagttagagagaaatctgtaccatgctttctcaactactttgctgcacacgtgcgaaacactattgaagatatatctggaattacaagattggtggactgcgttgacatactgtagattgacaattcctgtttatgaaagagtttatccaccttttcatccgatgattggattacaattctatacttgtggaaagcttgaatgggactggttcggagggagacggcccctcactctctgccctcctgctgcctgcctactgctatactgttctcttgtgttcatgttcatataaaattcagtttcatgttcatattttcataactgtatatgttcatcttatcatacagtttgggtccttgaactttggaacactgaatccctactactctccccccataaaggctccgccgccggtgccgtggcctgcatcgcatgcccgacgctctacgcctacctgaagaagacagaccccggagtgcccgcgcagctgctggagtacgacgagcggttcgggcagtacggctgcgacttcaccttctacgactacaaccgaccggaggagctgccggcggcgatgaagcacgcctaccgagtcatcgttgccgaccctccctatctgagtaaggagtgcttggaaaaggttgccaaaacagtatctttcctcgcacgacctgaaggttcattcctgctgctgctcacaggggaagttcggatggaccgggcattggagctgctgaatgttcgtccctgcggtttcaggcctcgccactcgaacaaactaggcaacgagttccggctgttcacgaattaagatcctgctgacagacttggtggttgggagcaaagtgatggtgcccccatttaactataaactaatacaatttttgttctagagctgttccatctttatgaacatgttgcatctttgatccacagctcactgatccctccaatttaaattgtagtgacaattatttgaggaatctgtgtgctatgatgtatgattaatcaaacatttacactgttagtgtacctcattttaatttcattttaaaatacactgttagtgtatgtttcattttaatttcatcagtattctttagaatgtctcgttggcttattcagatttatagccaaaatgacattatcttggggatagttcatcagtattttttaatttcattatctcgttcggcggcggcatcccggacgggcacagcctgcacactggcgggcaggtcgtgaaggcacccaccatcgagcagaacctgtcgtgcaaccttgagtagctgtacaagggcatcaccaagaagttgaatatttctagggaaattgttgacgcaagtggctaaccagatggaccagtccctgtcagatttatgcttggttaatttctgctcgcccggtgcaggcgacgcttctccttcagacgctcaaccagtcaagaaggagtccgagagccaggcatggctcggattaggaccgaatgccgtcaagtccaacctgaacctgagctagcacacaacgacacagccaaataagacagcacagcaacctcaccaaagcctttgcaggacgatctgaaaatatgctttgccactagagtaccgaaaccataaatatcctctcgttatcgtgttttagtgttctgtttaggccgtggtcctacgccctcttgtcacatagtctggatgtaaagataagtagccagccatgactgagagaagttttttgggggggggggtgttaacacacggccactctgaattggccatgctaaggaaaatgatagtagtgcaaagagaagtatatgtcttttttctttttctttttctgaaagccagatcgtttggctctagccttgatgtatgcagaacaagtgattgtaatggattctgagtatcctcatcgtcttgctgttgcttcaccaacccaagtttgtttggattcttgccattcctgctgcagcaaatctctggtagtttatggtagcaactctagcaatctaaggtaaaaaaatagagggagaatttattatatcctttttgttc

SEQ ID NO: 80952 - DNA, 3157 bp, Zea Mays
cgactgctccaacgaaggaaagtctgatcccgccatggcgccatctccacccccgcttacctctctcggccgccatcatggaaggtccgaccccgccatcgctgtccccacgcggttgctccaaggaaggaaactctgatcccgctatccccgcccccgctctctctcgccatctccgtgcggctgctccaaggaaggaaggtccgaccccgccatcgccatccccgcgtggctgccttcccctctcgccatccccgcgcggctgctccaaggaaggaaggtccgaccccgccatcgccatccccgcgcgcccggtcgagcgccaccagccgcataagtctgggctagcgccgccggccaccattggctcggtcgagcacctcatgcccacgacggtcagtcgccgccttcatggctcagagtcgtcggtccctgcccaccaaggtcaccatgggctcgacgacgatggcaacaaggtcaaggtcgtcatcacaacccaagaaaaaatcatcttctacgattcagagaaattatgtgaagcttcaatttgactccatgcaacaggtttagctattgacaacctcgattacattttcacagtgggagctccttcgattattaaccacagttgtgtaccaaatgcagttttgatatttgatggtaggacagcatatgttcgtgcattgcaaccgataaataaagatgaagaggtatctataagctacattgagactgcggcagtcaccaagaagagaaacaatgatctgaaacagtacttcttcacctgcacatgtccacgctgtgtaaagggttttgatgaggatgcactacttgaggggttcaggtgcaagagccaagcatgtgatggctttctgctgcccaactcaggtaaaaaggcttatacatgccaaaaatgtggtgcttctagagatgtggaagagataaaaaatatgagaagcaaaatactacagttatcggataaagcatcttcatttctttcatcaggaaataaggctgaagcaggttctatctacaagataatcaaacagttagagagaaatctgtaccatgctttctcaactactttgctgcacacgtgcgaaacactattgaagatatatctggaattacaagattggtggactgcgttgacatactgtagattgacaattcctgtttatgaaagagtttatccaccttttcatccgatgattggattacaattctatacttgtggaaagcttgaatgggactggttcggagggagacggcccctcactctctgccctcctgctgcctgcctactgctatactgttctcttgtgttcatgttcatataaaattcagtttcatgttcatattttcataactgtatatgttcatcttatcatacagtttgggtccttgaactttggaacactgaatccctactactctccccccataaagataggaaggaacacaaaagggtcaaatcaatacccttatgtctccccttctggaccaggctccgccgccggtgccgtggcctgcatcgcatgcccgacgctctacgcctacctgaagaagacagaccccggagtgcccgcgcagctgctggagtacgacgagcggttcgggcagtacggctgcgacttcaccttctacgactacaaccgaccggaggagctgccggcggcgatgaagcacgcctaccgagtcatcgttgccgaccctccctatctgagtaaggagtgcttggaaaaggttgccaaaacagtatctttcctcgcacgacctgaaggttcattcctgctgctgctcacaggggaagttcggatggaccgggcattggagctgctgaatgttcgtccctgcggtttcaggcctcgccactcgaacaaactaggcaacgagttccggctgttcacgaattaagatcctgctgacagacttggtggttgggagcaaagtgatggtgcccccatttaactataaactaatacaatttttgttctagagctgttccatctttatgaacatgttgcatctttgatccacagctcactgatccctccaatttaaattgtagtgacaattatttgaggaatctgtgtgctatgatgtatgattaatcaaacatttacactgttagtgtacctcattttaatttcattttaaaatacactgttagtgtatgtttcattttaatttcatcagtattctttagaatgtctcgttggcttattcagatttatagccaaaatgacattatcttggggatagttcatcagtattttttaatttcattatctcgttcggcggcggcatcccggacgggcacagcctgcacactggcgggcaggtcgtgaaggcacccaccatcgagcagaacctgtcgtgcaaccttgagtagctgtacaagggcatcaccaagaagttgaatatttctagggaaattgttgacgcaagtggctaaccagatggaccagtccctgtcagatttatgcttggttaatttctgctcgcccggtgcaggcgacgcttctccttcagacgctcaaccagtcaagaaggagtccgagagccaggcatggctcggattaggaccgaatgccgtcaagtccaacctgaacctgagctagcacacaacgacacagccaaataagacagcacagcaacctcaccaaagcctttgcaggacgatctgaaaatatgctttgccactagagtaccgaaaccataaatatcctctcgttatcgtgttttagtgttctgtttaggccgtggtcctacgccctcttgtcacatagtctggatgtaaagataagtagccagccatgactgagagaagttttttgggggggggggtgttaacacacggccactctgaattggccatgctaaggaaaatgatagtagtgcaaagagaagtatatgtcttttttctttttctttttctgaaagccagatcgtttggctctagccttgatgtatgcagaacaagtgattgtaatggattctgagtatcctcatcgtcttgctgttgcttcaccaacccaagtttgtttggattcttgccattcctgctgcagcaaatctctggtagtttatggtagcaactctagcaatctaaggtaaaaaaatagagggagaatttattatatcctttttgttc

SEQ ID NO: 80953 - DNA, 1946 bp, Zea Mays
gactgctccaacgaaggaaagtctgatcccgccatggcgccatctccacccccgcttacctctctcggccgccatcatggaaggtccgaccccgccatcgctgtccccacgcggttgctccaaggaaggaaactctgatcccgctatccccgcccccgctctctctcgccatctccgtgcggctgctccaaggaaggaaggtccgaccccgccatcgccatccccgcgtggctgccttcccctctcgccatccccgcgcggctgctccaaggaaggaaggtccgaccccgccatcgccatccccgcgcgcccggtcgagcgccaccagccgcataagtctgggctagcgccgccggccaccattggctcggtcgagcacctcatgcccacgacggtcagtcgccgccttcatggctcagagtcgtcggtccctgcccaccaaggtcaccatgggctcgacgacgatggcaacaaggtcaaggtcgtcatcacaacccaaggttcgaggcgttcaaggcgaactctaggcacatcggcgagttcaacaagatgaaagacgttccctacaagctcggcctcaacaagaaaaaatcatcttctacgattcagagaaattatgtgaagcttcaatttgactccatgcaacaggtttagctattgacaacctcgattacattttcacagtgggagctccttcgattattaaccacagttgtgtaccaaatgcagttttgatatttgatggtaggacagcatatgttcgtgcattgcaaccgataaataaagatgaagaggtatctataagctacattgagactgcggcagtcaccaagaagagaaacaatgatctgaaacagtacttcttcacctgcacatgtccacgctgtgtaaagggttttgatgaggatgcactacttgaggggttcaggtgcaagagccaagcatgtgatggctttctgctgcccaactcaggtaaaaaggcttatacatgccaaaaatgtggtgcttctagagatgtggaagagataaaaaatatgagaagcaaaatactacagttatcggataaagcatcttcatttctttcatcaggaaataaggctgaagcaggttctatctacaagataatcaaacagttagagagaaatctgtaccatgctttctcaactactttgctgcacacgtgcgaaacactattgaagatatatctggaattacaagattggtggactgcgttgacatactgtagattgacaattcctgtttatgaaagagtttatccaccttttcatccgatgattggattacaattctatacttgtggaaagcttgaatggtatggactattagcccttacctatttacctcacacaaggacaacaatcatatgagtttattccttatccggtataaatgtttgctgttaatgtcttatgctttactaatatagctgttattgattctgacaaaagttgattttggatttgacactgatagtatagggtcaataagagcaactctaaaagcctctgtaaatttcaatctctatatctaacatttggagagccattcaatgaatattatttttgtatatctctcttatctgcaacaggttttccaatatttgttctctatacttcgatagcttatcatattttttctttgttgaaaaacaagaaaactaaatgtagccgcctcttcaaaaatggagtgaaggaaggatggttttggagagtggtttagagaagtttatctattggagtttttttatttgttttctaaattttgttataaagaaacatgtagaatgtcttagagattctctaagaaaaatgctagctatgaacttttataaagagaagttcagaatcagttctttttattctctaatatatatgttgttcgtttccatgtaattattatgtactaacatttatcgaataattttt

SEQ ID NO: 80954 - DNA, 3777 bp, Zea Mays
gactgctccaacgaaggaaagtctgatcccgccatggcgccatctccacccccgcttacctctctcggccgccatcatggaaggtccgaccccgccatcgctgtccccacgcggttgctccaaggaaggaaactctgatcccgctatccccgcccccgctctctctcgccatctccgtgcggctgctccaaggaaggaaggtccgaccccgccatcgccatccccgcgtggctgccttcccctctcgccatccccgcgcggctgctccaaggaaggaaggtccgaccccgccatcgccatccccgcgcgcccggtcgagcgccaccagccgcataagtctgggctagcgccgccggccaccattggctcggtcgagcacctcatgcccacgacggtcagtcgccgccttcatggctcagagtcgtcggtccctgcccaccaaggtcaccatgggctcgacgacgatggcaacaaggtcaaggtcgtcatcacaacccaaggtagtagctcttcagttcccccgccattccccaccacccctccaccgtctccaccgcacacagcatgcccgactctattctcctccccgaaatccccgtggcgcgcagatctagccccggctcctcgccggcacaaaccacgtgcgcgccctcgacccatggcatccccaaatcccgcccccggttcctctcccttcccgttcgcggacgacgcttccgcgcgttgacgtacgcgtccccaaatccccggttcccctcccttcctgttcgcggatggcgcttccgagccctcgacccatggcgtccccaaatcccaggttcctctcccttcccgttcgcggacggcgcttccgcgcgtcgacgttcgtgtccccaattcctgccccggttcggcgcttccccacatcgaggcaccacaccatcgccatggggtatcgacaacgtcgacagcgtgtggccccatcgttcgcagaccaacccggccacggttgccctgctgctgacggataaggacctggagtcggaggagagcatgtacgagcggtggagcagcgtgcacaccgtgtcgcgggacctcacggagaagcagagcaggttcgaggcgttcaaggcgaactctaggcacatcggcgagttcaacaagatgaaagacgttccctacaagctcggcctcaacaagaaaaaatcatcttctacgattcagagaaattatgtgaagcttcaatttgactccatgcaacaggtttagctattgacaacctcgattacattttcacagtgggagctccttcgattattaaccacagttgtgtaccaaatgcagttttgatatttgatggtaggacagcatatgttcgtgcattgcaaccgataaataaagatgaagaggtatctataagctacattgagactgcggcagtcaccaagaagagaaacaatgatctgaaacagtacttcttcacctgcacatgtccacgctgtgtaaagggttttgatgaggatgcactacttgaggggttcaggtgcaagagccaagcatgtgatggctttctgctgcccaactcaggtaaaaaggcttatacatgccaaaaatgtggtgcttctagagatgtggaagagataaaaaatatgagaagcaaaatactacagttatcggataaagcatcttcatttctttcatcaggaaataaggctgaagcaggttctatctacaagataatcaaacagttagagagaaatctgtaccatgctttctcaactactttgctgcacacgtgcgaaacactattgaagatatatctggaattacaagattggtggactgcgttgacatactgtagattgacaattcctgtttatgaaagagtttatccaccttttcatccgatgattggattacaattctatacttgtggaaagcttgaatgggactggttcggagggagacggcccctcactctctgccctcctgctgcctgcctactgctatactgttctcttgtgttcatgttcatataaaattcagtttcatgttcatattttcataactgtatatgttcatcttatcatacagtttgggtccttgaactttggaacactgaatccctactactctccccccataaaggctccgccgccggtgccgtggcctgcatcgcatgcccgacgctctacgcctacctgaagaagacagaccccggagtgcccgcgcagctgctggagtacgacgagcggttcgggcagtacggctgcgacttcaccttctacgactacaaccgaccggaggagctgccggcggcgatgaagcacgcctaccgagtcatcgttgccgaccctccctatctgagtaaggagtgcttggaaaaggttgccaaaacagtatctttcctcgcacgacctgaaggttcattcctgctgctgctcacaggggaagttcggatggaccgggcattggagctgctgaatgttcgtccctgcggtttcaggcctcgccactcgaacaaactaggcaacgagttccggctgttcacgaattaagatcctgctgacagacttggtggttgggagcaaagtgatggtgcccccatttaactataaactaatacaatttttgttctagagctgttccatctttatgaacatgttgcatctttgatccacagctcactgatccctccaatttaaattgtagtgacaattatttgaggaatctgtgtgctatgatgtatgattaatcaaacatttacactgttagtgtacctcattttaatttcattttaaaatacactgttagtgtatgtttcattttaatttcatcagtattctttagaatgtctcgttggcttattcagatttatagccaaaatgacattatcttggggatagttcatcagtattttttaatttcattatctcgttcggcggcggcatcccggacgggcacagcctgcacactggcgggcaggtcgtgaaggcacccaccatcgagcagaacctgtcgtgcaaccttgagtagctgtacaagggcatcaccaagaagttgaatatttctagggaaattgttgacgcaagtggctaaccagatggaccagtccctgtcagatttatgcttggttaatttctgctcgcccggtgcaggcgacgcttctccttcagacgctcaaccagtcaagaaggagtccgagagccaggcatggctcggattaggaccgaatgccgtcaagtccaacctgaacctgagctagcacacaacgacacagccaaataagacagcacagcaacctcaccaaagcctttgcaggacgatctgaaaatatgctttgccactagagtaccgaaaccataaatatcctctcgttatcgtgttttagtgttctgtttaggccgtggtcctacgccctcttgtcacatagtctggatgtaaagataagtagccagccatgactgagagaagttttttgggggggggggtgttaacacacggccactctgaattggccatgctaaggaaaatgatagtagtgcaaagagaagtatatgtcttttttctttttctttttctgaaagccagatcgtttggctctagccttgatgtatgcagaacaagtgattgtaatggattctgagtatcctcatcgtcttgctgttgcttcaccaacccaagtttgtttggattcttgccattcctgctgcagcaaatctctggtagtttatggtagcaactctagcaatctaaggtaaaaaaatagagggagaatttattatatcctttttgttc

SEQ ID NO: 80955 - DNA, 3227 bp, Zea Mays
ctccaacgaaggaaagtctgatcccgccatggcgccatctccacccccgcttacctctctcggccgccatcatggaaggtccgaccccgccatcgctgtccccacgcggttgctccaaggaaggaaactctgatcccgctatccccgcccccgctctctctcgccatctccgtgcggctgctccaaggaaggaaggtccgaccccgccatcgccatccccgcgtggctgccttcccctctcgccatccccgcgcggctgctccaaggaaggaaggtccgaccccgccatcgccatccccgcgcgcccggtcgagcgccaccagccgcataagtctgggctagcgccgccggccaccattggctcggtcgagcacctcatgcccacgacggtcagtcgccgccttcatggctcagagtcgtcggtccctgcccaccaaggtcaccatgggctcgacgacgatggcaacaaggtcaaggtcgtcatcacaacccaaggttcgaggcgttcaaggcgaactctaggcacatcggcgagttcaacaagatgaaagacgttccctacaagctcggcctcaacaagaaaaaatcatcttctacgattcagagaaattatgtgaagcttcaatttgactccatgcaacaggtttagctattgacaacctcgattacattttcacagtgggagctccttcgattattaaccacaggtcgtatgctaaactattagctatatattcgtttatctattatctttaccagattagatcaattaatatatcaccaccttctctattcatccatttttttgggtatatttagttgtgtaccaaatgcagttttgatatttgatggtaggacagcatatgttcgtgcattgcaaccgataaataaagatgaagaggtatctataagctacattgagactgcggcagtcaccaagaagagaaacaatgatctgaaacagtacttcttcacctgcacatgtccacgctgtgtaaagggttttgatgaggatgcactacttgaggggttcaggtgcaagagccaagcatgtgatggctttctgctgcccaactcaggtaaaaaggcttatacatgccaaaaatgtggtgcttctagagatgtggaagagataaaaaatatgagaagcaaaatactacagttatcggataaagcatcttcatttctttcatcaggaaataaggctgaagcaggttctatctacaagataatcaaacagttagagagaaatctgtaccatgctttctcaactactttgctgcacacgtgcgaaacactattgaagatatatctggaattacaagattggtggactgcgttgacatactgtagattgacaattcctgtttatgaaagagtttatccaccttttcatccgatgattggattacaattctatacttgtggaaagcttgaatgggactggttcggagggagacggcccctcactctctgccctcctgctgcctgcctactgctatactgttctcttgtgttcatgttcatataaaattcagtttcatgttcatattttcataactgtatatgttcatcttatcatacagtttgggtccttgaactttggaacactgaatccctactactctccccccataaaggctccgccgccggtgccgtggcctgcatcgcatgcccgacgctctacgcctacctgaagaagacagaccccggagtgcccgcgcagctgctggagtacgacgagcggttcgggcagtacggctgcgacttcaccttctacgactacaaccgaccggaggagctgccggcggcgatgaagcacgcctaccgagtcatcgttgccgaccctccctatctgagtaaggagtgcttggaaaaggttgccaaaacagtatctttcctcgcacgacctgaaggttcattcctgctgctgctcacaggggaagttcggatggaccgggcattggagctgctgaatgttcgtccctgcggtttcaggcctcgccactcgaacaaactaggcaacgagttccggctgttcacgaattaagatcctgctgacagacttggtggttgggagcaaagtgatggtgcccccatttaactataaactaatacaatttttgttctagagctgttccatctttatgaacatgttgcatctttgatccacagctcactgatccctccaatttaaattgtagtgacaattatttgaggaatctgtgtgctatgatgtatgattaatcaaacatttacactgttagtgtacctcattttaatttcattttaaaatacactgttagtgtatgtttcattttaatttcatcagtattctttagaatgtctcgttggcttattcagatttatagccaaaatgacattatcttggggatagttcatcagtattttttaatttcattatctcgttcggcggcggcatcccggacgggcacagcctgcacactggcgggcaggtcgtgaaggcacccaccatcgagcagaacctgtcgtgcaaccttgagtagctgtacaagggcatcaccaagaagttgaatatttctagggaaattgttgacgcaagtgggcgacgcttctccttcagacgctcaaccagtcaagaaggagtccgagagccaggcatggctcggattaggaccgaatgccgtcaagtccaacctgaacctgagctagcacacaacgacacagccaaataagacagcacagcaacctcaccaaagcctttgcaggacgatctgaaaatatgctttgccactagagtaccgaaaccataaatatcctctcgttatcgtgttttagtgttctgtttaggccgtggtcctacgccctcttgtcacatagtctggatgtaaagataagtagccagccatgactgagagaagttttttgggggggggggtgttaacacacggccactctgaattggccatgctaaggaaaatgatagtagtgcaaagagaagtatatgtcttttttctttttctttttctgaaagccagatcgtttggctctagccttgatgtatgcagaacaagtgattgtaatggattctgagtatcctcatcgtcttgctgttgcttcaccaacccaagtttgtttggattcttgccattcctgctgcagcaaatctctggtagtttatggtagcaactctagcaatctaaggtaaaaaaatagagggagaatttattatatcctttttgttc

SEQ ID NO: 80956 - DNA, 3044 bp, Zea Mays
aggaaagtctgatcccgccatggcgccatctccacccccgcttacctctctcggccgccatcatggaaggtccgaccccgccatcgctgtccccacgcggttgctccaaggaaggaaactctgatcccgctatccccgcccccgctctctctcgccatctccgtgcggctgctccaaggaaggaaggtccgaccccgccatcgccatccccgcgtggctgccttcccctctcgccatccccgcgcggctgctccaaggaaggaaggtccgaccccgccatcgccatccccgcgcgcccggtcgagcgccaccagccgcataagtctgggctagcgccgccggccaccattggctcggtcgagcacctcatgcccacgacggtcagtcgccgccttcatggctcagagtcgtcggtccctgcccaccaaggtcaccatgggctcgacgacgatggcaacaaggtcaaggtcgtcatcacaacccaagggtttagctattgacaacctcgattacattttcacagtgggagctccttcgattattaaccacaggacagcatatgttcgtgcattgcaaccgataaataaagatgaagaggtatctataagctacattgagactgcggcagtcaccaagaagagaaacaatgatctgaaacagtacttcttcacctgcacatgtccacgctgtgtaaagggttttgatgaggatgcactacttgaggggttcaggtgcaagagccaagcatgtgatggctttctgctgcccaactcaggtaaaaaggcttatacatgccaaaaatgtggtgcttctagagatgtggaagagataaaaaatatgagaagcaaaatactacagttatcggataaagcatcttcatttctttcatcaggaaataaggctgaagcaggttctatctacaagataatcaaacagttagagagaaatctgtaccatgctttctcaactactttgctgcacacgtgcgaaacactattgaagatatatctggaattacaagattggtggactgcgttgacatactgtagattgacaattcctgtttatgaaagagtttatccaccttttcatccgatgattggattacaattctatacttgtggaaagcttgaatgggactggttcggagggagacggcccctcactctctgccctcctgctgcctgcctactgctatactgttctcttgtgttcatgttcatataaaattcagtttcatgttcatattttcataactgtatatgttcatcttatcatacagtttgggtccttgaactttggaacactgaatccctactactctccccccataaagataggaaggaacacaaaagggtcaaatcaatacccttatgtctccccttctggaccaggctccgccgccggtgccgtggcctgcatcgcatgcccgacgctctacgcctacctgaagaagacagaccccggagtgcccgcgcagctgctggagtacgacgagcggttcgggcagtacggctgcgacttcaccttctacgactacaaccgaccggaggagctgccggcggcgatgaagcacgcctaccgagtcatcgttgccgaccctccctatctgagtaaggagtgcttggaaaaggttgccaaaacagtatctttcctcgcacgacctgaaggttcattcctgctgctgctcacaggggaagttcggatggaccgggcattggagctgctgaatgttcgtccctgcggtttcaggcctcgccactcgaacaaactaggcaacgagttccggctgttcacgaattaagatcctgctgacagacttggtggttgggagcaaagtgatggtgcccccatttaactataaactaatacaatttttgttctagagctgttccatctttatgaacatgttgcatctttgatccacagctcactgatccctccaatttaaattgtagtgacaattatttgaggaatctgtgtgctatgatgtatgattaatcaaacatttacactgttagtgtacctcattttaatttcattttaaaatacactgttagtgtatgtttcattttaatttcatcagtattctttagaatgtctcgttggcttattcagatttatagccaaaatgacattatcttggggatagttcatcagtattttttaatttcattatctcgttcggcggcggcatcccggacgggcacagcctgcacactggcgggcaggtcgtgaaggcacccaccatcgagcagaacctgtcgtgcaaccttgagtagctgtacaagggcatcaccaagaagttgaatatttctagggaaattgttgacgcaagtggctaaccagatggaccagtccctgtcagatttatgcttggttaatttctgctcgcccggtgcaggcgacgcttctccttcagacgctcaaccagtcaagaaggagtccgagagccaggcatggctcggattaggaccgaatgccgtcaagtccaacctgaacctgagctagcacacaacgacacagccaaataagacagcacagcaacctcaccaaagcctttgcaggacgatctgaaaatatgctttgccactagagtaccgaaaccataaatatcctctcgttatcgtgttttagtgttctgtttaggccgtggtcctacgccctcttgtcacatagtctggatgtaaagataagtagccagccatgactgagagaagttttttgggggggggggtgttaacacacggccactctgaattggccatgctaaggaaaatgatagtagtgcaaagagaagtatatgtcttttttctttttctttttctgaaagccagatcgtttggctctagccttgatgtatgcagaacaagtgattgtaatggattctgagtatcctcatcgtcttgctgttgcttcaccaacccaagtttgtttggattcttgccattcctgctgcagcaaatctctggtagtttatggtagcaactctagcaatctaaggtaaaaaaatagagggagaatttattatatcctttttgttc

SEQ ID NO: 80957 - DNA, 3263 bp, Zea Mays
ggaaagtctgatcccgccatggcgccatctccacccccgcttacctctctcggccgccatcatggaaggtccgaccccgccatcgctgtccccacgcggttgctccaaggaaggaaactctgatcccgctatccccgcccccgctctctctcgccatctccgtgcggctgctccaaggaaggaaggtccgaccccgccatcgccatccccgcgtggctgccttcccctctcgccatccccgcgcggctgctccaaggaaggaaggtccgaccccgccatcgccatccccgcgcgcccggtcgagcgccaccagccgcataagtctgggctagcgccgccggccaccattggctcggtcgagcacctcatgcccacgacggtcagtcgccgccttcatggctcagagtcgtcggtccctgcccaccaaggtcaccatgggctcgacgacgatggcaacaaggtcaaggtcgtcatcacaacccaaggttcgaggcgttcaaggcgaactctaggcacatcggcgagttcaacaagatgaaagacgttccctacaagctcggcctcaacaaggaaagttgagaagattgaaaatgactatgccaaatgcaagttcgttgcccaatgttttatatatgaaaaaatcatcttctacgattcagagaaattatgtgaagcttcaatttgactccatgcaacaggtttagctattgacaacctcgattacattttcacagtgggagctccttcgattattaaccacagttgtgtaccaaatgcagttttgatatttgatggtaggacagcatatgttcgtgcattgcaaccgataaataaagatgaagaggtatctataagctacattgagactgcggcagtcaccaagaagagaaacaatgatctgaaacagtacttcttcacctgcacatgtccacgctgtgtaaagggttttgatgaggatgcactacttgaggggttcaggtgcaagagccaagcatgtgatggctttctgctgcccaactcaggtaaaaaggcttatacatgccaaaaatgtggtgcttctagagatgtggaagagataaaaaatatgagaagcaaaatactacagttatcggataaagcatcttcatttctttcatcaggaaataaggctgaagcaggttctatctacaagataatcaaacagttagagagaaatctgtaccatgctttctcaactactttgctgcacacgtgcgaaacactattgaagatatatctggaattacaagattggtggactgcgttgacatactgtagattgacaattcctgtttatgaaagagtttatccaccttttcatccgatgattggattacaattctatacttgtggaaagcttgaatgtttgggtccttgaactttggaacactgaatccctactactctccccccataaagataggaaggaacacaaaagggtcaaatcaatacccttatgtctccccttctggaccaggctccgccgccggtgccgtggcctgcatcgcatgcccgacgctctacgcctacctgaagaagacagaccccggagtgcccgcgcagctgctggagtacgacgagcggttcgggcagtacggctgcgacttcaccttctacgactacaaccgaccggaggagctgccggcggcgatgaagcacgcctaccgagtcatcgttgccgaccctccctatctggtactgtttctaccctaccagagattgcctattaaaaagtgtttgatcagttcttaacatttgagatgagaggaaatatcgaggagaaatggctattattcattggttgatgatgtagagtaaggagtgcttggaaaaggttgccaaaacagtatctttcctcgcacgacctgaaggttcattcctgctgctgctcacaggggaagttcggatggaccgggcattggagctgctgaatgttcgtccctgcggtttcaggcctcgccactcgaacaaactaggcaacgagttccggctgttcacgaattaagatcctgctgacagacttggtggttgggagcaaagtgatggtgcccccatttaactataaactaatacaatttttgttctagagctgttccatctttatgaacatgttgcatctttgatccacagctcactgatccctccaatttaaattgtagtgacaattatttgaggaatctgtgtgctatgatgtatgattaatcaaacatttacactgttagtgtacctcattttaatttcattttaaaatacactgttagtgtatgtttcattttaatttcatcagtattctttagaatgtctcgttggcttattcagatttatagccaaaatgacattatcttggggatagttcatcagtattttttaatttcattatctcgttcggcggcggcatcccggacgggcacagcctgcacactggcgggcaggtcgtgaaggcacccaccatcgagcagaacctgtcgtgcaaccttgagtagctgtacaagggcatcaccaagaagttgaatatttctagggaaattgttgacgcaagtggctaaccagatggaccagtccctgtcagatttatgcttggttaatttctgctcgcccggtgcaggcgacgcttctccttcagacgctcaaccagtcaagaaggagtccgagagccaggcatggctcggattaggaccgaatgccgtcaagtccaacctgaacctgagctagcacacaacgacacagccaaataagacagcacagcaacctcaccaaagcctttgcaggacgatctgaaaatatgctttgccactagagtaccgaaaccataaatatcctctcgttatcgtgttttagtgttctgtttaggccgtggtcctacgccctcttgtcacatagtctggatgtaaagataagtagccagccatgactgagagaagttttttgggggggggggtgttaacacacggccactctgaattggccatgctaaggaaaatgatagtagtgcaaagagaagtatatgtcttttttctttttctttttctgaaagccagatcgtttggctctagccttgatgtatgcagaacaagtgattgtaatggattctgagtatcctcatcgtcttgctgttgcttcaccaacccaagtttgtttggattcttgccattcctgctgcagcaaatctctggtagtttatggtagcaactctagcaatctaaggtaaaaaaatagagggagaatttattatatcctttttgttc

SEQ ID NO: 80958 - DNA, 4073 bp, Zea Mays
gtctgatcccgccatggcgccatctccacccccgcttacctctctcggccgccatcatggaaggtccgaccccgccatcgctgtccccacgcggttgctccaaggaaggaaactctgatcccgctatccccgcccccgctctctctcgccatctccgtgcggctgctccaaggaaggaaggtccgaccccgccatcgccatccccgcgtggctgccttcccctctcgccatccccgcgcggctgctccaaggaaggaaggtccgaccccgccatcgccatccccgcgcgcccggtcgagcgccaccagccgcataagtctgggctagcgccgccggccaccattggctcggtcgagcacctcatgcccacgacggtcagtcgccgccttcatggctcagagtcgtcggtccctgcccaccaaggtcaccatgggctcgacgacgatggcaacaaggtcaaggtcgtcatcacaacccaaggtagtagctcttcagttcccccgccattccccaccacccctccaccgtctccaccgcacacagcatgcccgactctattctcctccccgaaatccccgtggcgcgcagatctagccccggctcctcgccggcacaaaccacgtgcgcgccctcgacccatggcatccccaaatcccgcccccggttcctctcccttcccgttcgcggacgacgcttccgcgcgttgacgtacgcgtccccaaatccccggttcccctcccttcctgttcgcggatggcgcttccgagccctcgacccatggcgtccccaaatcccaggttcctctcccttcccgttcgcggacggcgcttccgcgcgtcgacgttcgtgtccccaattcctgccccggttcggcgcttccccacatcgaggcaccacaccatcgccatggggtatcgacaacgtcgacagcgtgtggccccatcgttcgcagaccaacccggccacggttgccctgctgctgacggataaggacctggagtcggaggagagcatgtacgagcggtggagcagcgtgcacaccgtgtcgcgggacctcacggagaagcagagcaggttcgaggcgttcaaggcgaactctaggcacatcggcgagttcaacaagatgaaagacgttccctacaagctcggcctcaacaagaacaaaaggaaagttgagaagattgaaaatgactatgccaaatgcaagttcgttgcccaatgttttatatatggtgatagtttcagctctggaatttagctgaagttgaatgcttcatatgtttagactgaaattttggtactaaactggtagattattgttatttaaatatataaaaaaaatcatcttctacgattcagagaaattatgtgaagcttcaatttgactccatgcaacaggtttagctattgacaacctcgattacattttcacagtgggagctccttcgattattaaccacaggacagcatatgttcgtgcattgcaaccgataaataaagatgaagaggtatctataagctacattgagactgcggcagtcaccaagaagagaaacaatgatctgaaacagtacttcttcacctgcacatgtccacgctgtgtaaagggttttgatgaggatgcactacttgaggggttcaggtgcaagagccaagcatgtgatggctttctgctgcccaactcaggtaaaaaggcttatacatgccaaaaatgtggtgcttctagagatgtggaagagataaaaaatatgagaagcaaaatactacagttatcggataaagcatcttcatttctttcatcaggaaataaggctgaagcaggttctatctacaagataatcaaacagttagagagaaatctgtaccatgctttctcaactactttgctgcacacgtgcgaaacactattgaagatatatctggaattacaagattggtggactgcgttgacatactgtagattgacaattcctgtttatgaaagagtttatccaccttttcatccgatgattggattacaattctatacttgtggaaagcttgaatgggactggttcggagggagacggcccctcactctctgccctcctgctgcctgcctactgctatactgttctcttgtgttcatgttcatataaaattcagtttcatgttcatattttcataactgtatatgttcatcttatcatacagtttgggtccttgaactttggaacactgaatccctactactctccccccataaagataggaaggaacacaaaagggtcaaatcaatacccttatgtctccccttctggaccaggctccgccgccggtgccgtggcctgcatcgcatgcccgacgctctacgcctacctgaagaagacagaccccggagtgcccgcgcagctgctggagtacgacgagcggttcgggcagtacggctgcgacttcaccttctacgactacaaccgaccggaggagctgccggcggcgatgaagcacgcctaccgagtcatcgttgccgaccctccctatctggtactgtttctaccctaccagagattgcctattaaaaagtgtttgatcagttcttaacatttgagatgagaggaaatatcgaggagaaatggctattattcattggttgatgatgtagagtaaggagtgcttggaaaaggttgccaaaacagtatctttcctcgcacgacctgaaggttcattcctgctgctgctcacaggggaagttcggatggaccgggcattggagctgctgaatgttcgtccctgcggtttcaggcctcgccactcgaacaaactaggcaacgagttccggctgttcacgaattaagatcctgctgacagacttggtggttgggagcaaagtgatggtgcccccatttaactataaactaatacaatttttgttctagagctgttccatctttatgaacatgttgcatctttgatccacagctcactgatccctccaatttaaattgtagtgacaattatttgaggaatctgtgtgctatgatgtatgattaatcaaacatttacactgttagtgtacctcattttaatttcattttaaaatacactgttagtgtatgtttcattttaatttcatcagtattctttagaatgtctcgttggcttattcagatttatagccaaaatgacattatcttggggatagttcatcagtattttttaatttcattatctcgttcggcggcggcatcccggacgggcacagcctgcacactggcgggcaggtcgtgaaggcacccaccatcgagcagaacctgtcgtgcaaccttgagtagctgtacaagggcatcaccaagaagttgaatatttctagggaaattgttgacgcaagtggctaaccagatggaccagtccctgtcagatttatgcttggttaatttctgctcgcccggtgcaggcgacgcttctccttcagacgctcaaccagtcaagaaggagtccgagagccaggcatggctcggattaggaccgaatgccgtcaagtccaacctgaacctgagctagcacacaacgacacagccaaataagacagcacagcaacctcaccaaagcctttgcaggacgatctgaaaatatgctttgccactagagtaccgaaaccataaatatcctctcgttatcgtgttttagtgttctgtttaggccgtggtcctacgccctcttgtcacatagtctggatgtaaagataagtagccagccatgactgagagaagttttttgggggggggggtgttaacacacggccactctgaattggccatgctaaggaaaatgatagtagtgcaaagagaagtatatgtcttttttctttttctttttctgaaagccagatcgtttggctctagccttgatgtatgcagaacaagtgattgtaatggattctgagtatcctcatcgtcttgctgttgcttcaccaacccaagtttgtttggattcttgccattcctgctgcagcaaatctctggtagtttatggtagcaactctagcaatctaaggtaaaaaaatagagggagaatttattatatcctttttgttc

SEQ ID NO: 80959 - DNA, 3146 bp, Zea Mays
cgccatctccacccccgcttacctctctcggccgccatcatggaaggtccgaccccgccatcgctgtccccacgcggttgctccaaggaaggaaactctgatcccgctatccccgcccccgctctctctcgccatctccgtgcggctgctccaaggaaggaaggtccgaccccgccatcgccatccccgcgtggctgccttcccctctcgccatccccgcgcggctgctccaaggaaggaaggtccgaccccgccatcgccatccccgcgcgcccggtcgagcgccaccagccgcataagtctgggctagcgccgccggccaccattggctcggtcgagcacctcatgcccacgacggtcagtcgccgccttcatggctcagagtcgtcggtccctgcccaccaaggtcaccatgggctcgacgacgatggcaacaaggtcaaggtcgtcatcacaacccaaggttcgaggcgttcaaggcgaactctaggcacatcggcgagttcaacaagatgaaagacgttccctacaagctcggcctcaacaagaaaaaatcatcttctacgattcagagaaattatgtgaagcttcaatttgactccatgcaacaggtttagctattgacaacctcgattacattttcacagtgggagctccttcgattattaaccacagttgtgtaccaaatgcagttttgatatttgatggtaggacagcatatgttcgtgcattgcaaccgataaataaagatgaagaggtatctataagctacattgagactgcggcagtcaccaagaagagaaacaatgatctgaaacagtacttcttcacctgcacatgtccacgctgtgtaaagggttttgatgaggatgcactacttgaggggttcaggtgcaagagccaagcatgtgatggctttctgctgcccaactcaggtaaaaaggcttatacatgccaaaaatgtggtgcttctagagatgtggaagagataaaaaatatgagaagcaaaatactacagttatcggataaagcatcttcatttctttcatcaggaaataaggctgaagcaggttctatctacaagataatcaaacagttagagagaaatctgtaccatgctttctcaactactttgctgcacacgtgcgaaacactattgaagatatatctggaattacaagattggtggactgcgttgacatactgtagattgacaattcctgtttatgaaagagtttatccaccttttcatccgatgattggattacaattctatacttgtggaaagcttgaatgggactggttcggagggagacggcccctcactctctgccctcctgctgcctgcctactgctatactgttctcttgtgttcatgttcatataaaattcagtttcatgttcatattttcataactgtatatgttcatcttatcatacagtttgggtccttgaactttggaacactgaatccctactactctccccccataaaggctccgccgccggtgccgtggcctgcatcgcatgcccgacgctctacgcctacctgaagaagacagaccccggagtgcccgcgcagctgctggagtacgacgagcggttcgggcagtacggctgcgacttcaccttctacgactacaaccgaccggaggagctgccggcggcgatgaagcacgcctaccgagtcatcgttgccgaccctccctatctgagtaaggagtgcttggaaaaggttgccaaaacagtatctttcctcgcacgacctgaaggttcattcctgctgctgctcacaggggaagttcggatggaccgggcattggagctgctgaatgttcgtccctgcggtttcaggcctcgccactcgaacaaactaggcaacgagttccggctgttcacgaattaagatcctgctgacagacttggtggttgggagcaaagtgatggtgcccccatttaactataaactaatacaatttttgttctagagctgttccatctttatgaacatgttgcatctttgatccacagctcactgatccctccaatttaaattgtagtgacaattatttgaggaatctgtgtgctatgatgtatgattaatcaaacatttacactgttagtgtacctcattttaatttcattttaaaatacactgttagtgtatgtttcattttaatttcatcagtattctttagaatgtctcgttggcttattcagatttatagccaaaatgacattatcttggggatagttcatcagtattttttaatttcattatctcgttcggcggcggcatcccggacgggcacagcctgcacactggcgggcaggtcgtgaaggcacccaccatcgagcagaacctgtcgtgcaaccttgagtagctgtacaagggcatcaccaagaagttgaatatttctagggaaattgttgacgcaagtggctaaccagatggaccagtccctgtcagatttatgcttggttaatttctgctcgcccggtgcaggcgacgcttctccttcagacgctcaaccagtcaagaaggagtccgagagccaggcatggctcggattaggaccgaatgccgtcaagtccaacctgaacctgagctagcacacaacgacacagccaaataagacagcacagcaacctcaccaaagcctttgcaggacgatctgaaaatatgctttgccactagagtaccgaaaccataaatatcctctcgttatcgtgttttagtgttctgtttaggccgtggtcctacgccctcttgtcacatagtctggatgtaaagataagtagccagccatgactgagagaagttttttgggggggggggtgttaacacacggccactctgaattggccatgctaaggaaaatgatagtagtgcaaagagaagtatatgtcttttttctttttctttttctgaaagccagatcgtttggctctagccttgatgtatgcagaacaagtgattgtaatggattctgagtatcctcatcgtcttgctgttgcttcaccaacccaagtttgtttggattcttgccattcctgctgcagcaaatctctggtagtttatggtagcaactctagcaatctaaggtaaaaaaatagagggagaatttattatatcctttttgttc

SEQ ID NO: 80960 - DNA, 3879 bp, Zea Mays
gccatctccacccccgcttacctctctcggccgccatcatggaaggtccgaccccgccatcgctgtccccacgcggttgctccaaggaaggaaactctgatcccgctatccccgcccccgctctctctcgccatctccgtgcggctgctccaaggaaggaaggtccgaccccgccatcgccatccccgcgtggctgccttcccctctcgccatccccgcgcggctgctccaaggaaggaaggtccgaccccgccatcgccatccccgcgcgcccggtcgagcgccaccagccgcataagtctgggctagcgccgccggccaccattggctcggtcgagcacctcatgcccacgacggtcagtcgccgccttcatggctcagagtcgtcggtccctgcccaccaaggtcaccatgggctcgacgacgatggcaacaaggtcaaggtcgtcatcacaacccaaggtagtagctcttcagttcccccgccattccccaccacccctccaccgtctccaccgcacacagcatgcccgactctattctcctccccgaaatccccgtggcgcgcagatctagccccggctcctcgccggcacaaaccacgtgcgcgccctcgacccatggcatccccaaatcccgcccccggttcctctcccttcccgttcgcggacgacgcttccgcgcgttgacgtacgcgtccccaaatccccggttcccctcccttcctgttcgcggatggcgcttccgagccctcgacccatggcgtccccaaatcccaggttcctctcccttcccgttcgcggacggcgcttccgcgcgtcgacgttcgtgtccccaattcctgccccggttcggcgcttccccacatcgaggcaccacaccatcgccatggggtatcgacaacgtcgacagcgtgtggccccatcgttcgcagaccaacccggccacggttgccctgctgctgacggataaggacctggagtcggaggagagcatgtacgagcggtggagcagcgtgcacaccgtgtcgcgggacctcacggagaagcagagcaggttcgaggcgttcaaggcgaactctaggcacatcggcgagttcaacaagatgaaagacgttccctacaagctcggcctcaacaagaacaaaaggaaagttgagaagattgaaaatgactatgccaaatgcaagttcgttgcccaatgttttatatatggtgatagtttcagctctggaatttagctgaagttgaatgcttcatatgtttagactgaaattttggtactaaactggtagattattgttatttaaatatataaaaaaaatcatcttctacgattcagagaaattatgtgaagcttcaatttgactccatgcaacaggtttagctattgacaacctcgattacattttcacagtgggagctccttcgattattaaccacaggacagcatatgttcgtgcattgcaaccgataaataaagatgaagaggtatctataagctacattgagactgcggcagtcaccaagaagagaaacaatgatctgaaacagtacttcttcacctgcacatgtccacgctgtgtaaagggttttgatgaggatgcactacttgaggggttcaggtgcaagagccaagcatgtgatggctttctgctgcccaactcaggtaaaaaggcttatacatgccaaaaatgtggtgcttctagagatgtggaagagataaaaaatatgagaagcaaaatactacagttatcggataaagcatcttcatttctttcatcaggaaataaggctgaagcaggttctatctacaagataatcaaacagttagagagaaatctgtaccatgctttctcaactactttgctgcacacgtgcgaaacactattgaagatatatctggaattacaagattggtggactgcgttgacatactgtagattgacaattcctgtttatgaaagagtttatccaccttttcatccgatgattggattacaattctatacttgtggaaagcttgaatgggactggttcggagggagacggcccctcactctctgccctcctgctgcctgcctactgctatactgttctcttgtgttcatgttcatataaaattcagtttcatgttcatattttcataactgtatatgttcatcttatcatacagtttgggtccttgaactttggaacactgaatccctactactctccccccataaaggctccgccgccggtgccgtggcctgcatcgcatgcccgacgctctacgcctacctgaagaagacagaccccggagtgcccgcgcagctgctggagtacgacgagcggttcgggcagtacggctgcgacttcaccttctacgactacaaccgaccggaggagctgccggcggcgatgaagcacgcctaccgagtcatcgttgccgaccctccctatctgagtaaggagtgcttggaaaaggttgccaaaacagtatctttcctcgcacgacctgaaggttcattcctgctgctgctcacaggggaagttcggatggaccgggcattggagctgctgaatgttcgtccctgcggtttcaggcctcgccactcgaacaaactaggcaacgagttccggctgttcacgaattaagatcctgctgacagacttggtggttgggagcaaagtgatggtgcccccatttaactataaactaatacaatttttgttctagagctgttccatctttatgaacatgttgcatctttgatccacagctcactgatccctccaatttaaattgtagtgacaattatttgaggaatctgtgtgctatgatgtatgattaatcaaacatttacactgttagtgtacctcattttaatttcattttaaaatacactgttagtgtatgtttcattttaatttcatcagtattctttagaatgtctcgttggcttattcagatttatagccaaaatgacattatcttggggatagttcatcagtattttttaatttcattatctcgttcggcggcggcatcccggacgggcacagcctgcacactggcgggcaggtcgtgaaggcacccaccatcgagcagaacctgtcgtgcaaccttgagtagctgtacaagggcatcaccaagaagttgaatatttctagggaaattgttgacgcaagtggctaaccagatggaccagtccctgtcagatttatgcttggttaatttctgctcgcccggtgcaggcgacgcttctccttcagacgctcaaccagtcaagaaggagtccgagagccaggcatggctcggattaggaccgaatgccgtcaagtccaacctgaacctgagctagcacacaacgacacagccaaataagacagcacagcaacctcaccaaagcctttgcaggacgatctgaaaatatgctttgccactagagtaccgaaaccataaatatcctctcgttatcgtgttttagtgttctgtttaggccgtggtcctacgccctcttgtcacatagtctggatgtaaagataagtagccagccatgactgagagaagttttttgggggggggggtgttaacacacggccactctgaattggccatgctaaggaaaatgatagtagtgcaaagagaagtatatgtcttttttctttttctttttctgaaagccagatcgtttggctctagccttgatgtatgcagaacaagtgattgtaatggattctgagtatcctcatcgtcttgctgttgcttcaccaacccaagtttgtttggattcttgccattcctgctgcagcaaatctctggtagtttatggtagcaactctagcaatctaaggtaaaaaaatagagggagaatttattatatcctttttgttc

SEQ ID NO: 80961 - DNA, 3191 bp, Zea Mays
cccgcttacctctctcggccgccatcatggaaggtccgaccccgccatcgctgtccccacgcggttgctccaaggaaggaaactctgatcccgctatccccgcccccgctctctctcgccatctccgtgcggctgctccaaggaaggaaggtccgaccccgccatcgccatccccgcgtggctgccttcccctctcgccatccccgcgcggctgctccaaggaaggaaggtccgaccccgccatcgccatccccgcgcgcccggtcgagcgccaccagccgcataagtctgggctagcgccgccggccaccattggctcggtcgagcacctcatgcccacgacggtcagtcgccgccttcatggctcagagtcgtcggtccctgcccaccaaggtcaccatgggctcgacgacgatggcaacaaggtcaaggtcgtcatcacaacccaaggttcgaggcgttcaaggcgaactctaggcacatcggcgagttcaacaagatgaaagacgttccctacaagctcggcctcaacaagaaaaaatcatcttctacgattcagagaaattatgtgaagcttcaatttgactccatgcaacaggtttagctattgacaacctcgattacattttcacagtgggagctccttcgattattaaccacagttgtgtaccaaatgcagttttgatatttgatggtaggacagcatatgttcgtgcattgcaaccgataaataaagatgaagaggtatctataagctacattgagactgcggcagtcaccaagaagagaaacaatgatctgaaacagtacttcttcacctgcacatgtccacgctgtgtaaagggttttgatgaggatgcactacttgaggggttcaggtgcaagagccaagcatgtgatggctttctgctgcccaactcaggtaaaaaggcttatacatgccaaaaatgtggtgcttctagagatgtggaagagataaaaaatatgagaagcaaaatactacagttatcggataaagcatcttcatttctttcatcaggaaataaggctgaagcaggttctatctacaagataatcaaacagttagagagaaatctgtaccatgctttctcaactactttgctgcacacgtgcgaaacactattgaagatatatctggaattacaagattggtggactgcgttgacatactgtagattgacaattcctgtttatgaaagagtttatccaccttttcatccgatgattggattacaattctatacttgtggaaagcttgaatgggactggttcggagggagacggcccctcactctctgccctcctgctgcctgcctactgctatactgttctcttgtgttcatgttcatataaaattcagtttcatgttcatattttcataactgtatatgttcatcttatcatacagtttgggtccttgaactttggaacactgaatccctactactctccccccataaagataggaaggaacacaaaagggtcaaatcaatacccttatgtctccccttctggaccaggctccgccgccggtgccgtggcctgcatcgcatgcccgacgctctacgcctacctgaagaagacagaccccggagtgcccgcgcagctgctggagtacgacgagcggttcgggcagtacggctgcgacttcaccttctacgactacaaccgaccggaggagctgccggcggcgatgaagcacgcctaccgagtcatcgttgccgaccctccctatctgagtaaggagtgcttggaaaaggttgccaaaacagtatctttcctcgcacgacctgaaggttcattcctgctgctgctcacaggggaagttcggatggaccgggcattggagctgctgaatgttcgtccctgcggtttcaggcctcgccactcgaacaaactaggcaacgagttccggctgttcacgaattaagatcctgctgacagacttggtggttgggagcaaagtgatggtgcccccatttaactataaactaatacaatttttgttctagagctgttccatctttatgaacatgttgcatctttgatccacagctcactgatccctccaatttaaattgtagtgacaattatttgaggaatctgtgtgctatgatgtatgattaatcaaacatttacactgttagtgtacctcattttaatttcattttaaaatacactgttagtgtatgtttcattttaatttcatcagtattctttagaatgtctcgttggcttattcagatttatagccaaaatgacattatcttggggatagttcatcagtattttttaatttcattatctcgttcggcggcggcatcccggacgggcacagcctgcacactggcgggcaggtcgtgaaggcacccaccatcgagcagaacctgtcgtgcaaccttgagtagctgtacaagggcatcaccaagaagttgaatatttctagggaaattgttgacgcaagtggctaaccagatggaccagtccctgtcagatttatgcttggttaatttctgctcgcccggtgcaggcgacgcttctccttcagacgctcaaccagtcaagaaggagtccgagagccaggcatggctcggattaggaccgaatgccgtcaagtccaacctgaacctgagctagcacacaacgacacagccaaataagacagcacagcaacctcaccaaagcctttgcaggacgatctgaaaatatgctttgccactagagtaccgaaaccataaatatcctctcgttatcgtgttttagtgttctgtttaggccgtggtcctacgccctcttgtcacatagtctggatgtaaagataagtagccagccatgactgagagaagttttttgggggggggggtgttaacacacggccactctgaattggccatgctaaggaaaatgatagtagtgcaaagagaagtatatgtcttttttctttttctttttctgaaagccagatcgtttggctctagccttgatgtatgcagaacaagtgattgtaatggattctgagtatcctcatcgtcttgctgttgcttcaccaacccaagtttgtttggattcttgccattcctgctgcagcaaatctctggtagtttatggtagcaactctagcaatctaaggtaaaaaaatagagggagaatttattatatcctttttgttc

SEQ ID NO: 80962 - DNA, 3774 bp, Zea Mays
ctctcggccgccatcatggaaggtccgaccccgccatcgctgtccccacgcggttgctccaaggaaggaaactctgatcccgctatccccgcccccgctctctctcgccatctccgtgcggctgctccaaggaaggaaggtccgaccccgccatcgccatccccgcgtggctgccttcccctctcgccatccccgcgcggctgctccaaggaaggaaggtccgaccccgccatcgccatccccgcgcgcccggtcgagcgccaccagccgcataagtctgggctagcgccgccggccaccattggctcggtcgagcacctcatgcccacgacggtcagtcgccgccttcatggctcagagtcgtcggtccctgcccaccaaggtcaccatgggctcgacgacgatggcaacaaggtcaaggtcgtcatcacaacccaaggtagtagctcttcagttcccccgccattccccaccacccctccaccgtctccaccgcacacagcatgcccgactctattctcctccccgaaatccccgtggcgcgcagatctagccccggctcctcgccggcacaaaccacgtgcgcgccctcgacccatggcatccccaaatcccgcccccggttcctctcccttcccgttcgcggacgacgcttccgcgcgttgacgtacgcgtccccaaatccccggttcccctcccttcctgttcgcggatggcgcttccgagccctcgacccatggcgtccccaaatcccaggttcctctcccttcccgttcgcggacggcgcttccgcgcgtcgacgttcgtgtccccaattcctgccccggttcggcgcttccccacatcgaggcaccacaccatcgccatggggtatcgacaacgtcgacagcgtgtggccccatcgttcgcagaccaacccggccacggttgccctgctgctgacggataaggacctggagtcggaggagagcatgtacgagcggtggagcagcgtgcacaccgtgtcgcgggacctcacggagaagcagagcaggttcgaggcgttcaaggcgaactctaggcacatcggcgagttcaacaagatgaaagacgttccctacaagctcggcctcaacaagaaaaaatcatcttctacgattcagagaaattatgtgaagcttcaatttgactccatgcaacaggtttagctattgacaacctcgattacattttcacagtgggagctccttcgattattaaccacagttgtgtaccaaatgcagttttgatatttgatggtaggacagcatatgttcgtgcattgcaaccgataaataaagatgaagaggtatctataagctacattgagactgcggcagtcaccaagaagagaaacaatgatctgaaacagtacttcttcacctgcacatgtccacgctgtgtaaagggttttgatgaggatgcactacttgaggggttcaggtgcaagagccaagcatgtgatggctttctgctgcccaactcaggtaaaaaggcttatacatgccaaaaatgtggtgcttctagagatgtggaagagataaaaaatatgagaagcaaaatactacagttatcggataaagcatcttcatttctttcatcaggaaataaggctgaagcaggttctatctacaagataatcaaacagttagagagaaatctgtaccatgctttctcaactactttgctgcacacgtgcgaaacactattgaagatatatctggaattacaagattggtggactgcgttgacatactgtagattgacaattcctgtttatgaaagagtttatccaccttttcatccgatgattggattacaattctatacttgtggaaagcttgaatgggactggttcggagggagacggcccctcactctctgccctcctgctgcctgcctactgctatactgttctcttgtgttcatgttcatataaaattcagtttcatgttcatattttcataactgtatatgttcatcttatcatacagtttgggtccttgaactttggaacactgaatccctactactctccccccataaagataggaaggaacacaaaagggtcaaatcaatacccttatgtctccccttctggaccaggctccgccgccggtgccgtggcctgcatcgcatgcccgacgctctacgcctacctgaagaagacagaccccggagtgcccgcgcagctgctggagtacgacgagcggttcgggcagtacggctgcgacttcaccttctacgactacaaccgaccggaggagctgccggcggcgatgaagcacgcctaccgagtcatcgttgccgaccctccctatctgagtaaggagtgcttggaaaaggttgccaaaacagtatctttcctcgcacgacctgaaggttcattcctgctgctgctcacaggggaagttcggatggaccgggcattggagctgctgaatgttcgtccctgcggtttcaggcctcgccactcgaacaaactaggcaacgagttccggctgttcacgaattaagatcctgctgacagacttggtggttgggagcaaagtgatggtgcccccatttaactataaactaatacaatttttgttctagagctgttccatctttatgaacatgttgcatctttgatccacagctcactgatccctccaatttaaattgtagtgacaattatttgaggaatctgtgtgctatgatgtatgattaatcaaacatttacactgttagtgtacctcattttaatttcattttaaaatacactgttagtgtatgtttcattttaatttcatcagtattctttagaatgtctcgttggcttattcagatttatagccaaaatgacattatcttggggatagttcatcagtattttttaatttcattatctcgttcggcggcggcatcccggacgggcacagcctgcacactggcgggcaggtcgtgaaggcacccaccatcgagcagaacctgtcgtgcaaccttgagtagctgtacaagggcatcaccaagaagttgaatatttctagggaaattgttgacgcaagtggctaaccagatggaccagtccctgtcagatttatgcttggttaatttctgctcgcccggtgcaggcgacgcttctccttcagacgctcaaccagtcaagaaggagtccgagagccaggcatggctcggattaggaccgaatgccgtcaagtccaacctgaacctgagctagcacacaacgacacagccaaataagacagcacagcaacctcaccaaagcctttgcaggacgatctgaaaatatgctttgccactagagtaccgaaaccataaatatcctctcgttatcgtgttttagtgttctgtttaggccgtggtcctacgccctcttgtcacatagtctggatgtaaagataagtagccagccatgactgagagaagttttttgggggggggggtgttaacacacggccactctgaattggccatgctaaggaaaatgatagtagtgcaaagagaagtatatgtcttttttctttttctttttctgaaagccagatcgtttggctctagccttgatgtatgcagaacaagtgattgtaatggattctgagtatcctcatcgtcttgctgttgcttcaccaacccaagtttgtttggattcttgccattcctgctgcagcaaatctctggtagtttatggtagcaactctagcaatctaaggtaaaaaaatagagggagaatttattatatcctttttgttc

SEQ ID NO: 80963 - DNA, 3950 bp, Zea Mays
ctctcggccgccatcatggaaggtccgaccccgccatcgctgtccccacgcggttgctccaaggaaggaaactctgatcccgctatccccgcccccgctctctctcgccatctccgtgcggctgctccaaggaaggaaggtccgaccccgccatcgccatccccgcgtggctgccttcccctctcgccatccccgcgcggctgctccaaggaaggaaggtccgaccccgccatcgccatccccgcgcgcccggtcgagcgccaccagccgcataagtctgggctagcgccgccggccaccattggctcggtcgagcacctcatgcccacgacggtcagtcgccgccttcatggctcagagtcgtcggtccctgcccaccaaggtcaccatgggctcgacgacgatggcaacaaggtcaaggtcgtcatcacaacccaaggtagtagctcttcagttcccccgccattccccaccacccctccaccgtctccaccgcacacagcatgcccgactctattctcctccccgaaatccccgtggcgcgcagatctagccccggctcctcgccggcacaaaccacgtgcgcgccctcgacccatggcatccccaaatcccgcccccggttcctctcccttcccgttcgcggacgacgcttccgcgcgttgacgtacgcgtccccaaatccccggttcccctcccttcctgttcgcggatggcgcttccgagccctcgacccatggcgtccccaaatcccaggttcctctcccttcccgttcgcggacggcgcttccgcgcgtcgacgttcgtgtccccaattcctgccccggttcggcgcttccccacatcgaggcaccacaccatcgccatggggtatcgacaacgtcgacagcgtgtggccccatcgttcgcagaccaacccggccacggttgccctgctgctgacggataaggacctggagtcggaggagagcatgtacgagcggtggagcagcgtgcacaccgtgtcgcgggacctcacggagaagcagagcaggttcgaggcgttcaaggcgaactctaggcacatcggcgagttcaacaagatgaaagacgttccctacaagctcggcctcaacaagaacaaaaggaaagttgagaagattgaaaatgactatgccaaatgcaagttcgttgcccaatgttttatatatggtgatagtttcagctctggaatttagctgaagttgaatgcttcatatgtttagactgaaattttggtactaaactggtagattattgttatttaaatatataaaaaaaatcatcttctacgattcagagaaattatgtgaagcttcaatttgactccatgcaacaggtttagctattgacaacctcgattacattttcacagtgggagctccttcgattattaaccacagttgtgtaccaaatgcagttttgatatttgatggtaggacagcatatgttcgtgcattgcaaccgataaataaagatgaagaggtatctataagctacattgagactgcggcagtcaccaagaagagaaacaatgatctgaaacagtacttcttcacctgcacatgtccacgctgtgtaaagggttttgatgaggatgcactacttgaggggttcaggtgcaagagccaagcatgtgatggctttctgctgcccaactcaggtaaaaaggcttatacatgccaaaaatgtggtgcttctagagatgtggaagagataaaaaatatgagaagcaaaatactacagttatcggataaagcatcttcatttctttcatcaggaaataaggctgaagcaggttctatctacaagataatcaaacagttagagagaaatctgtaccatgctttctcaactactttgctgcacacgtgcgaaacactattgaagatatatctggaattacaagattggtggactgcgttgacatactgtagattgacaattcctgtttatgaaagagtttatccaccttttcatccgatgattggattacaattctatacttgtggaaagcttgaatgggactggttcggagggagacggcccctcactctctgccctcctgctgcctgcctactgctatactgttctcttgtgttcatgttcatataaaattcagtttcatgttcatattttcataactgtatatgttcatcttatcatacagtttgggtccttgaactttggaacactgaatccctactactctccccccataaagataggaaggaacacaaaagggtcaaatcaatacccttatgtctccccttctggaccaggctccgccgccggtgccgtggcctgcatcgcatgcccgacgctctacgcctacctgaagaagacagaccccggagtgcccgcgcagctgctggagtacgacgagcggttcgggcagtacggctgcgacttcaccttctacgactacaaccgaccggaggagctgccggcggcgatgaagcacgcctaccgagtcatcgttgccgaccctccctatctgagtaaggagtgcttggaaaaggttgccaaaacagtatctttcctcgcacgacctgaaggttcattcctgctgctgctcacaggggaagttcggatggaccgggcattggagctgctgaatgttcgtccctgcggtttcaggcctcgccactcgaacaaactaggcaacgagttccggctgttcacgaattaagatcctgctgacagacttggtggttgggagcaaagtgatggtgcccccatttaactataaactaatacaatttttgttctagagctgttccatctttatgaacatgttgcatctttgatccacagctcactgatccctccaatttaaattgtagtgacaattatttgaggaatctgtgtgctatgatgtatgattaatcaaacatttacactgttagtgtacctcattttaatttcattttaaaatacactgttagtgtatgtttcattttaatttcatcagtattctttagaatgtctcgttggcttattcagatttatagccaaaatgacattatcttggggatagttcatcagtattttttaatttcattatctcgttcggcggcggcatcccggacgggcacagcctgcacactggcgggcaggtcgtgaaggcacccaccatcgagcagaacctgtcgtgcaaccttgagtagctgtacaagggcatcaccaagaagttgaatatttctagggaaattgttgacgcaagtggctaaccagatggaccagtccctgtcagatttatgcttggttaatttctgctcgcccggtgcaggcgacgcttctccttcagacgctcaaccagtcaagaaggagtccgagagccaggcatggctcggattaggaccgaatgccgtcaagtccaacctgaacctgagctagcacacaacgacacagccaaataagacagcacagcaacctcaccaaagcctttgcaggacgatctgaaaatatgctttgccactagagtaccgaaaccataaatatcctctcgttatcgtgttttagtgttctgtttaggccgtggtcctacgccctcttgtcacatagtctggatgtaaagataagtagccagccatgactgagagaagttttttgggggggggggtgttaacacacggccactctgaattggccatgctaaggaaaatgatagtagtgcaaagagaagtatatgtcttttttctttttctttttctgaaagccagatcgtttggctctagccttgatgtatgcagaacaagtgattgtaatggattctgagtatcctcatcgtcttgctgttgcttcaccaacccaagtttgtttggattcttgccattcctgctgcagcaaatctctggtagtttatggtagcaactctagcaatctaaggtaaaaaaatagagggagaatttattatatcctttttgttc

SEQ ID NO: 80964 - DNA, 2917 bp, Zea Mays
ctctcggccgccatcatggaaggtccgaccccgccatcgctgtccccacgcggttgctccaaggaaggaaactctgatcccgctatccccgcccccgctctctctcgccatctccgtgcggctgctccaaggaaggaaggtccgaccccgccatcgccatccccgcgtggctgccttcccctctcgccatccccgcgcggctgctccaaggaaggaaggtccgaccccgccatcgccatccccgcgcgcccggtcgagcgccaccagccgcataagtctgggctagcgccgccggccaccattggctcggtcgagcacctcatgcccacgacggtcagtcgccgccttcatggctcagagtcgtcggtccctgcccaccaaggtcaccatgggctcgacgacgatggcaacaaggtcaaggtcgtcatcacaacccaagaaaaaatcatcttctacgattcagagaaattatgtgaagcttcaatttgactccatgcaacaggtttagctattgacaacctcgattacattttcacagtgggagctccttcgattattaaccacagttgtgtaccaaatgcagttttgatatttgatggtaggacagcatatgttcgtgcattgcaaccgataaataaagatgaagaggtatctataagctacattgagactgcggcagtcaccaagaagagaaacaatgatctgaaacagtacttcttcacctgcacatgtccacgctgtgtaaagggttttgatgaggatgcactacttgaggggttcaggtgcaagagccaagcatgtgatggctttctgctgcccaactcagataaggctgaagcaggttctatctacaagataatcaaacagttagagagaaatctgtaccatgctttctcaactactttgctgcacacgtgcgaaacactattgaagatatatctggaattacaagattggtggactgcgttgacatactgtagattgacaattcctgtttatgaaagagtttatccaccttttcatccgatgattggattacaattctatacttgtggaaagcttgaatgggactggttcggagggagacggcccctcactctctgccctcctgctgcctgcctactgctatactgttctcttgtgttcatgttcatataaaattcagtttcatgttcatattttcataactgtatatgttcatcttatcatacagtttgggtccttgaactttggaacactgaatccctactactctccccccataaaggctccgccgccggtgccgtggcctgcatcgcatgcccgacgctctacgcctacctgaagaagacagaccccggagtgcccgcgcagctgctggagtacgacgagcggttcgggcagtacggctgcgacttcaccttctacgactacaaccgaccggaggagctgccggcggcgatgaagcacgcctaccgagtcatcgttgccgaccctccctatctgagtaaggagtgcttggaaaaggttgccaaaacagtatctttcctcgcacgacctgaaggttcattcctgctgctgctcacaggggaagttcggatggaccgggcattggagctgctgaatgttcgtccctgcggtttcaggcctcgccactcgaacaaactaggcaacgagttccggctgttcacgaattaagatcctgctgacagacttggtggttgggagcaaagtgatggtgcccccatttaactataaactaatacaatttttgttctagagctgttccatctttatgaacatgttgcatctttgatccacagctcactgatccctccaatttaaattgtagtgacaattatttgaggaatctgtgtgctatgatgtatgattaatcaaacatttacactgttagtgtacctcattttaatttcattttaaaatacactgttagtgtatgtttcattttaatttcatcagtattctttagaatgtctcgttggcttattcagatttatagccaaaatgacattatcttggggatagttcatcagtattttttaatttcattatctcgttcggcggcggcatcccggacgggcacagcctgcacactggcgggcaggtcgtgaaggcacccaccatcgagcagaacctgtcgtgcaaccttgagtagctgtacaagggcatcaccaagaagttgaatatttctagggaaattgttgacgcaagtggctaaccagatggaccagtccctgtcagatttatgcttggttaatttctgctcgcccggtgcaggcgacgcttctccttcagacgctcaaccagtcaagaaggagtccgagagccaggcatggctcggattaggaccgaatgccgtcaagtccaacctgaacctgagctagcacacaacgacacagccaaataagacagcacagcaacctcaccaaagcctttgcaggacgatctgaaaatatgctttgccactagagtaccgaaaccataaatatcctctcgttatcgtgttttagtgttctgtttaggccgtggtcctacgccctcttgtcacatagtctggatgtaaagataagtagccagccatgactgagagaagttttttgggggggggggtgttaacacacggccactctgaattggccatgctaaggaaaatgatagtagtgcaaagagaagtatatgtcttttttctttttctttttctgaaagccagatcgtttggctctagccttgatgtatgcagaacaagtgattgtaatggattctgagtatcctcatcgtcttgctgttgcttcaccaacccaagtttgtttggattcttgccattcctgctgcagcaaatctctggtagtttatggtagcaactctagcaatctaaggtaaaaaaatagagggagaatttattatatcctttttgttc

SEQ ID NO: 80965 - DNA, 3177 bp, Zea Mays
tctctcgccatctccgtgcggctgctccaaggaaggaaggtccgaccccgccatcgccatccccgcgtggctgccttcccctctcgccatccccgcgcggctgctccaaggaaggaaggtccgaccccgccatcgccatccccgcgcgcccggtcgagcgccaccagccgcataagtctgggctagcgccgccggccaccattggctcggtcgagcacctcatgcccacgacggtcagtcgccgccttcatggctcagagtcgtcggtccctgcccaccaaggtcaccatgggctcgacgacgatggcaacaaggtcaaggtcgtcatcacaacccaaggttcgaggcgttcaaggcgaactctaggcacatcggcgagttcaacaagatgaaagacgttccctacaagctcggcctcaacaagaacaaaaggaaagttgagaagattgaaaatgactatgccaaatgcaagttcgttgcccaatgttttatatatggtgatagtttcagctctggaatttagctgaagttgaatgcttcatatgtttagactgaaattttgaaaaaatcatcttctacgattcagagaaattatgtgaagcttcaatttgactccatgcaacaggtttagctattgacaacctcgattacattttcacagtgggagctccttcgattattaaccacagcatatgttcgtgcattgcaaccgataaataaagatgaagaggtatctataagctacattgagactgcggcagtcaccaagaagagaaacaatgatctgaaacagtacttcttcacctgcacatgtccacgctgtgtaaagggttttgatgaggatgcactacttgaggggttcaggtgcaagagccaagcatgtgatggctttctgctgcccaactcaggtaaaaaggcttatacatgccaaaaatgtggtgcttctagagatgtggaagagataaaaaatatgagaagcaaaatactacagttatcggataaagcatcttcatttctttcatcaggaaataaggctgaagcaggttctatctacaagataatcaaacagttagagagaaatctgtaccatgctttctcaactactttgctgcacacgtgcgaaacactattgaagatatatctggaattacaagattggtggactgcgttgacatactgtagattgacaattcctgtttatgaaagagtttatccaccttttcatccgatgattggattacaattctatacttgtggaaagcttgaatgggactggttcggagggagacggcccctcactctctgccctcctgctgcctgcctactgctatactgttctcttgtgttcatgttcatataaaattcagtttcatgttcatattttcataactgtatatgttcatcttatcatacagtttgggtccttgaactttggaacactgaatccctactactctccccccataaagataggaaggaacacaaaagggtcaaatcaatacccttatgtctccccttctggaccaggctccgccgccggtgccgtggcctgcatcgcatgcccgacgctctacgcctacctgaagaagacagaccccggagtgcccgcgcagctgctggagtacgacgagcggttcgggcagtacggctgcgacttcaccttctacgactacaaccgaccggaggagctgccggcggcgatgaagcacgcctaccgagtcatcgttgccgaccctccctatctgagtaaggagtgcttggaaaaggttgccaaaacagtatctttcctcgcacgacctgaaggttcattcctgctgctgctcacaggggaagttcggatggaccgggcattggagctgctgaatgttcgtccctgcggtttcaggcctcgccactcgaacaaactaggcaacgagttccggctgttcacgaattaagatcctgctgacagacttggtggttgggagcaaagtgatggtgcccccatttaactataaactaatacaatttttgttctagagctgttccatctttatgaacatgttgcatctttgatccacagctcactgatccctccaatttaaattgtagtgacaattatttgaggaatctgtgtgctatgatgtatgattaatcaaacatttacactgttagtgtacctcattttaatttcattttaaaatacactgttagtgtatgtttcattttaatttcatcagtattctttagaatgtctcgttggcttattcagatttatagccaaaatgacattatcttggggatagttcatcagtattttttaatttcattatctcgttcggcggcggcatcccggacgggcacagcctgcacactggcgggcaggtcgtgaaggcacccaccatcgagcagaacctgtcgtgcaaccttgagtagctgtacaagggcatcaccaagaagttgaatatttctagggaaattgttgacgcaagtggctaaccagatggaccagtccctgtcagatttatgcttggttaatttctgctcgcccggtgcaggcgacgcttctccttcagacgctcaaccagtcaagaaggagtccgagagccaggcatggctcggattaggaccgaatgccgtcaagtccaacctgaacctgagctagcacacaacgacacagccaaataagacagcacagcaacctcaccaaagcctttgcaggacgatctgaaaatatgctttgccactagagtaccgaaaccataaatatcctctcgttatcgtgttttagtgttctgtttaggccgtggtcctacgccctcttgtcacatagtctggatgtaaagataagtagccagccatgactgagagaagttttttgggggggggggtgttaacacacggccactctgaattggccatgctaaggaaaatgatagtagtgcaaagagaagtatatgtcttttttctttttctttttctgaaagccagatcgtttggctctagccttgatgtatgcagaacaagtgattgtaatggattctgagtatcctcatcgtcttgctgttgcttcaccaacccaagtttgtttggattcttgccattcctgctgcagcaaatctctggtagtttatggtagcaactctagcaatctaaggtaaaaaaatagagggagaatttattatatcctttttgttc

SEQ ID NO: 80966 - DNA, 780 bp, Zea Mays
ccagcaataaaaccagccaccctttcttcttgacaaaagacatattagtctgttgcattggcaagtccctaagcccttaataaactgaaattcagtaagcaaacatggttcaccacctggatcccacaaaaacagttgctggacagctatactgttattcagttgctgctatttatgtacatacttatattttaaatatacttcaaaaggctttattcatagcatatttaaatttgagcatgctgttatgccaccatatcttctattttactgctaggctcagcaaggttgagcatgctgttgtgtcatccataaaaaaattgacataccaaatgttattttccagttcaattgaaacttccaaaggttgaatttttttcctaattatgcattctatcataatctttatgcaatattcaaggctcgttgttgatccaagctttttacaactttataagacacaatgcattcaggctgcaagcttttgttacaaggtcagtaagccaagtcgcaatgcattcaagctgcaatcttttgctacatgtcagtaagtgttggctccataaacaattcatgctttaactagatgctatatatgtattttagtgtaaaaatgaattatcaaaatctatgcacctagaaaatccaaacaacctacattttgggacggaggaagtagctattaatatccaaatcaaaaatcacgggctataaaactataaaacagacaccactggccaatgataatggcgcggcaacgccgcgccccgtcctttctag

SEQ ID NO: 80967 - DNA, 2166 bp, Zea Mays
ctccgtatcacgtacagacgtacccaacccacgtttttcacccaaaatccacgagcacctcccccatcgtcctcacggacctcacgcgccctgcccctctcgctctccgcctccccgccccacacccatcgccacccaccagcacctccggcggcccccacccccgcctcctccccgcgtgtccgcggtctgcacccggcgtccctcgcggcgttgacgcgcgaacgtcccgtcgcccggtggtgagctcccttctctgatctaatctcgtccacacgactctgcatctgtcgttcggttggatttcgtctctgtcgctggagaaactggatcttcttcggcagggtcagcggaggacgggttctcctcccgttcgggctgccgcataggtcttcgaacatcggaaatggcgtcgtttggtcatctcttttgctcccaaccaaaacatcagaataacgttttcccgtttctctcctgtcgttgatgtttcggatgcccctcctgtttctttaatttcattccactaatgctcgagacctcataatggatgctggattgagataaatggattttaagtttccaagaaaagaaatcgactccccctgctctaagcctctaaccattcttctggcacagggacggtatccagtgtgaaagttgcgcctctgtttctaaaatgctttcgtttcctgtgttgttcctaaccaccaacagagtaacggagagaccgaaccatgagcggaggggtggaaccggagaccccgccgggtagcagcagcaggagcgggggcagcaggagcgtcggtggcaagccgccacgccaccacctcacgtctatccgccactgcgccagcatcgcccgcatcgccgccgcctccgccggattcgggctggattcggggacgctcagcttgatctcacctaccgcagacatccatccgggcttcttgcctgtgttcaggtcggggagtttcgctgatattggacccaaaacgtacatggaggacgaacatgtctgtgtggacaacctggttgagcacctcgggttctatggcccgggcatccctgcaccgggtgctttctatggggtgtttgatggccatggtggcactgatgctgcctgttttgtccggaaaaatatactgaagttcataaccgaagattgccacttccccaacagcatcgagaaggcaatcagaagcgcttttgtaaaggccgacaatgcaattgcggattcccattctcttgaccggaattctgggaccacagcattgacggtccttatatttggcaggacactgcttgttgcgaatgccggtgactgtcgagctgtattaggaaagcgaggccgagctgttgaactctctagagaccacaaacccagctgcatagttgaaaggctcagaatcgaaaacctgggtggtaccgtctttgatggctacctcaacggtcagctggctgtagcaagggcaatcggtgattggcacatgaaaggctccaagggctctgtatgccctcttacaccagaacctgagtttagggaggttaggcttactgaggaagatgagttcttgataataggctgtgatggcctttgggatgtgatgagcagccagtttgctgtttccatggtcaggaaagagctgatggaacacaatgatccacaacggtgctcgcgagagcttgtccacgaagcgcttaggcgcgactgctgtgataacctaaccgtagttgttgtgtgcttctcagcggacccaccccctcaaatcgagatcccaagattccgagtacgaagaagcatctcaatggaagggcttcataggctgaggggtgctcttgacagtaatatctgaagcttaaaagtgtcccttcggctgtaacttctgtcgtcgttgtgatttatatgtaccggtcaccatttgattgttggatgctcacgatgtaatcgagcaattaaccgacattgttctggtacgaatgagagttataggagttgatcatttttttctctggttcagaattccacttgtatgattggatgagctccctgtttattatgaaaactaaaagataatgatgtcattatgggatgaatcatgtgtatggcttggtacagattttgtccatctttgtgcatattggcaaacttataaaaattaatccttg

SEQ ID NO: 80968 - DNA, 2685 bp, Zea Mays
cgtttttcacccaaaatccacgagcacctcccccatcgtcctcacggacctcacgcgccctgcccctctcgctctccgcctccccgccccacacccatcgccacccaccagcacctccggcggcccccacccccgcctcctccccgcgtgtccgcggtctgcacccggcgtccctcgcggcgttgacgcgcgaacgtcccgtcgcccggtggtgagctcccttctctgatctaatctcgtccacacgactctgcatctgtcgttcggttggatttcgtctctgtcgctggagaaactggatcttcttcggcagggtcagcggaggacgggttctcctcccgttcgggctgccgcataggtcttcgaacatcggaaatggcgtcgtttggtcatctcttttgctcccaaccaaaacatcagaataacgttttcccgtttctctcctgtcgttgatgtttcggatgcccctcctgtttctttaatttcattccactaatgctcgagacctcataatggatgctggattgagataaatggattttaagtttccaagaaaagaaatcgactccccctgctctaagcctctaaccattcttctggcacagggacggtatccagtgtgaaagttgcgcctctgtttctaaaatgctttcgtttcctgtgttgttcctaaccaccaacagagtaacggagagaccgaaccatgagcggaggggtggaaccggagaccccgccgggtagcagcagcaggagcgggggcagcaggagcgtcggtggcaagccgccacgccaccacctcacgtctatccgccactgcgccagcatcgcccgcatcgccgccgcctccgccggattcgggctggattcggggacgctcagcttgatctcacctaccgcagacatccatccgggcttcttgcctgtgttcaggtcggggagtttcgctgatattggacccaaaacgtacatggaggacgaacatgtctgtgtggacaacctggttgagcacctcgggttctatggcccgggcatccctgcaccgggtgctttctatggggtgagttggaattgcatctgtcatcatacctaagtgaggactaactgcttttgttaaatagtatttaacaatgcctagtttttatagatctatgatttgttcttttgtgagtggcaataatgttgctatgatagcttctaggcttactagtttaatatgcctggagatgaatgaatagtcatctagtgtattcatgaatcatggtggtagaaatgattgaactcaagaggaatcggttccacatggtcaatgataaatgcctttgatcgaaaaagaagaaaacccagatgataaatgtttttcttcctattctggacctttaagtactgcacactacagatgggaattttgcgtgagaaataaatgtcttgctcttttgccatctcactttgcagatttttactgttttgtttatgaaaaaactaggtgtttgatggccatggtggcactgatgctgcctgttttgtccggaaaaatatactgaagttcataaccgaagattgccacttccccaacagcatcgagaaggcaatcagaagcgcttttgtaaaggccgacaatgcaattgcggattcccattctcttgaccggaattctgggaccacagcattgacggtccttatatttggcaggacactgcttgttgcgaatgccggtgactgtcgagctgtattaggaaagcgaggccgagctgttgaactctctagagaccacaaacccagctgcatagttgaaaggctcagaatcgaaaacctgggtggtaccgtctttgatggctacctcaacggtcagctggctgtagcaagggcaatcggtgattggcacatgaaaggctccaagggctctgtatgccctcttacaccagaacctgagtttagggaggttaggcttactgaggaagatgagttcttgataataggctgtgatggcctttgggatgtgatgagcagccagtttgctgtttccatggtcaggaaagagctgatggaacacaatgatccacaacggtgctcgcgagagcttgtccacgaagcgcttaggcgcgactgctgtgataacctaaccgtagttgttgtgtgcttctcagcggacccaccccctcaaatcgagatcccaagattccgagtacgaagaagcatctcaatggaagggcttcataggctgaggggtgctcttgacagtaatatctgaagcttaaaagtgtcccttcggctgtaacttctgtcgtcgttggtatgttgaagttttgctccacccattggtgttttgagatagtctcagaataagttttgtagaattattttggaagaaattttgttgaggtgtaggctaattaatcttttttttgttgaggcagtgatttatatgtaccggtcaccatttgattgttggatgctcacgatgtaatcgagcaattaaccgacattgttctggtacgaatgagagttataggagttgatcatttttttctctggttcagaattccacttgtatgattggatgagctccctgtttattatgaaaactaaaagataatgatgtcattatgggatgaatcatgtgtatggcttggtacagattttgtccatctttgtgcatattggcaaacttataaaaattaatccttg

SEQ ID NO: 80969 - DNA, 2202 bp, Zea Mays
ctcgtcagactttcagttcttccaatctcttgcaagcacaactgcacaagggaacaggaggaaaaaagagcgagaactcgcagctgacgcgcacacggcaagccccaatcggagccgcggaccggatcagaactaggtctcgaggcgatggcaagcggaggcgagggcgcagggagcggcgaatcccctcccgccgcctcagtggaggcggcagcggtcgaggcgacgctgcacatccggtgcgcgaacggctccaagttcacggtgcagacggacctgggcgccacggtgggcgcgttcaaggaggtcttatccggtagctgcggcgtgccagcaccgcagcagcgcctgatctacaagggccgcatcctcaaggacgagcaaaccctagacagctatggcgttgagacggatcacacaattcacttggtgcgaggtgtcgccacaccagctgcatccagtgcacctgctgctgccaacccccttgcttcatttactcctagtagtggccctgcaggtggcctgggaggcctatttccaggtgttgatgctccaggaaatgacaggccatcaggtatatttaggccaggatttccagaattagagcaagttgagcaacatttaagccagaatcccaacttgatgagggagataatgaatatgccggcaatgcaaaatctcatgaataaccctgatttaatacgtaatatgatcatgaacaacccacaaatgcgcgagatcatggatcggaatcctgatcttgcccatgtgctcaatgacccaagcgtcctccgccaaacactcgaagctgctaggaaccctgaaatcatgagagagatgatgcggaacacagacagagctatgagcaacattgagtcttctcctgaaggttttaatatgctccgccgcatgtacgaaactgtccaggagccatttctaaatgcaacaacaatgggtggggaaggaagcacagcctcaaatccattttcagctcttctcgggaatcaggggtctagccaacctggtcaaggtcaacctgcaacaaatgctccaactactggttcagaatcgacaactggaaccccagctccaaatactaatccacttccaaatccctggagcaccaatgctgggagtgcacaaggtgcaacacggactcctagtggcaatgcaagaactggtggtgttgggggcactggtgccaccggtggactgggaggattgggttcaccagaattgagtagtttgcttggtggtcttgctggcagtccaagaactggttctgctggtggtttaggaggttcgggttcaccagatttggggagtatgcttggtggttcacctgatgtttctccgttcagtcagatgttgcaaaaccctgcaatgatacagatgatgcagaacattatgtctgacccacagaccatgaaccagttgcttaacctcaacccaaatgcacgcaacctgatggaatcaaacactcatatgagggaaatgtttcaaaatccagaatttcttcgccagctgacatcgcctgagactttgcagactttattaggacagcttggtcaacatcaacctagccagggcgggaacaatgcaggcagtgccacaggtacacggggaaaccctagccttgacaccttgatgagcatgctcagcgggcttggttcgggaggtggtctaggtgttccaaatacctccagcgtgccaccggaggagctctatgccacacagcttactcaactccaagaaatggggtttattgacaccgcggagaacattcaagcactggtcgctactgctgggaatgtacatgctgcggtggaacgccttcttgggaaccttggacagtagctaacccgagcgagccagacactattcgtaaatcttaaaattgtcgcgcatatgcaggagtgttcggcttaatgttcctcaagccccagaatttgaaggcggcggcgtccatagtcccgaaaacaaaataatgaaagagtcaggcagccgtttacttttgtcatacatggtggtcttgtcttttttttttacagcgatgtattttgcaatgttgattggtgtacatacgtatcggtcggatgttacctccctgtagtctgtcttttccaactatcgattcttgatttccaatatactatcaaatcaaattattatctattctaatccaacgggtggtttcctctg

SEQ ID NO: 80970 - DNA, 2383 bp, Zea Mays
ctcgtcagactttcagttcttccaatctcttgcaagcacaactgcacaagggaacaggaggaaaaaagagcgagaactcgcagctgacgcgcacacggcaagccccaatcggagccgcggaccggatcagaactaggtctcgaggcgatggcaagcggaggcgagggcgcagggagcggcgaatcccctcccgccgcctcagtggaggcggcagcggtcgaggcgacgctgcacatccggtgcgcgaacggctccaagttcacggtgcagacggacctgggcgccacggtgggcgcgttcaaggaggtcttatccggtagctgcggcgtgccagcaccgcagcagcgcctgatctacaagggccgcatcctcaaggacgagcaaaccctagacagctatggcgttgagacggatcacacaattcacttggtgcgaggtgtcgccacaccagctgcatccagtgcacctgctgctgccaacccccttgcttcatttactcctagtagtggccctgcaggtggcctgggaggcctatttccaggtgttgatgctccaggaaatgacaggccatcaggtatatttaggccaggatttccagaattagagcaagttgagcaacatttaagccagaatcccaacttgatgagggagataatgaatatgccggcaatgcaaaatctcatgaataaccctgatttaatacgtaatatgatcatgaacaacccacaaatgcgcgagatcatggatcggaatcctgatcttgcccatgtgctcaatgacccaagcgtcctccgccaaacactcgaagctgctaggaaccctgaaatcatgagagagatgatgcggaacacagacagagctatgagcaacattgagtcttctcctgaaggttttaatatgctccgccgcatgtacgaaactgtccaggagccatttctaaatgcaacaacaatgggtggggaaggaagcacagcctcaaatccattttcagctcttctcgggaatcaggggtctagccaacctggtcaaggtcaacctgcaacaaatgctccaactactggttcagaatcgacaactggaaccccagctccaaatactaatccacttccaaatccctggagcaccaatgctgggagtgcacaaggtgcaacacggactcctagtggcaatgcaagaactggtggtgttgggggcactggtgccaccggtggactgggaggattgggttcaccagaattgagtagtttgcttggtggtcttgctggcagtccaagaactggttctgctggtggtttaggaggttcgggttcaccagatttggggagtatgcttggtggttcacctgatgtttctccgttcagtcagatgttgcaaaaccctgcaatgatacagatgatgcagaacattatgtctgacccacagaccatgaaccagttgcttaacctcaacccaaatgcacgcaacctgatggaatcaaacactcatatgagggaaatgtttcaaaatccagaatttcttcgccagctgacatcgcctgagactttgcagcaattactctcatttcagcagactttattaggacagcttggtcaacatcaacctagccagggcgggaacaatgcaggcagtgccacaggtacacggggaaaccctagccttgacaccttgatgagcatgctcagcgggcttggttcgggaggtggtctaggtgttccaaatacctccagcgtgccaccggaggagctctatgccacacagcttactcaactccaagaaatggggtttattgacaccgcggagaacattcaagcactggtcgctactgctgggaatgtacatgctgcggtggaacgccttcttgggaaccttggacagtagctaacccgagcgagccagacactattcgtaaatcttaaaattgtcgcgcatatgcaggagtgttcggcttaatgttcctcaagccccagaatttgaaggcggcggcgtccatagtcccgaaaacaaaataatgaaagagtcaggcagccgtttacttttgtcatacatggtggtcttgtcttttttttttacagcgatgtattttgcaatgttgattggtgtacatacgtatcggtcggatgttacctccctgtagtctgtcttttccaactatcgattcttgatttccaatatactatcaaatcaaattattatctattctaatccaacgggtggtttcctctgcagacttgtgtcaatactgatcgttgtgggcttgtggcattagtactgcagaaacaggtggacatgtatgggatgtgccggacgacaactccatccgggaagccagtagtcggcggggtaacgagacaggctggtgattatttcgttgatgcgctgcgca

SEQ ID NO: 80971 - DNA, 1748 bp, Zea Mays
aattcaccctcaccccttcggctattcctcgcccccttcccttctcgaggattcgcgtaatcgtcaccatgcgccgcccgtggaggcactcgggcccagggtccgccgtcgcggcgcgccacggcgccgcggacctctgcctccgcgaggtcggggacctcctgccgcgacgcttcgcccgccgcgcggccggttccgaggaccttgtaatgcggctccagattcaccggaagcttgacaggcacacgggctgcgtcaacacagtgggcttcaatgaggtcggtgacaccctcatatcggggtctgatgatcagaaggtgatgctgtgggactgggacactggcaccgtcaaattagagtttcattcaggacatggcggcaatgtgttccaggcacggttcatgccctgctcagacgatcggaccattgtcacttgtgctgctgatggcgaggtgaggcttgccaagatacaggatgctggagacgtgtccacaacattgcttggtgaacatgagggaagggctcacaatttggctatagagcctggtagtccttacattttctacagctgtggtgaggaaggctttgttcaacattttgatctcagaacaaacacagcctcaaaactatttctttgcagaaactccactaaatcagtatactcatctcttgttcacctaaatgcgcttgcaatagatccgaggaacccaaatctttttgttgttggaggaagcgatgcatatgctcgtgtgtatgacattcgcaagtgcaagtgggatggatcatctgattttagtcacgcatctgactgctattgcccaccacatcttgttgacaataagagtgttggaataacagggattgcattctctcacctgagattggagcaattgaagggtgcaaatcaacaatgctagcatctggacatgatgtttctcaacctgcacctcagacatacgtcggtcatgttaatcgtgaaacggtgaagcgtgtgtctttcattgggccaaatgatgaatatgttgccagtgggtcagactgtggccggatctttatttggagaaagggagatgggaagtttctacgagccatggagggtgatgagtgcattgtgaattgcattgagcctcatcctcatgctatggcaatcgcgagctgtggaattgataatgatgtaaaagtttggactccctctgcgattgagcgggcacctatgatacatgttgatgagctccagttgagacctcgcaagagaagagccaagctctggcgctttggcatacgagacctgttgatccaacagatactggtatcggaaaataggcaacagtcagctgaagaaggctcatcagaggaccatgaggacaacatagaattacttgatctagtgctacaggctgcagttgaaggtgtatcatcatcatcagacgaggaggaggaggacgacgacgacggcgataatgaggaggcggcggcctctgatggctctgaatagtagtcaaccgatctttcagggttgtttcaaattgtaaatatacaataataagccatcactcttctcatgtattatataatagaactatgatttattagcttgtcatttctatgttataaatctgcttttagtatgctactttaatgaaaaaattgggctaaccaaattgtgtgctatgttatgaaaatctgaaatggtgttgcgtcatatatttaattgtctgaccaaaaaaactttgtggttcatccctggg

SEQ ID NO: 80972 - DNA, 1813 bp, Zea Mays
aattcaccctcaccccttcggctattcctcgcccccttcccttctcgaggattcgcgtaatcgtcaccatgcgccgcccgtggaggcactcgggcccagggtccgccgtcgcggcgcgccacggcgccgcggacctctgcctccgcgaggtcggggacctcctgccgcgacgcttcgcccgccgcgcggccggttccgaggaccttgtaatgcggctccagattcaccggaagcttgacaggcacacgggctgcgtcaacacagtgggcttcaatgaggtcggtgacaccctcatatcggggtctgatgatcagaaggtgatgctgtgggactgggacactggcaccgtcaaattagagtttcattcaggacatggcggcaatgtgttccaggcacggttcatgccctgctcagacgatcggaccattgtcacttgtgctgctgatggcgaggtgaggcttgccaagatacaggatgctggagacgtgtccacaacattgcttggtgaacatgagggaagggctcacaatttggctatagagcctggtagtccttacattttctacagctgtgtttgatctcagaacaaacacagcctcaaaactatttctttgcagaaactccactaaatcagtatactcatctcttgttcacctaaatgcgcttgcaatagatccgaggaacccaaatctttttgttgttggaggaagcgatgcatatgctcgtgtgtatgacattcgcaagtgcaagtgggatggatcatctgattttagtcacgcatctgactgctattgcccaccacatcttgttgacaataagagtgttggaataacagggattgcattctctcacctgagtgagttgcttgtatcttacaatgaagagaatatttacctattctctaaggatggagggctgggacctgaccccaaaaaatctgttaggattggagcaattgaagggtgcaaatcaacaatgctagcatctggacatgatgtttctcaacctgcacctcagacatacgtcggtcatgttaatcgtgaaacggtgaagcgtgtgtctttcattgggccaaatgatgaatatgttgccagtgggtcagactgtggccggatctttatttggagaaagggagatgggaagtttctacgagccatggagggtgatgagtgcattgtgaattgcattgagcctcatcctcatgctatggcaatcgcgagctgtggaattgataatgatgtaaaagtttggactccctctgcgattgagcgggcacctatgatacatgttgatgagctccagttgagacctcgcaagagaagagccaagctctggcgctttggcatacgagacctgttgatccaacagatactggtatcggaaaataggcaacagtcagctgaagaaggctcatcagaggaccatgaggacaacatagaattacttgatctagtgctacaggctgcagttgaaggtgtatcatcatcatcagacgaggaggaggaggacgacgacgacggcgataatgaggaggcggcggcctctgatggctctgaatagtagtcaaccgatctttcagggttgtttcaaattgtaaatatacaataataagccatcactcttctcatgtattatataatagaactatgatttattagcttgtcatttctatgttataaatctgcttttagtatgctactttaatgaaaaaattgggctaaccaaattgtgtgctatgttatgaaaatctgaaatggtgttgcgtcatatatttaattgtctgaccaaaaaaactttgtggttcatccctggg

SEQ ID NO: 80973 - DNA, 964 bp, Zea Mays
caggatacaccgatcgttttatttgtttttgatcagccaaggtcggtatcggtacggtctcctcctcctcctccatggcctcctcggcgatgctgcaggtgttcggccagccggcgtcgacggacgtggcgcgggtcatggcgtgcctcctggagcggcagctggagttcgagctagtccgcaccgacaccttcaagcgcgggcgcaataataagctccccgagctcgtcaagatgagggatcccaccagcggccatcaggtgacgctcaagcacggcgacatcaccctcggcgattccagggacatatgccggtacgtgtgcacggagttcccgcggtggtgcaccagggacctgtacggcgcgggcgcgcatcgagcagtggctgcaggcggaggcgcacagcttcgacgcgccgagctcggcgctggtgctccacctcgccttgtcgccggccaccgccgccgagagcgagcggcagctgctgcgcgtgctggacgtgtacgacggcgcgctgggccggagcgcgtacctcgcgggagacggcttcaccctggcggacctgtcccacctccccaacgcgcactgcctccaaatttctcccaggggccgcgcgctgctggcgtccaggcccaacgtggcgcgctggtacgcggccatctcgtcgcgcccgtcgtggaggcaggtcgtcgcggcgcaggcccggaccgcgcactactaccccgccgcgttcgacccgccagcgtcaggccacgccgccgtttgaccgtcctgcctgcgcttgtgtaaaacgtactgtactgtgcgcgtttgctaacgctgtcgtgttggtatttggctagaattaataagcgtgcacgagcacgaatatagtgtgtggagtcctcgttaacatgtatccatccatcatcttaaatttaagagagtaaaatgtacgcagtgctcagcctcagatctccaatcta

SEQ ID NO: 80974 - DNA, 1716 bp, Zea Mays
ccgccgtccggtcctaggaattttccgggaaggtcactctgccgtgattcggcgcctcgaggtccatccgtctcgtcgcccgtgcatccatggttttggccggttgcagattttgctgggggcaacggagcgagaacaagttactgcagaaggaaagggcaaaggtgggggaggcgccggagatgagggatgctatcagctctgatggattatttgaaatcttgctggggtccggcatcaccggctgggcgtccccgcaaaggatcggatgccaccggccgccaggacgggctcctgtggtacaaggacggcgggcaggtcgtcgatggtgagttctccatggccgtggtccaggccaataacctattggaggaccatagccaggttgaatccgggccgcttagcacatcggagcctggactgcaaggcaccttcgtcggggtctacgatgggcacggtggcccggagacagcgcgttacatcaatgaccatctcttcaaccacttgaggagattcgcatctgagcacaagtgcatgtcagcggatgtgattcggaaggcattccgagcgactgaggagggtttcatttctgtggttagtaaccaatggtcattgagacctcaattagcagctgtaggctcttgctgtctagttggtgtggtttgcagcggaactctatatgttgcaaaccttggggactcccgtgctgttctggggagacttgtcaagggaactggggaggttttggcaatgcagctctcagcagaacacaatgcatcctatgaggaggttagacgagagctgcaggcatcacatcctgatgatccccatattgtggtcctaaaacacaatgtttggcgtgtaaagggtattatccagataacaaggtcaattggagatgtgtatctgaagaaaccagaatttaatagagaacctttgcacagcaagtttcgtcttcaggaaacttttaggagaccacttcttagttctgatccagcaattactgtccaccaaatacagccaactgataagttcatcatttttgcatctgatggactctgggaacatcttagtaatcaggaagtggttgacatggtccaaagtagcccgcgtaatggaatcgcacgaaagttagtaaagtctgcagtgcaggaagcagcgaagaagagggagatgcggtattcagacctcaagaaagttgatcggggggtgaggcggcacttccacgacgatataactgtcattgtggtatttttcgattcaaacgccatgacaactgctgcctggagcagaccctcggtctctctccgagggggtgggtttccaatccattcaaacacccttgctccattctcggttcctacagagctaaacaactcctactgaaaccacgcggtatgtgaaggagccaggcaagaggataaaaaaaaagtaaaggaaaacggagaaggaaaaacagctgttgtgatcagttgtagtgtatttcaccgttcatgttcatttaaaacattttttagattctcaagtctcaacctggtgaccagtgcactgatagcaaggtataagattagattattcttagcttttttatcctcttttttttttctcgtccttaccctttagattcactcatgggatatccgatatcaggtgcttgtacattctttggttcaacttgtgataatagttcatcgcccccctcttttcgccatacag

SEQ ID NO: 80975 - DNA, 1802 bp, Zea Mays
attaagagagatatatttaaatacgaatagaaaataggaataataaaatttggaaggggaatggtcggagagagaaagcttcctccctcttccctggtctggtcgcttctcctgtagctgtaatttttgagagtccctctcaaactttgcttgcttgcgctctccatatatcctgtggatcggagaggatgctctgatctacctgtctgttcttcgatcgagtctgagagatttgggaggaggagggaaacaaagcgaaagagcccatcttttttgtctttttggttcggtttcgtggttgcttcttttggaccccgcggaggagcccaccgtttctacaaaaacccaatctttgctgccttctcagcggtcgagatcgataggtttccagatctgaggctccgtgttctggctgtgagatcggaggcgcagcaatccgagcacgcagctagtagggaaagtatccgagaaaagttgcagattttgctgggggcaacggagcgagaacaagttactgcagaaggaaagggcaaaggtgggggaggcgccggagatgagggatgctatcagctctgatggattatttgaaatcttgctggggtccggcatcaccggctgggcgtccccgcaaaggatcggatgccaccggccgccaggacgggctcctgtggtacaaggacggcgggcaggtcgtcgatggtgagttctccatggccgtggtccaggccaataacctattggaggaccatagccaggttgaatccgggccgcttagcacatcggagcctggactgcaaggcaccttcgtcggggtctacgatgggcacggtggcccggagacagcgcgttacatcaatgaccatctcttcaaccacttgaggagattcgcatctgagcacaagtgcatgtcagcggatgtgattcggaaggcattccgagcgactgaggagggtttcatttctgtgataacaaggtcaattggagatgtgtatctgaagaaaccagaatttaatagagaacctttgcacagcaagtttcgtcttcaggaaacttttaggagaccacttcttagttctgatccagcaattactgtccaccaaatacagccaactgataagttcatcatttttgcatctgatggactctgggaacatcttagtaatcaggaagtggttgacatggtccaaagtagcccgcgtaatggaatcgcacgaaagttagtaaagtctgcagtgcaggaagcagcgaagaagagggagatgcggtattcagacctcaagaaagttgatcggggggtgaggcggcacttccacgacgatataactgtcattgtggtatttttcgattcaaacgccatgacaactgctgcctggagcagaccctcggtctctctccgagggggtgggtttccaatccattcaaacacccttgctccattctcggttcctacagagctaaacaactcctactgaaaccacgcggtatgtgaaggagccaggcaagaggataaaaaaaaagtaaaggaaaacggagaaggaaaaacagctgttgtgatcagttgtagtgtatttcaccgttcatgttcatttaaaacattttttagattctcaagtctcaacctggtgaccagtgcactgatagcaaggtataagattagattattcttagcttttttatcctcttttttttttctcgtccttaccctttagattcactcatgggatatccgatatcaggtgcttgtacattctttggttcaacttgtgataatagttcatcgcccccctcttttcgccatacag

SEQ ID NO: 80976 - DNA, 2153 bp, Zea Mays
aaaatttggaaggggaatggtcggagagagaaagcttcctccctcttccctggtctggtcgcttctcctgtagctgtaatttttgagagtccctctcaaactttgcttgcttgcgctctccatatatcctgtggatcggagaggatgctctgatctacctgtctgttcttcgatcgagtctgagagatttgggaggaggagggaaacaaagcgaaagagcccatcttttttgtctttttggttcggtttcgtggttgcttcttttggaccccgcggaggagcccaccgtttctacaaaaacccaatctttgctgccttctcagcggtcgagatcgataggtttccagatctgaggctccgtgttctggctgtgagatcggaggcgcagcaatccgagcacgcagctagtagggaaagtatccgagaaaagttgcagattttgctgggggcaacggagcgagaacaagttactgcagaaggaaagggcaaaggtgggggaggcgccggagatgagggatgctatcagctctgatggattatttgaaatcttgctggggtccggcatcaccggctgggcgtccccgcaaaggatcggatgccaccggccgccaggacgggctcctgtggtacaaggacggcgggcaggtcgtcgatggtgagttctccatggccgtggtccaggccaataacctattggaggaccatagccaggttgaatccgggccgcttagcacatcggagcctggactgcaaggcaccttcgtcggggtctacgatgggcacggtggcccggagacagcgcgttacatcaatgaccatctcttcaaccacttgaggagattcgcatctgagcacaagtgcatgtcagcggatgtgattcggaaggcattccgagcgactgaggagggtttcatttctgtggttagtaaccaatggtcattgagacctcaattagcagctgtaggctcttgctgtctagttggtgtggtttgcagcggaactctatatgttgcaaaccttggggactcccgtgctgttctggggagacttgtcaagggaactggggaggttttggcaatgcagctctcagcagaacacaatgcatcctatgaggaggttagacgagagctgcaggcatcacatcctgatgatccccatattgtggtcctaaaacacaatgtttggcgtgtaaagggtattatccagtacatgagtcacacaagataggaattggtgcatattctaggttaatccttttgtaagcggtctcggtctggtggcaattataactatgaggtcaactttgtatattttggataacaaggtcaattggagatgtgtatctgaagaaaccagaatttaatagagaacctttgcacagcaagtttcgtcttcaggaaacttttaggagaccacttcttagttctgatccagcaattactgtccaccaaatacagccaactgataagttcatcatttttgcatctgatggactctgggaacatcttagtaatcaggaagtggttgacatggtccaaagtagcccgcgtaatggaatcgcacgaaagttagtaaagtctgcagtgcaggaagcagcgaagaagagggagatgcggtattcagacctcaagaaagttgatcggggggtgaggcggcacttccacgacgatataactgtcattgtggtatttttcgattcaaacgccatgacaactgctgcctggagcagaccctcggtctctctccgagggggtgggtttccaatccattcaaacacccttgctccattctcggttcctacagagctaaacaactcctactgaaaccacgcggtatgtgaaggagccaggcaagaggataaaaaaaaagtaaaggaaaacggagaaggaaaaacagctgttgtgatcagttgtagtgtatttcaccgttcatgttcatttaaaacattttttagattctcaagtctcaacctggtgaccagtgcactgatagcaaggtataagattagattattcttagcttttttatcctcttttttttttctcgtccttaccctttagattcactcatgggatatccgatatcaggtgcttgtacattctttggttcaacttgtgataatagttcatcgcccccctcttttcgccatacag

SEQ ID NO: 80977 - DNA, 1759 bp, Zea Mays
aaaatttggaaggggaatggtcggagagagaaagcttcctccctcttccctggtctggtcgcttctcctgtagctgtaatttttgagagtccctctcaaactttgcttgcttgcgctctccatatatcctgtggatcggagaggatgctctgatctacctgtctgttcttcgatcgagtctgagagatttgggaggaggagggaaacaaagcgaaagagcccatcttttttgtctttttggttcggtttcgtggttgcttcttttggaccccgcggaggagcccaccgtttctacaaaaacccaatctttgctgccttctcagcggtcgagatcgataggtttccagatctgaggctccgtgttctggctgtgagatcggaggcgcagcaatccgagcacgcagctagtagggaaagtatccgagaaaagttgcagattttgctgggggcaacggagcgagaacaagttactgcagaaggaaagggcaaaggtgggggaggcgccggagatgagggatgctatcagctctgatggattatttgaaatcttgctggggtccggcatcaccggctgggcgtccccgcaaaggatcggatgccaccggccgccaggacgggctcctgtggtacaaggacggcgggcaggtcgtcgatggtgagttctccatggccgtggtccaggccaataacctattggaggaccatagccaggttgaatccgggccgcttagcacatcggagcctggactgcaaggcaccttcgtcggggtctacgatgggcacggtggcccggagacagcgcgttacatcaatgaccatctcttcaaccacttgaggagattcgcatctgagcacaagtgcatgtcagcggatgtgattcggaaggcattccgagcgactgaggagggtttcatttctgtggataacaaggtcaattggagatgtgtatctgaagaaaccagaatttaatagagaacctttgcacagcaagtttcgtcttcaggaaacttttaggagaccacttcttagttctgatccagcaattactgtccaccaaatacagccaactgataagttcatcatttttgcatctgatggactctgggaacatcttagtaatcaggaagtggttgacatggtccaaagtagcccgcgtaatggaatcgcacgaaagttagtaaagtctgcagtgcaggaagcagcgaagaagagggagatgcggtattcagacctcaagaaagttgatcggggggtgaggcggcacttccacgacgatataactgtcattgtggtatttttcgattcaaacgccatgacaactgctgcctggagcagaccctcggtctctctccgagggggtgggtttccaatccattcaaacacccttgctccattctcggttcctacagagctaaacaactcctactgaaaccacgcggtatgtgaaggagccaggcaagaggataaaaaaaaagtaaaggaaaacggagaaggaaaaacagctgttgtgatcagttgtagtgtatttcaccgttcatgttcatttaaaacattttttagattctcaagtctcaacctggtgaccagtgcactgatagcaaggtataagattagattattcttagcttttttatcctcttttttttttctcgtccttaccctttagattcactcatgggatatccgatatcaggtgcttgtacattctttggttcaacttgtgataatagttcatcgcccccctcttttcgccatacag

SEQ ID NO: 80978 - DNA, 2037 bp, Zea Mays
aaaatttggaaggggaatggtcggagagagaaagcttcctccctcttccctggtctggtcgcttctcctgtagctgtaatttttgagagtccctctcaaactttgcttgcttgcgctctccatatatcctgtggatcggagaggatgctctgatctacctgtctgttcttcgatcgagtctgagagatttgggaggaggagggaaacaaagcgaaagagcccatcttttttgtctttttggttcggtttcgtggttgcttcttttggaccccgcggaggagcccaccgtttctacaaaaacccaatctttgctgccttctcagcggtcgagatcgataggtttccagatctgaggctccgtgttctggctgtgagatcggaggcgcagcaatccgagcacgcagctagtagggaaagtatccgagaaaagattttgctgggggcaacggagcgagaacaagttactgcagaaggaaagggcaaaggtgggggaggcgccggagatgagggatgctatcagctctgatggattatttgaaatcttgctggggtccggcatcaccggctgggcgtccccgcaaaggatcggatgccaccggccgccaggacgggctcctgtggtacaaggacggcgggcaggtcgtcgatggtgagttctccatggccgtggtccaggccaataacctattggaggaccatagccaggttgaatccgggccgcttagcacatcggagcctggactgcaaggcaccttcgtcggggtctacgatgggcacggtggcccggagacagcgcgttacatcaatgaccatctcttcaaccacttgaggagattcgcatctgagcacaagtgcatgtcagcggatgtgattcggaaggcattccgagcgactgaggagggtttcatttctgtggttagtaaccaatggtcattgagacctcaattagcagctgtaggctcttgctgtctagttggtgtggtttgcagcggaactctatatgttgcaaaccttggggactcccgtgctgttctggggagacttgtcaagggaactggggaggttttggcaatgcagctctcagcagaacacaatgcatcctatgaggaggttagacgagagctgcaggcatcacatcctgatgatccccatattgtggtcctaaaacacaatgtttggcgtgtaaagggtattatccagataacaaggtcaattggagatgtgtatctgaagaaaccagaatttaatagagaacctttgcacagcaagtttcgtcttcaggaaacttttaggagaccacttcttagttctgatccagcaattactgtccaccaaatacagccaactgataagttcatcatttttgcatctgatggactctgggaacatcttagtaatcaggaagtggttgacatggtccaaagtagcccgcgtaatggaatcgcacgaaagttagtaaagtctgcagtgcaggaagcagcgaagaagagggagatgcggtattcagacctcaagaaagttgatcggggggtgaggcggcacttccacgacgatataactgtcattgtggtatttttcgattcaaacgccatgacaactgctgcctggagcagaccctcggtctctctccgagggggtgggtttccaatccattcaaacacccttgctccattctcggttcctacagagctaaacaactcctactgaaaccacgcggtatgtgaaggagccaggcaagaggataaaaaaaaagtaaaggaaaacggagaaggaaaaacagctgttgtgatcagttgtagtgtatttcaccgttcatgttcatttaaaacattttttagattctcaagtctcaacctggtgaccagtgcactgatagcaaggtataagattagattattcttagcttttttatcctcttttttttttctcgtccttaccctttagattcactcatgggatatccgatatcaggtgcttgtacattctttggttcaacttgtgataatagttcatcgcccccctcttttcgccatacag

SEQ ID NO: 80979 - DNA, 871 bp, Zea Mays
cttttattctcttcatagctgagatttgcattatataacaaggtcaattggagatgtgtatctgaagaaaccagaatttaatagagaacctttgcacagcaagtttcgtcttcaggaaacttttaggagaccacttcttagttctgatccagcaattactgtccaccaaatacagccaactgataagttcatcatttttgcatctgatggactctgggaacatcttagtaatcaggaagtggttgacatggtccaaagtagcccgcgtaatggaatcgcacgaaagttagtaaagtctgcagtgcaggaagcagcgaagaagagggagatgcggtattcagacctcaagaaagttgatcggggggtgaggcggcacttccacgacgatataactgtcattgtggtatttttcgattcaaacgccatgacaactgctgcctggagcagaccctcggtctctctccgagggggtgggtttccaatccattcaaacacccttgctccattctcggttcctacagagctaaacaactcctactgaaaccacgcggtatgtgaaggagccaggcaagaggataaaaaaaaagtaaaggaaaacggagaaggaaaaacagctgttgtgatcagttgtagtgtatttcaccgttcatgttcatttaaaacattttttagattctcaagtctcaacctggtgaccagtgcactgatagcaaggtataagattagattattcttagcttttttatcctcttttttttttctcgtccttaccctttagattcactcatgggatatccgatatcaggtgcttgtacattctttggttcaacttgtgataatagttcatcgcccccctcttttcgccatacag

SEQ ID NO: 80980 - DNA, 1803 bp, Zea Mays
gttttgtacttgcttccttgttagatacagatgttccatgtcttcattatcatctagaagatgttctatttcatccctgacctgataagatacaataaataaatacataaaagatcccagtacagcagcacatgagatatcaccaagattctcacaagcacgacagaaatactcagcagctcaccacaatatgatataaacaataatcttaaaggagaacaaaagtgaaccatacagtttgattccaaaaacgaaaattcaatggctcattcctctgtcttcctgcagctaaaaataatcatggctcttttaccaatccatagtggatacacaactgtaagtacatcaagcaattctttttgcatgagcatcagaccagataagaagatcataacaatttgtttgagaaaaaaggatcagagcaaaccatcaagctggattggtttgtgaatctatgcacaaagcaactaaaactataacaatttacaacatgaggcaatctaagctgcacagtcataaacagacatggtatacaggctgtttgaagaactcaatcatatctccattgttacaaatagaacagactgttggaaaccaattaattaggattatctttgtaatataattcaatggccttttcatctataaaatcgagatgcgacaacaggaaacaacaatggttataaactgtacaaattcaggtagactgaggaattaagcacacaaagtctttctttaatgataccttttgcacacgggcaagcaaacgggtaagatgactcttaaggttccgcactcgctcaaggttccttgtgcttacattcttggtcagttcgtcaagcactggagtagcatgcctctcaaggtcagacacgctaaggtccaacgatgagcacacaacctcgagtgctacctccagcacatggaactcgaatggcagctcatgctctgccccggtcgcttcattaagcgagcccttctgtttttccccattgccatcaggggcacactcaccattctcacccacccggctcctcagaggcaggtgctgcctcaattggtcaacgaaagggagcacttcgtgcatgagagggtccaacaggagcacctcctcggcagtaactatcgccctgatgaattcgaggttgatcaccatcgccttctccctagctgcagaataaatcgttctaaattactagtacgatacaaagtttgcgttttcttgctattatcaccacaaaaaaaatgatggactattaaatagggcagggagagagggggcagctgggtgtgctcaccgaggatgctggaggagcgagagaaaacggggccgaggatgcgtaggtcgcgcgggggcagtccggcgcggcggattatggaggccttgtcgagctcgacgatctcggaggcactccagcggtccaaccgcatccataggcgcgtgccggccttcttcttgttgaccttccccgacacggcaaccccgccgcccgcggtaactgagaggggagggggcagctgggcggtctgccccgccgccgccgatcccggggtcgcggacggcgaggcagcagagggggaggcgagaagagccctcgtcgcgttgtcctgcttggggagggaagggaggcggcgggcggagcgattccgcttggacgaggacgaggaggatctggtgaagaacggcagcttccggccgccggatcgcttccccatggcgttgccacggcggcgtgggcggggcggggcggggcggggcgcggcacagtgggggtgaatgggtcggacggcggggacggtcgt

SEQ ID NO: 80981 - DNA, 1561 bp, Zea Mays
acccttctttcacacacccgtcgcgctttcgggcctcggaagcttccggagacaggagacaaccagccgctccccccccccccctcccccgtgccctagacaaagaggaaaggtacgcctccggttccagagcggagaggattgcgccgcctgattggcgattgctgatagtctgccgccagtgccctcgcccgatttgctccgccgagaacaacatggggagaagctataatcacagtccatcgccaccaagaggctacaggagaagaactcgcagcccaagtcctcgtggtcggtatggaggccgtgatactgatagggacctcccaactagtcttttggtgaggaatcttcgtcgggattgtaggcctgatgaccttcgtagaccatttggaaaatttggccccgttaaagacatatatctgccaaaggattactacactcggtaaggtaccttgacttaattattgtgagtgggtgtttgcccatggacacctatgtgcaacttggagatctctccctgaactttatagtacactaaagtatatttgctccagaacaggattatgattgttgttgcttgtttttaacatattataagcatgttctttacagatttttaattattattctctgtatcgtatggtttacactgggttgctttacgcaccccctgagattaacagtgaaagtaacttttttgaagacgcaagtcttaagagtactattgaagaaaaggaagaaatagaggtttaaagagatatgcaagttatgaagagtttcaagtgtatctctaaacactgatgactgcaagggaacctagaggatttgggttcatccaatactttgatcctgaggatgcttctgatgcaaagtactatatggatgggaagatgctgcttggaagggaaattgctgttgtttttgcagaggaaaacaggaagaagccttctgacatgagggccagggaaaaaataagaggccgttcttatgatgggaggttgcgctcaaggtcacctgggttgaacggttctcctaggggtagatcacggtcccaaagccgaagctactcgccagcacctaagcgaaagcactattcaaggtccccggctcctcgacctcgggagagatctttgtcgcgttccccagctgtcaacagatcaaggagtgcaagccccattgttagcaggtctcctcataggcaggggtctctttctgttagcgagtgaggtatctcagggctctgtatgactatcttgtcgctgttatgctgaaccatatatgtttcagattatttttgttagcaccctcgtgtgtactctaggatatctgaacgtctactatgtattgggtatttccaaaatctctgatgagtgaagtgagttgtgaaccaatgaaccttgaatccttgatgttcgacgtgctgaccagtgcgcaggtgcttatgtggtatgaactatgaagttttttttcttcctctgcagctgatatggcagcgttcaggcattcatgggccatccaatcgcctgtctcattggagcaggtgagcttctccaataat

SEQ ID NO: 80982 - DNA, 1441 bp, Zea Mays
ctagttaataattttatgcttcggtgcctgtttgagtatatatgtattcgacatagccttgattcttttcttaagtgggtctgaacaacatggggagaagctataatcacagtccatcgccaccaagaggctacaggagaagaactcgcagcccaagtcctcgtggtcggtatggaggccgtgatactgatagggacctcccaactagtcttttggtgaggaatcttcgtcgggattgtaggcctgatgaccttcgtagaccatttggaaaatttggccccgttaaagacatatatctgccaaaggattactacactcggtaaggtaccttgacttaattattgtgagtgggtgtttgcccatggacacctatgtgcaacttggagatctctccctgaactttatagtacactaaagtatatttgctccagaacaggattatgattgttgttgcttgtttttaacatattataagcatgttctttacagatttttaattattattctctgtatcgtatggtttacactgggttgctttacgcaccccctgagattaacagtgaaagtaacttttttgaagacgcaagtcttaagagtactattgaagaaaaggaagaaatagaggtttaaagagatatgcaagttatgaagagtttcaagtgtatctctaaacactgatgactgcaagggaacctagaggatttgggttcatccaatactttgatcctgaggatgcttctgatgcaaagtactatatggatgggaagatgctgcttggaagggaaattgctgttgtttttgcagaggaaaacaggaagaagccttctgacatgagggccagggaaaaaataagtggcagaggccgttcttatgatgggaggttgcgctcaaggtcacctgggttgaacggttctcctaggggtagatcacggtcccaaagccgaagctactcgccagcacctaagcgaaagcactattcaaggtccccggctcctcgacctcgggagagatctttgtcgcgttccccagctgtcaacagatcaaggagtgcaagccccattgttagcaggtctcctcataggcaggggtctctttctgttagcgagtgaggtatctcagggctctgtatgactatcttgtcgctgttatgctgaaccatatatgtttcagattatttttgttagcaccctcgtgtgtactctaggatatctgaacgtctactatgtattgggtatttccaaaatctctgatgagtgaagtgagttgtgaaccaatgaaccttgaatccttgatgttcgacgtgctgaccagtgcgcaggtgcttatgtggtatgaactatgaagttttttttcttcctctgcagctgatatggcagcgttcaggcattcatgggccatccaatcgcctgtctcattggagcaggtgagcttctccaataat

SEQ ID NO: 80983 - DNA, 1421 bp, Zea Mays
gctactcggcgtaggctaaccaaaccaaaccccaccaggccacccaagcgcaaagcgctagcgatcgaactcgagcccaatccagcggaaacccccaaccctagctcccgactcgagccgatcgaccccgatccgatctaatgttccccaccgtcgacgagccctccgccgccggcgccatggtctcgtcctccttccctgacgccgacgcctacggcaacggcgactccgacggcctcgacttccccgtcgaccccaaccccaaccccgtcttctcctccccggccgctgccgcggcccccgggtccgctggcgcggctggggagcggcgccagctgttccagcgcctgtggacggacgaggacgagatcgtgatcctgcgcgccttcgcggagttcacggcgcagcgtggcacctccttcgcgtcgcaccagtacgacaccacccccttctacgaggacatgcgccgccgcctcaacaccggcttcaccaagaaccagctcgccgagaagatccgccgcctcaagcgcaagtaccgtaactgcgtcgagcgcctccgcgtcgccggctccggcttcaccttccgctccccgcacgagcaggccatctttgagatcgcccgcaccatctggcgccccgcctccgacaagcacggccgcgactccgacgacgagggcggcggcggcaacgtccacgacgccaccttcgcccccttcgccatcgacgccgccgccaacggcgactgcggcggcggtcatgaacgggggctgcggcctcatcgtggacccagcctctggtctgccaaccgcgctgtcatcagctgcggcggcggcaacggccgtgtccggcggcagcaccacggagaaccccatcctcacggcgctgttcaaggagatggtacgcgcgatgctgagcgtcgtcggcagcggcggtggcaccacggcacttcaggggctggagccaccgccccctatcgcgggggtgccgatggaaggggagaagtggcggcagcagcggatccgggagctggaggtgtacctgcgtcggatggacctgctgcaggaccaggccagggcggcgctggaggaactcaggtccgcgccgcacgccgggggcatgaacacttgattgtcttgggttcagcagctcctccagcgtcgcgtcttcttgcagatagcgcatcgtccataaccattagaaagaaagggtcatcttactggtaggtttctctaggctcgagcagcagtagaacaaggtgttttcgtctgtaatcctgattttctgtctgcgctgcagactagccgcgcgtcgtcgttcttatttatatagagcaactggtataaagagcttcctatcgtgccctatttatcctatttaaaatttatatacaaaagaatgtgagatgaggtattgcactttgc

SEQ ID NO: 80984 - DNA, 2374 bp, Zea Mays
atggtcctgccttgtgaagcagggaacaagaaagaaagaaagatgcacgttgtgcagtgtgaccctagcaaaggagagatgcgatacccccggccggaccagcgatcgccattcaaagctgccagtgccacccgccatcccctgctcccactgccactgccagcacataagccctaccagtaccagaggctaccagcagagagagaaggcgagcgcgcgggcagaacccgcgcagaaaagcaaccacctccctccgcctcccccgcagggctgggccgcaccgcatcaccctcgccctcgcgagatccccaattcgccgcaggttcctcgccggagcgagcggcccccattgtggcgtggggctgccggttccgcggccaacagtccccctcctccctgctgctggagctgccttgagtcccgcgactcgactcgagctctgctgccgtggaggcggccaaggccaaggattcaagggtattttatagatgacgaaggcagcaactatttatgggagcaagacacagagcgatgccttgcggccagggccattgcgtccagcaaatattatcagaaataaatttcccacatacaagaatggttcaaatggtatagtaatcaagctggctgatggtcccgaaataccacctctcaaggagatagttgcaaaggagactgcagatctacttgatcgtcgtcagcgtctctctgtccgtgaacttgcgatgaagtttgagaagggtctcagcactgccacattgttgtcgaatgaggttaaatggagacaagtagctttgatggagcgggatatccttttgaagaatctaaagagtgtattagagtcactgagaggtcaggtgacaggcaaaactaaggatgaaatcgaggagtctatatctatggtggagatcctcacggttcagctctccaaaagagaagctgagttggttcaacaaaaagaagaggtcacaaaattagcaaaatcattaaagcaggcttctgaagatgcaaagagaattgttgaagaagaaagagctaatgctcatacagaaatagaaactgctaagggtgctgtccaaagagttcagcaagcagttcaggagcatgagaagatgtcccaaaatactgggaagcaaaagcaagacatggaagaactaaagaaagaagttagggaagctcggaggatcaaaatgttgcatcagccaagcaaggcaatggatctggaaaatgaaatacgaattttacgtaacacatttgctgagaagtctaaggattgtgttagtcttttgaaagagttggaaacgcataaaaggttaaaagaaaatggtaccatcccttcattcgatctggagggtctccaatgcttaggatcaatgctacgtatagttggtctgagtggtactcacatggatctgtcaaatatttcaatccagtggttccgtatacatccaaaagaaagcaacaaagagattatttcaggtgccacaagaccagtatatgctctagagccacatgacgtaggacgctatttgcaagctgaaatcgacgtaggcggcgaaatcgcagtagcaaagactgctgggccagtagaccctgatgctgggttggttgattatgtggagacgctcgtaaggaaacctgaaactgaattcaatgttgttgtgcttcaatccaatggcgtcgatcagccaaaagagtcggttcatgtactaaatgtcgggaggctgcggatgaggcttactaaagggaagtcggtagtcgccaaggaattctattcctcatcgatgcagttatgtggtgtgagaggcggaggcgaagcagcctcgcaggcgatgttttggcgacccagaaacgacctcagcttggtgctagccttcgagagcactcgagaacgcaacgcagccatcatgctcgctcggcgtttcgctgtagattgcaacatcatccttgctgggccaggcgacaaaactccctggtgaacgaagatggcacctgtgctctgccgataccagataccacccagcacccaccactcctgactgtcctgctcttcctcgcgtcgtaggttcctgaaagaaggcgccgtccgcaccattttaaccgcctgggcgccgcctttctatgtcactgtgctatgttttcccagtccgcgagggttgtaatctgttgttgctgggagatgcgacagcaatgtaagctacaagtctaactgtgtttgacatatgtttaggcctcgttcggttggcctggaacggccctattccatccggatatatttggtcaggattgaaaccggaaacaactaataatggttgttcggttatgtctaactcataataaaaccagattgaaaacaggtcatttcaaccctttt

SEQ ID NO: 80985 - DNA, 2411 bp, Zea Mays
atggtcctgccttgtgaagcagggaacaagaaagaaagaaagatgcacgttgtgcagtgtgaccctagcaaaggagagatgcgatacccccggccggaccagcgatcgccattcaaagctgccagtgccacccgccatcccctgctcccactgccactgccagcacataagccctaccagtaccagaggctaccagcagagagagaaggcgagcgcgcgggcagaacccgcgcagaaaagcaaccacctccctccgcctcccccgcagggctgggccgcaccgcatcaccctcgccctcgcgagatccccaattcgccgcaggttcctcgccggagcgagcggcccccattgtggcgtggggctgccggttccgcggccaacagtccccctcctccctgctgctggagctgccttgagtcccgcgactcgactcgagctctgctgccgtggaggcggccaaggccaaggcgcgcgcattgcgagggtttttgctacctctcggattcaagggtattttatagatgacgaaggcagcaactatttatgggagcaagacacagagcgatgccttgcggccagggccattgcgtccagcaaatattatcagaaataaatttcccacatacaagaatggttcaaatggtatagtaatcaagctggctgatggtcccgaaataccacctctcaaggagatagttgcaaaggagactgcagatctacttgatcgtcgtcagcgtctctctgtccgtgaacttgcgatgaagtttgagaagggtctcagcactgccacattgttgtcgaatgaggttaaatggagacaagtagctttgatggagcgggatatccttttgaagaatctaaagagtgtattagagtcactgagaggtcaggtgacaggcaaaactaaggatgaaatcgaggagtctatatctatggtggagatcctcacggttcagctctccaaaagagaagctgagttggttcaacaaaaagaagaggtcacaaaattagcaaaatcattaaagcaggcttctgaagatgcaaagagaattgttgaagaagaaagagctaatgctcatacagaaatagaaactgctaagggtgctgtccaaagagttcagcaagcagttcaggagcatgagaagatgtcccaaaatactgggaagcaaaagcaagacatggaagaactaaagaaagaagttagggaagctcggaggatcaaaatgttgcatcagccaagcaaggcaatggatctggaaaatgaaatacgaattttacgtaacacatttgctgagaagtctaaggattgtgttagtcttttgaaagagttggaaacgcataaaaggttaaaagaaaatggtaccatcccttcattcgatctggagggtctccaatgcttaggatcaatgctacgtatagttggtctgagtggtactcacatggatctgtcaaatatttcaatccagtggttccgtatacatccaaaagaaagcaacaaagagattatttcaggtgccacaagaccagtatatgctctagagccacatgacgtaggacgctatttgcaagctgaaatcgacgtaggcggcgaaatcgcagtagcaaagactgctgggccagtagaccctgcagatgctgggttggttgattatgtggagacgctcgtaaggaaacctgaaactgaattcaatgttgttgtgcttcaatccaatggcgtcgatcagccaaaagagtcggttcatgtactaaatgtcgggaggctgcggatgaggcttactaaagggaagtcggtagtcgccaaggaattctattcctcatcgatgcagttatgtggtgtgagaggcggaggcgaagcagcctcgcaggcgatgttttggcgacccagaaacgacctcagcttggtgctagccttcgagagcactcgagaacgcaacgcagccatcatgctcgctcggcgtttcgctgtagattgcaacatcatccttgctgggccaggcgacaaaactccctggtgaacgaagatggcacctgtgctctgccgataccagataccacccagcacccaccactcctgactgtcctgctcttcctcgcgtcgtaggttcctgaaagaaggcgccgtccgcaccattttaaccgcctgggcgccgcctttctatgtcactgtgctatgttttcccagtccgcgagggttgtaatctgttgttgctgggagatgcgacagcaatgtaagctacaagtctaactgtgtttgacatatgtttaggcctcgttcggttggcctggaacggccctattccatccggatatatttggtcaggattgaaaccggaaacaactaataatggttgttcggttatgtctaactcataataaaaccagattgaaaacaggtcatttcaaccctttt

SEQ ID NO: 80986 - DNA, 2432 bp, Zea Mays
atggtcctgccttgtgaagcagggaacaagaaagaaagaaagatgcacgttgtgcagtgtgaccctagcaaaggagagatgcgatacccccggccggaccagcgatcgccattcaaagctgccagtgccacccgccatcccctgctcccactgccactgccagcacataagccctaccagtaccagaggctaccagcagagagagaaggcgagcgcgcgggcagaacccgcgcagaaaagcaaccacctccctccgcctcccccgcagggctgggccgcaccgcatcaccctcgccctcgcgagatccccaattcgccgcaggttcctcgccggagcgagcggcccccattgtggcgtggggctgccggttccgcggccaacagtccccctcctccctgctgctggagctgccttgagtcccgcgactcgactcgagctctgctgccgtggaggcggccaaggccaaggcgcgcgcattgcgagggtttttgctacctctcggattcaagggtattttatagatgacgaaggcagcaactatttatgggagcaagacacagagcgatgccttgcggccagggccattgcgtccagcaaatattatcagaaataaatttcccacatacaagaatggttcaaatggtatagtaatcaagctggctgatggtcccgaaataccacctctcaaggagatagttgcaaaggagactgcagatctacttgatcgtcgtcagcgtctctctgtccgtgaacttgcgatgaagtttgagaagggtctcagcactgccacattgttgtcgaatgaggttaaatggagacaagtagctttgatggagcgggatatccttttgaagaatctaaagagtgtattagagtcactgagaggtcaggtgacaggcaaaactaaggatgaaatcgaggagtctatatctatggtggagatcctcacggttcagctctccaaaagagaagctgagttggttcaacaaaaagaagaggtcacaaaattagcaaaatcattaaagcaggcttctgaagatgcaaagagaattgttgaagaagaaagagctaatgctcatacagaaatagaaactgctaagggtgctgtccaaagagttcagcaagcagttcaggagcatgagaagatgtcccaaaatactgggaagcaaaagcaagacatggaagaactaaagaaagaagttagggaagctcggaggatcaaaatgttgcatcagccaagcaaggcaatggatctggaaaatgaaatacgaattttacgtaacacatttgctgagaagtctaaggattgtgttagtcttttgaaagagttggaaacgcataaaaggttaaaagaaaatggtaccatcccttcattcgatctggagggtctccaatgcttaggatcaatgctacgtatagttggtctgagtggtactcacatggatctgtcaaatatttcaatccagtggttccgtatacatccaaaagaaagcaacaaagagattatttcaggtgccacaagaccagtatatgctctagagccacatgacgtaggacgctatttgcaagctgaaatcgacgtaggcggcgaaatcgcagtagcaaagactgctgggccagtagaccctgatgctgggttggttgattatgtggagacgctcgtaaggaaacctgaaactgaattcaatgttgttgtgcttcaatccaatggcgtcgatcagccaaaagagtcggttcatgtactaaatgtcgggaggctgcggatgaggcttactaaagggaagtcggtagtcgccaaggaattctattcctcatcgatgcagttatgtggtgtgagaggcggaggcgaagcagcctcgcaggcgatgttttggcgacccagaaacgacctcagcttggtgctagccttcgagagcactcgagaacgcaacgcagccatcatgctcgctcggcgtttcgctgtagattgcaacgtatgcgccttcaccaagcgctatatcatccttgctgggccaggcgacaaaactccctggtgaacgaagatggcacctgtgctctgccgataccagataccacccagcacccaccactcctgactgtcctgctcttcctcgcgtcgtaggttcctgaaagaaggcgccgtccgcaccattttaaccgcctgggcgccgcctttctatgtcactgtgctatgttttcccagtccgcgagggttgtaatctgttgttgctgggagatgcgacagcaatgtaagctacaagtctaactgtgtttgacatatgtttaggcctcgttcggttggcctggaacggccctattccatccggatatatttggtcaggattgaaaccggaaacaactaataatggttgttcggttatgtctaactcataataaaaccagattgaaaacaggtcatttcaaccctttt

SEQ ID NO: 80987 - DNA, 2037 bp, Zea Mays
atttatttgctgctaggaaatcaatcatttgtggctctctctttgattcaagggtattttatagatgacgaaggcagcaactatttatgggagcaagacacagagcgatgccttgcggccagggccattgcgtccagcaaatattatcagaaataaatttcccacatacaagaatggttcaaatggtatagtaatcaagctggctgatggtcccgaaataccacctctcaaggagatagttgcaaaggagactgcagatctacttgatcgtcgtcagcgtctctctgtccgtgaacttgcgatgaagtttgagaagggtctcagcactgccacattgttgtcgaatgaggttaaatggagacaagtagctttgatggagcgggatatccttttgaagaatctaaagagtgtattagagtcactgagaggtcaggtgacaggcaaaactaaggatgaaatcgaggagtctatatctatggtggagatcctcacggttcagctctccaaaagagaagctgagttggttcaacaaaaagaagaggtcacaaaattagcaaaatcattaaagcaggcttctgaagatgcaaagagaattgttgaagaagaaagagctaatgctcatacagaaatagaaactgctaagggtgctgtccaaagagttcagcaagcagttcaggagcatgagaagatgtcccaaaatactgggaagcaaaagcaagacatggaagaactaaagaaagaagttagggaagctcggaggatcaaaatgttgcatcagccaagcaaggcaatggatctggaaaatgaaatacgaattttacgtaacacatttgctgagaagtctaaggattgtgttagtcttttgaaagagttggaaacgcataaaaggttaaaagaaaatggtaccatcccttcattcgatctggagggtctccaatgcttaggatcaatgctacgtatagttggtctgagtggtactcacatggatctgtcaaatatttcaatccagtggttccgtatacatccaaaagaaagcaacaaagagattatttcaggtgccacaagaccagtatatgctctagagccacatgacgtaggacgctatttgcaagctgaaatcgacgtaggcggcgaaatcgcagtagcaaagactgctgggccagtagaccctgatgctgggttggttgattatgtggagacgctcgtaaggaaacctgaaactgaattcaatgttgttgtgcttcaatccaatggcgtcgatcagccaaaagagtcggttcatgtactaaatgtcgggaggctgcggatgaggcttactaaagggaagtcggtagtcgccaaggaattctattcctcatcgatgcagttatgtggtgtgagaggcggaggcgaagcagcctcgcaggcgatgttttggcgacccagaaacgacctcagcttggtgctagccttcgagagcactcgagaacgcaacgcagccatcatgctcgctcggcgtttcgctgtagattgcaacgtatgcgccttcaccaagcgctatgtacgcgtctcagaccgctgcagcattttttttttgccttaccttaatgaaatgtggttgcagatcatccttgctgggccaggcgacaaaactccctggtgaacgaagatggcacctgtgctctgccgataccagataccacccagcacccaccactcctgactgtcctgctcttcctcgcgtcgtaggttcctgaaagaaggcgccgtccgcaccattttaaccgcctgggcgccgcctttctatgtcactgtgctatgttttcccagtccgcgagggttgtaatctgttgttgctgggagatgcgacagcaatgtaagctacaagtctaactgtgtttgacatatgtttaggcctcgttcggttggcctggaacggccctattccatccggatatatttggtcaggattgaaaccggaaacaactaataatggttgttcggttatgtctaactcataataaaaccagattgaaaacaggtcatttcaaccctttt

SEQ ID NO: 80988 - DNA, 1588 bp, Zea Mays
ctccactcatgtggagcctccaacactgggtggagatcctcacggttcagctctccaaaagagaagctgagttggttcaacaaaaagaagaggtcacaaaattagcaaaatcattaaagcaggcttctgaagatgcaaagagaattgttgaagaagaaagagctaatgctcatacagaaatagaaactgctaagggtgctgtccaaagagttcagcaagcagttcaggagcatgagaagatgtcccaaaatactgggaagcaaaagcaagacatggaagaactaaagaaagaagttagggaagctcggaggatcaaaatgttgcatcagccaagcaaggcaatggatctggaaaatgaaatacgaattttacgtaacacatttgctgagaagtctaaggattgtgttagtcttttgaaagagttggaaacgcataaaaggttaaaagaaaatggtaccatcccttcattcgatctggagggtctccaatgcttaggatcaatgctacgtatagttggtctgagtggtactcacatggatctgtcaaatatttcaatccagtggttccgtatacatccaaaagaaagcaacaaagagattatttcaggtgccacaagaccagtatatgctctagagccacatgacgtaggacgctatttgcaagctgaaatcgacgtaggcggcgaaatcgcagtagcaaagactgctgggccagtagaccctgatgctgggttggttgattatgtggagacgctcgtaaggaaacctgaaactgaattcaatgttgttgtgcttcaatccaatggcgtcgatcagccaaaagagtcggttcatgtactaaatgtcgggaggctgcggatgaggcttactaaagggaagtcggtagtcgccaaggaattctattcctcatcgatgcagttatgtggtgtgagaggcggaggcgaagcagcctcgcaggcgatgttttggcgacccagaaacgacctcagcttggtgctagccttcgagagcactcgagaacgcaacgcagccatcatgctcgctcggcgtttcgctgtagattgcaacgtatgcgccttcaccaagcgctatgtacgcgtctcagaccgctgcagcattttttttttgccttaccttaatgaaatgtggttgcagatcatccttgctgggccaggcgacaaaactccctggtgaacgaagatggcacctgtgctctgccgataccagataccacccagcacccaccactcctgactgtcctgctcttcctcgcgtcgtaggttcctgaaagaaggcgccgtccgcaccattttaaccgcctgggcgccgcctttctatgtcactgtgctatgttttcccagtccgcgagggttgtaatctgttgttgctgggagatgcgacagcaatgtaagctacaagtctaactgtgtttgacatatgtttaggcctcgttcggttggcctggaacggccctattccatccggatatatttggtcaggattgaaaccggaaacaactaataatggttgttcggttatgtctaactcataataaaaccagattgaaaacaggtcatttcaaccctttt

SEQ ID NO: 80989 - DNA, 1594 bp, Zea Mays
attataagcaagcaaagcgcagacttgcataagcaaaccccagccgtcgcagacttgcataagcaagcaaagcgcaggcctcgctcggcctctcgccagttcttcctctcttcttcccgcgacgtacgtcacactgcagcctgcttgctactcttgatttatcatccctcttggtgccgagcaggcagacgtagctgctgcatctcctagctgcctgcctccgttgattatccgatcgacctgttcgacaacaacaagtgaggacgaaccaggcgatccaggtggggcccggccggcaatcaggtgaaaagttgagctgtgttgtcaagacagactgacagagacatcagtttctcgctcgcatcacatgcgtgcattctacgcgggcaagaagggcgatgagagcagtccgtcagctgatgtattagcaaccacaagagagagagggaagagaagagaacaatgagtatttattatccagcaaagagtccaaagggcccagtagcagcgttccctctacgaaacgacggccagcggaggcggagcagaacccacagagacccgttgcacaaataggcccgcgatcattccacatgggccacagacgcggggcgaatgcgtttgtaacccggtgcgcttcttcgtgatcgtgtcgacgcagaggtcggggagcgggtgggtggaggccttgctcaacagccaccccaacgtcagctccaacggcgaggtgttctccatgagggagaggagacagaacctctcctctgttctggggactcttgacaggctgtacggcatggactggctcaccagcgcggccaagaacgagtgcacggcggcgttcgggttcaagtggatgctcaaccagggactgatggaaaaccatcgcgacatcgtgaactatttgaacaggaagggtgcgatggtggtgttcctcttcaggaggaacacgctgcggaggctcatctctgtggtggccaacaactacgacaggagagcgaggcagctcaacggcgtccacaaatcacacgttcattccaaagaggaggctgaggtcctcgcaaggttcaggccggagctggacgcgccggctctgattccgagcatcagaaccgcccagcgcgccgtgagagcctgcctgcgccgcttcggcagcacgcgccacatggtcctctactacgaggacgtggtccgggacagcaggaaggcgttgtcccgggtgcaggagttcctcggggttccggcgagggagctgtccagcaagcatgtcaagatccacaccaggcccctcccggacctcgtcggcaactgggaggaggtgaggcggacgctgcgcgggacagagtacagccgattcctagatgatgatgcagagtaggtcaagtgtcgagtttctatggaggtaatacaagacaaacagtcaagcggagagatggagaaagcgatgggagttttatctccgccttttagattcctgtgtaggtatactggtttaaactcatcattgctgcttgggtagtggggtgccgcgtgggatagcaaaaggtaatgtattggttcaagtgcattacataaaccaaagtcttgaaacaaa

SEQ ID NO: 80990 - DNA, 852 bp, Zea Mays
acattacaatattgaggacctatccataaaactcacggccctactggttcgaggctgactagcactcgtcaccgttccgagaccagcgccagacgcagacggccccgaacgccggcggcggagcatcaggtcgtcgacctccgagcatcgacccgccgcgatggagaagggaaagggcctcgctcgccgctgggcggtggagctccccgacgcctcctcctcctcccccgccgtccccgacccgcccggcttcaccagatccgcgcccgacgcggacgacgccgctggagcgcgccagcgcaaggactccgaggctgcatggaaggcgcagaaagcttgggaagttgcgcaggctccgttcaagaacctgatgatgatgggatttatgatgtggatggcagggagcactgtccacctcttcagcatcggaattaccttctctgctctgtggcaacccctcaacgctctccgatctgttgggaaagtttttgaaccatttaaggacccaagggtggatactattgctcctaagttgctctttattgccctcaatttggctgccatgggattgggtatatggaagcttaatacattgggccttcttccaacaaatccatcagattgggtgtcttctctggctcctgctcgggtatgcttttgataacctgatactatatgaactaaattccctgactctgtgttcagtttttgacattgttcagtcatctttaggtttttttatgatagtttcaaagtattgttcgctttagtaattgttagctgtgtgctgtaagtagaagtgtgtaactctgtattacttatctgtatattgccagctgttatttggtgtgc

SEQ ID NO: 80991 - DNA, 5474 bp, Zea Mays
cttggctgctctttaaacgcgcaccccgctccccacgacgcccgcaggccaccgcttcatccctcccacgccgcgccctcgtgcgtccagcgtcctcgcttctttccaccgaactaccagcccccacccccctcccctgtcaaactagcgaagtcgcacgctcggctcgacggctcgagtaaataatacttcgtaaaaaataaactactaaaacgcgcacaaaaaccattccgagaggagaactaaaaaaatataaaaaatccccaaagctacctttcctcctgctctccctcccacgcctcttctcctcgccgccgccgccgccgccaccgctgagagaactaggactacgggcgggcgaagcacactggcttcctgcggacccgccgccgctccacgggcacaggcgttagccgtcgcgcggttgccctgtcagccctgatcggtgctgggcgggggtccgcggcgggctggtcgacgggcggtggcgggcgatggcgccggcgaagaggaagcgcgcagcagctgccgccgcggccgcggccgcggccaagtggaaggtgggcgacctcgtgctcgccaagatgaagggcttcccggcctggccggctatgattagtgaaccagagcagtggaagatgccttctactaaaaagaaaccgctggtttatttctatggtactaaacagattgctttctgcaattatgctgatctcgaggcattcaccgaagagaaaaaaagatccctacttgctaaaagacatggtaaaggggctgatttcctgagagcagttgatgagataattgaagtttatgattctctaaaggatataggtagcaacaaggttgacttgcctgccgaagaagtaaagccaggtgtagaaaagtttgctgaaaataatagccgcatggatactgaagatctggtcagtagctcctatatgcacaatgatagaaagatagaagatcattatgtcactaccaggagtcatgacatggtcaattctgacaggccttcagttgacgagcgatgtgttgtaaattctgctcctgatgagcctattgaaaatgtatccatccttgatgaaatgagggatatttctttgcgtactaattcattttcaaataagcaaagggatgcacagccacaaaattgctacacacgtactagggttccatctctgcggaagtcaagaagttcattaagtctggaatcaagaaaggctcaaggttctgataatgtctggttgcattctggtgaaggcacttccaaccaacctgtaactttgggggctagtaacggcaacagaatgttgaatactcctgctgaagtggatagtactagtaaccgtgaagcatctgaaaatggaactacagagacagaactgaaatcaaatggcacatcagatcttcccatgaacacagcagtaaatttcaagagaaaaagaaaatcagatagaaaacctggacctcattatagagattgtacaacaccaaataaagatgaccaattatgtgctgagtacagtgaaatccttccagattctccgaattcaaagaatgaagtaagcaagtcagatggagatgagcacttgccattggtcaaaagggcaagggtccgaatgggaaggtctcagttggaggattcaccagttgatgaaattgatgtttctaataagaagccagagcttgcaacagccttggaccaatgtgataggaatggtaaacctgcaagtcccgccaatgattactcagctgatcaggtgtctgcagtcgtaagttctgctcctaatctgtcctgcaaattggacacaactatcttgtcaaaggaaggtcatcttccttggaagaataaagaataccatccaaaaattttagcattagatgtggaagctgctttgcctccttcaaaacgcctgcatcgcgccttagaagcgatgtctgctaatgttgctgagaataccaagaatatacctgaagtgacaggaccaaatgaaatgactctaaatggctctttgttgacagcaagcagcctttctaataaatctgcagatgcagtggtcacagtatctaatagacctgtaatagttcaaagccctgaaccttctttagacacacagtttgtgcataacccatcaggcaaatgtacctcagaatcaattctacaaaataacagcattcctgattctgcttcagttccttcaaaagaaaatgatcatatcgtgttaaaaggtgatatttgtgaagaaaccctcatggatactaaaactgctaatggttcttgggattgtagtgaactaaataatgattcctgtgggaaaacttcagccctttgcatgaaattgaatcggcctgcacttaatgttacacaagccacatctgtacctgaccgattatcttcgtctttggagaaagccagtgaaaatgtggccgcaagtggtgtcaaagagacaaaaacatttggctcagctgtttgtgatgttgacagaagtgcagaaccaattgaccgttcaaacaacaatgtgacgagcaacacaatgcgacatagtgagactattgtagcggattcagtgaacaatgtgggggatacagcaagcaactcttcactggctactaaatcatccagtatacaatctgatgcagacacccggacgtctgaattgcatacattctcatctttggcattgaaagaactgaaccatagaaaaattaaagacaggagcacttctccagattcaatgccaatgaaagaacttatagctgttgcacaagctagaaggttttctcgatcaacttcctttccagataacttcctaaatgccaagtatattcctgaaacatcaataaatataccttctaaggaaggcccacacaggcagttgtcaccctcaaatcggataatcaggtctacttctggaaatgataatgttaattctaggagtccgtttgataatattcagcagaagaaattagcagcacatggagccaatgcagcgcgaaggtctttcaaagatttcctcagtacattgacaagaaccaaagaaagtatatcgcgcgcgacacgtcttgctatggaatgtgctaaatttggcattgctggtgaggcaattgacattatcgttgaacatctggaaaaggaatcaaatttgtataagagggtggatctcttctttcttgtagattcaataacacaatgctcccgcaatcagaaaggcggagctggagatgtatatccctctctcattcaggcagttctacctcgaatactctatgctgctgcacctcctggaaactcagcttgggagaatcgaaagcaatgtctcaaggttttgaaactttggcttgaaaggaaaacactttcagaatatatcatccgtcaccatattagagaaattgagactatcaacgaggcatcatttggaagttctcgccgtccttcaagaacagagagagctctaaatgaccctttgcgtgacaatgaaggaatgcttgttgatgagtatgggaggacaagaactatatgattcactgcccataaaatgaaaacatgcgctatagccctagtaatgctggttttcagctacccaacttaatttgcacaaaagtacttgaagaagaggaagaaaactcttctgaaggcaggagcttgagctttgaagctgttacacctgaacaggatgccccatataatgatgacaatgaagaatctcaaatgcctgttgagaagcatcaccatattctggaagaggttgatggtgagcttgagatggaggatgtagctccaccatctgatattggggcaaccaccaagtgccaaccagagcaaagtgacaccaatcgtgcaccatctgaccaacgcccttcagatgctggccctccacttcctgtggaccggcctccatctcctccgccattgccatcatctcctccacctgtccccgttcctcagagtgcacagatgcagcctaaattacaaatggcatctgatcccatggcgccacatcctcaaagagctacatatagtgttcaaagtcaacaacagcattctattgcagagcacccaggtaacatgaattcttctgttgcaccattgccacccccaccgtttaacagttcaggatatggagggcaacaaaatcagataccacctcccccaccaatggcaccactcaatcctcctggtccccatggcagtttccctgctcccccagcaccttaccatgggaacaactatcatcggcctccaaccacatccatgcctaacgagggatatcatcagcaaccaccaccccctccaccgcctccaaatcaattcccttctgtgccaccagaacaccaacataggccacatcactggggtaataactgtccaccgtatcccgagagatatcggtacaatggacatgatcgaggtaatcacagacatgatagaaggcatcatggacatgacagacaacaccattatgatgatagaggataccactacgatgatagaggatatcactatgatgatagaggccattactttgatgatagaagacatcattttgacgatagaggacatcactttgatgagagagctattagggggccaatgcacaatgatgccgctgaccagggaagatattcttttcctccaggtcctcctcggattcctgaccattttgaagctccaccagccccaatgcactatgggcgaccatcagatcctccgccaaggccttgtgcaggctggtctaggccgcctaggatatctgataactattctccctcgagacattctgtggagcctccagtttcacatacagctggaggtcatggtggatggagacctagataacctttttcggtatcgaagcggtgctctgatgctttccttggtctgtgggggcttaacctgtgggagagtctgtctggtgtctctgcttcaggttgaaggcacccacggaggtggagcactccaggaaagtgggagctggtacctgcctccttgtacagatgtatctcatggattctacggcggtcgggctgcctgaactgctgtttgtaccctagtaggggtttagactgcgcgaccacacgcagagctgagttgtaggggtgtagggtgtcttctatcaaccgatcgtagtcttacattgtactgtttgttagtgcaacagtcctcgattccattgctgaattcctcctggcctcatcagacgacagccagctgctctgatgtcttgccgaaactgtttgagcacagcgtacatatatgcctaaaaaagagaaatataaatcattttgcccgttgcacctgcttatatataagagcatggtcgaactaaggggtgtttggtttctaggttcgctcaattttattttatttaatatggaaattttagttaacctagaaattagtctctagaaactaaacatcttctaatgatgacttgtggttgatcatttctgtttctctagaataaaaaaat

SEQ ID NO: 80992 - DNA, 5237 bp, Zea Mays
cgtcctcgcttctttccaccgaactaccagcccccacccccctcccctgtcaaactagcgaagtcgcacgctcggctcgacggctcgagtaaataatacttcgtaaaaaataaactactaaaacgcgcacaaaaaccattccgagaggagaactaaaaaaatataaaaaatccccaaagctacctttcctcctgctctccctcccacgcctcttctcctcgccgccgccgccgccgccaccgctgagagaactaggactacgggcgggcgaagcacactggcttcctgcggacccgccgccgctccacgggcacaggcgttagccgtcgcgcggttgccctgtcagccctgatcggtgctgggcgggggtccgcggcgggctggtcgacgggcggtggcgggcgatggcgccggcgaagaggaagcgcgcagcagctgccgccgcggccgcggccgcggccaagtggaaggtgggcgacctcgtgctcgccaagatgaagggcttcccggcctggccggctatgattagtgaaccagagcagtggaagatgccttctactaaaaagaaaccgctggtttatttctatggtactaaacagattgctttctgcaattatgctgatctcgaggcattcaccgaagagaaaaaaagatccctacttgctaaaagacatggtaaaggggctgatttcctgagagcagttgatgagataattgaagtttatgattctctaaaggatataggtagcaacaaggttgacttgcctgccgaagaagtaaagccaggtgtagaaaagtttgctgaaaataatagccgcatggatactgaagatctggccttcagttgacgagcgatgtgttgtaaattctgctcctgatgagcctattgaaaatgtatccatccttgatgaaatgagggatatttctttgcgtactaattcattttcaaataagcaaagggatgcacagccacaaaattgctacacacgtactagggttccatctctgcggaagtcaagaagttcattaagtctggaatcaagaaaggctcaaggttctgataatgtctggttgcattctggtgaaggcacttccaaccaacctgtaactttgggggctagtaacggcaacagaatgttgaatactcctgctgaagtggatagtactagtaaccgtgaagcatctgaaaatggaactacagagacagaactgaaatcaaatggcacatcagatcttcccatgaacacagcagtaaatttcaagagaaaaagaaaatcagatagaaaacctggacctcattatagagattgtacaacaccaaataaagatgaccaattatgtgctgagtacagtgaaatccttccagattctccgaattcaaagaatgaagtaagcaagtcagatggagatgagcacttgccattggtcaaaagggcaagggtccgaatgggaaggtctcagttggaggattcaccagttgatgaaattgatgtttctaataagaagccagagcttgcaacagccttggaccaatgtgataggaatggtaaacctgcaagtcccgccaatgattactcagctgatcaggtgtctgcagtcgtaagttctgctcctaatctgtcctgcaaattggacacaactatcttgtcaaaggaaggtcatcttccttggaagaataaagaataccatccaaaaattttagcattagatgtggaagctgctttgcctccttcaaaacgcctgcatcgcgccttagaagcgatgtctgctaatgttgctgagaataccaagaatatacctgaagtgacaggaccaaatgaaatgactctaaatggctctttgttgacagcaagcagcctttctaataaatctgcagatgcagtggtcacagtatctaatagacctgtaatagttcaaagccctgaaccttctttagacacacagtttgtgcataacccatcaggcaaatgtacctcagaatcaattctacaaaataacagcattcctgattctgcttcagttccttcaaaagaaaatgatcatatcgtgttaaaaggtgatatttgtgaagaaaccctcatggatactaaaactgctaatggttcttgggattgtagtgaactaaataatgattcctgtgggaaaacttcagccctttgcatgaaattgaatcggcctgcacttaatgttacacaagccacatctgtacctgaccgattatcttcgtctttggagaaagccagtgaaaatgtggccgcaagtggtgtcaaagagacaaaaacatttggctcagctgtttgtgatgttgacagaagtgcagaaccaattgaccgttcaaacaacaatgtgacgagcaacacaatgcgacatagtgagactattgtagcggattcagtgaacaatgtgggggatacagcaagcaactcttcactggctactaaatcatccagtatacaatctgatgcagacacccggacgtctgaattgcatacattctcatctttggcattgaaagaactgaaccatagaaaaattaaagacaggagcacttctccagattcaatgccaatgaaagaacttatagctgttgcacaagctagaaggttttctcgatcaacttcctttccagataacttcctaaatgccaagtatattcctgaaacatcaataaatataccttctaaggaaggcccacacaggcagttgtcaccctcaaatcggataatcaggtctacttctggaaatgataatgttaattctaggagtccgtttgataatattcagcagaagaaattagcagcacatggagccaatgcagcgcgaaggtctttcaaagatttcctcagtacattgacaagaaccaaagaaagtatatcgcgcgcgacacgtcttgctatggaatgtgctaaatttggcattgctggcaattgacattatcgttgaacatctggaaaaggaatcaaatttgtataagagggtggatctcttctttcttgtagattcaataacacaatgctcccgcaatcagaaaggcggagctggagatgtatatccctctctcattcaggcagttctacctcgaatactctatgctgctgcacctcctggaaactcagcttgggagaatcgaaagcaatgtctcaaggttttgaaactttggcttgaaaggaaaacactttcagaatatatcatccgtcaccatattagagaaattgagactatcaacgaggcatcatttggaagttctcgccgtccttcaagaacagagagagctctaaatgaccctttgcgtgacaatgaaggaatgcttgttgatgagtatgggagtaatgctggttttcagctacccaacttaatttgcacaaaagtacttgaagaagaggaagaaaactcttctgaaggcaggagcttgagctttgaagctgttacacctgaacaggatgccccatataatgatgacaatgaagaatctcaaatgcctgttgagaagcatcaccatattctggaagaggttgatggtgagcttgagatggaggatgtagctccaccatctgatattggggcaaccaccaagtgccaaccagagcaaagtgacaccaatcgtgcaccatctgaccaacgcccttcagatgctggccctccacttcctgtggaccggcctccatctcctccgccattgccatcatctcctccacctgtccccgttcctcagagtgcacagatgcagcctaaattacaaatggcatctgatcccatggcgccacatcctcaaagagctacatatagtgttcaaagtcaacaacagcattctattgcagagcacccaggtaacatgaattcttctgttgcaccattgccacccccaccgtttaacagttcaggatatggagggcaacaaaatcagataccacctcccccaccaatggcaccactcaatcctcctggtccccatggcagtttccctgctcccccagcaccttaccatgggaacaactatcatcggcctccaaccacatccatgcctaacgagggatatcatcagcaaccaccaccccctccaccgcctccaaatcaattcccttctgtgccaccagaacaccaacataggccacatcactggggtaataactgtccaccgtatcccgagagatatcggtacaatggacatgatcgaggtaatcacagacatgatagaaggcatcatggacatgacagacaacaccattatgatgatagaggataccactacgatgatagaggatatcactatgatgatagaggccattactttgatgatagaagacatcattttgacgatagaggacatcactttgatgagagagctattagggggccaatgcacaatgatgccgctgaccagggaagatattcttttcctccaggtcctcctcggattcctgaccattttgaagctccaccagccccaatgcactatgggcgaccatcagatcctccgccaaggccttgtgcaggctggtctaggccgcctaggatatctgataactattctccctcgagacattctgtggagcctccagtttcacatacagctggaggtcatggtggatggagacctagataacctttttcggtatcgaagcggtgctctgatgctttccttggtctgtgggggcttaacctgtgggagagtctgtctggtgtctctgcttcaggttgaaggcacccacggaggtggagcactccaggaaagtgggagctggtacctgcctccttgtacagatgtatctcatggattctacggcggtcgggctgcctgaactgctgtttgtaccctagtaggggtttagactgcgcgaccacacgcagagctgagttgtaggggtgtagggtgtcttctatcaaccgatcgtagtcttacattgtactgtttgttagtgcaacagtcctcgattccattgctgaattcctcctggcctcatcagacgacagccagctgctctgatgtcttgccgaaactgtttgagcacagcgtacatatatgcctaaaaaagagaaatataaatcattttgcccgttgcacctgcttatatataagagcatggtcgaactaaggggtgtttggtttctaggttcgctcaattttattttatttaatatggaaattttagttaacctagaaattagtctctagaaactaaacatcttctaatgatgacttgtggttgatcatttctgtttctctagaataaaaaaat

SEQ ID NO: 80993 - DNA, 5065 bp, Zea Mays
cgtcctcgcttctttccaccgaactaccagcccccacccccctcccctgtcaaactagcgaagtcgcacgctcggctcgacggctcgagtaaataatacttcgtaaaaaataaactactaaaacgcgcacaaaaaccattccgagaggagaactaaaaaaatataaaaaatccccaaagctacctttcctcctgctctccctcccacgcctcttctcctcgccgccgccgccgccgccaccgctgagagaactaggactacgggcgggcgaagcacactggcttcctgcggacccgccgccgctccacgggcacaggcgttagccgtcgcgcggttgccctgtcagccctgatcggtgctgggcgggggtccgcggcgggctggtcgacgggcggtggcgggcgatggcgccggcgaagaggaagcgcgcagcagctgccgccgcggccgcggccgcggccaagtggaaggtgggcgacctcgtgctcgccaagatgaagggcttcccggcctggccggctatgattagtgaaccagagcagtggaagatgccttctactaaaaagaaaccgctggtttatttctatggtactaaacagattgctttctgcaattatgctgatctcgaggcattcaccgaagagaaaaaaagatccctacttgctaaaagacatggtaaaggggctgatttcctgagagcagttgatgagataattgaagtttatgattctctaaaggatataggtagcaacaaggttgacttgcctgccgaagaagtaaagccaggtgtagaaaagtttgctgaaaataatagccgcatggatactgaagatctgttgacgagcgatgtgttgtaaattctgctcctgatgagcctattgaaaatgtatccatccttgatgaaatgagggatatttctttgcgtactaattcattttcaaataagcaaagggatgcacagccacaaaattgctacacacgtactagggttccatctctgcggaagtcaagaagttcattaagtctggaatcaagaaaggctcaagataatgtctggttgcattctggtgaaggcacttccaaccaacctgtaactttgggggctagtaacggcaacagaatgttgaatactcctgctgaagtggatagtactagtaaccgtgaagcatctgaaaatggaactacagagacagaactgaaatcaaatggcacatcagatcttcccatgaacacagcagtaaatttcaagagaaaaagaaaatcagatagaaaacctggacctcattatagagattgtacaacaccaaataaagatgaccaattatgtgctgagtacagtgaaatccttccagattctccgaattcaaagaatgaagtaagcaagtcagatggagatgagcacttgccattggtcaaaagggcaagggtccgaatgggaaggtctcagttggaggattcaccagttgatgaaattgatgtttctaataagaagccagagcttgcaacagccttggaccaatgtgataggaatggtaaacctgcaagtcccgccaatgattactcagctgatcaggtgtctgcagtcgtaagttctgctcctaatctgtcctgcaaattggacacaactatcttgtcaaaggaaggtcatcttccttggaagaataaagaataccatccaaaaattttagcattagatgtggaagctgctttgcctccttcaaaacgcctgcatcgcgccttagaagcgatgtctgctaatgttgctgagaataccaagaatatacctgaagtgacaggaccaaatgaaatgactctaaatggctctttgttgacagcaagcagcctttctaataaatctgcagatgcagtggtcacagtatctaatagacctgtaatagttcaaagccctgaaccttctttagacacacagtttgtgcataacccatcaggcaaatgtacctcagaatcaattctacaaaataacagcattcctgattctgcttcagttccttcaaaagaaaatgatcatatcgtgttaaaaggtgatatttgtgaagaaaccctcatggatactaaaactgctaatggttcttgggattgtagtgaactaaataatgattcctgtgggaaaacttcagccctttgcatgaaattgaatcggcctgcacttaatgttacacaagccacatctgtacctgaccgattatcttcgtctttggagaaagccagtgaaaatgtggccgcaagtggtgtcaaagagacaaaaacatttggctcagctgtttgtgatgttgacagaagtgcagaaccaattgaccgttcaaacaacaatgtgacgagcaacacaatgcgacatagtgagactattgtagcggattcagtgaacaatgtgggggatacagcaagcaactcttcactggctactaaatcatccagtatacaatctgatgcagacacccggacgtctgaattgcatacattctcatctttggcattgaaagaactgaaccatagaaaaattaaagacaggagcacttctccagattcaatgccaatgaaagaacttatagctgttgcacaagctagaaggttttctcgatcaacttcctttccagataacttcctaaatgccaagagtccgtttgataatattcagcagaagaaattagcagcacatggagccaatgcagcgcgaaggtctttcaaagatttcctcagtacattgacaagaaccaaagaaagtatatcgcgcgcgacacgtcttgctatggaatgtgctaaatttggcattgctggtgaggcaattgacattatcgttgaacatctggaaaaggaatcaaatttgtataagagggtggatctcttctttcttgtagattcaataacacaatgctcccgcaatcagaaaggcggagctggagatgtatatccctctctcattcaggcagttctacctcgaatactctatgctgctgcacctcctggaaactcagcttgggagaatcgaaagcaatgtctcaaggttttgaaactttggcttgaaaggaaaacactttcagaatatatcatccgtcaccatattagagaaattgagactatcaacgaggcatcatttggaagttctcgccgtccttcaagaacagagagagctctaaatgaccctttgcgtgacaatgaaggaatgcttgttgatgagtatgggagtaatgctggttttcagctacccaacttaatttgcacaaaagtacttgaagaagaggaagaaaactcttctgaaggcaggagcttgagctttgaagctgttacacctgaacaggatgccccatataatgatgacaatgaagaatctcaaatgcctgttgagaagcatcaccatattctggaagaggttgatggtgagcttgagatggaggatgtagctccaccatctgatattggggcaaccaccaagtgccaaccagagcaaagtgacaccaatcgtgcaccatctgaccaacgcccttcagatgctggccctccacttcctgtggaccggcctccatctcctccgccattgccatcatctcctccacctgtccccgttcctcagagtgcacagatgcagcctaaattacaaatggcatctgatcccatggcgccacatcctcaaagagctacatatagtgttcaaagtcaacaacagcattctattgcagagcacccagttcaggatatggagggcaacaaaatcagataccacctcccccaccaatggcaccactcaatcctcctggtccccatggcagtttccctgctcccccagcaccttaccatgggaacaactatcatcggcctccaaccacatccatgcctaacgagggatatcatcagcaaccaccaccccctccaccgcctccaaatcaattcccttctgtgccaccagaacaccaacataggccacatcactggggtaataactgtccaccgtatcccgagagatatcggtacaatggacatgatcgaggtaatcacagacatgatagaaggcatcatggacatgacagacaacaccattatgatgatagaggataccactacgatgatagaggatatcactatgatgatagaggccattactttgatgatagaagacatcattttgacgatagaggacatcactttgatgagagagctattagggggccaatgcacaatgatgccgctgaccagggaagatattcttttcctccaggtcctcctcggattcctgaccattttgaagctccaccagccccaatgcactatgggcgaccatcagatcctccgccaaggccttgtgcaggctggtctaggccgcctaggatatctgataactattctccctcgagacattctgtggagcctccagtttcacatacagctggaggtcatggtggatggagacctagataacctttttcggtatcgaagcggtgctctgatgctttccttggtctgtgggggcttaacctgtgggagagtctgtctggtgtctctgcttcaggttgaaggcacccacggaggtggagcactccaggaaagtgggagctggtacctgcctccttgtacagatgtatctcatggattctacggcggtcgggctgcctgaactgctgtttgtaccctagtaggggtttagactgcgcgaccacacgcagagctgagttgtaggggtgtagggtgtcttctatcaaccgatcgtagtcttacattgtactgtttgttagtgcaacagtcctcgattccattgctgaattcctcctggcctcatcagacgacagccagctgctctgatgtcttgccgaaactgtttgagcacagcgtacatatatgcctaaaaaagagaaatataaatcattttgcccgttgcacctgcttatatataagagcatggtcgaactaaggggtgtttggtttctaggttcgctcaattttattttatttaatatggaaattttagttaacctagaaattagtctctagaaactaaacatcttctaatgatgacttgtggttgatcatttctgtttctctagaataaaaaaat

SEQ ID NO: 80994 - DNA, 5278 bp, Zea Mays
ctttccaccgaactaccagcccccacccccctcccctgtcaaactagcgaagtcgcacgctcggctcgacggctcgagtaaataatacttcgtaaaaaataaactactaaaacgcgcacaaaaaccattccgagaggagaactaaaaaaatataaaaaatccccaaagctacctttcctcctgctctccctcccacgcctcttctcctcgccgccgccgccgccgccaccgctgagagaactaggactacgggcgggcgaagcacactggcttcctgcggacccgccgccgctccacgggcacaggcgttagccgtcgcgcggttgccctgtcagccctgatcggtgctgggcgggggtccgcggcgggctggtcgacgggcggtggcgggcgatggcgccggcgaagaggaagcgcgcagcagctgccgccgcggccgcggccgcggccaagtggaaggtgggcgacctcgtgctcgccaagatgaagggcttcccggcctggccggctatgattagtgaaccagagcagtggaagatgccttctactaaaaagaaaccgctggtttatttctatggtactaaacagattgctttctgcaattatgctgatctcgaggcattcaccgaagagaaaaaaagatccctacttgctaaaagacatggtaaaggggctgatttcctgagagcagttgatgagataattgaagtttatgattctctaaaggatataggtagcaacaaggttgacttgcctgccgaagaagtaaagccaggtgtagaaaagtttgctgaaaataatagccgcatggatactgaagatctggtcagtagctcctatatgcacaatgatagaaagatagaagatcattatgtcactaccaggagtcatgacatggtcaattctgacaggccttcagttgacgagcgatgtgttgtaaattctgctcctgatgagcctattgaaaatgtatccatccttgatgaaatgagggatatttctttgcgtactaattcattttcaaataagcaaagggatgcacagccacaaaattgctacacacgtactagggttccatctctgcggaagtcaagaagttcattaagtctggaatcaagaaaggctcaaggttctgataatgtctggttgcattctggtgaaggcacttccaaccaacctgtaactttgggggctagtaacggcaacagaatgttgaatactcctgctgaagtggatagtactagtaaccgtgaagcatctgaaaatggaactacagagacagaactgaaatcaaatggcacatcagatcttcccatgaacacagcagtaaatttcaagagaaaaagaaaatcagatagaaaacctggacctcattatagagattgtacaacaccaaataaagatgaccaattatgtgctgagtacagtgaaatccttccagattctccgaattcaaagaatgaagtaagcaagtcagatggagatgagcacttgccattggtcaaaagggcaagggtccgaatgggaaggtctcagttggaggattcaccagttgatgaaattgatgtttctaataagaagccagagcttgcaacagccttggaccaatgtgataggaatggtaaacctgcaagtcccgccaatgattactcagctgatcaggtgtctgcagtcgtaagttctgctcctaatctgtcctgcaaattggacacaactatcttgtcaaaggaaggtcatcttccttggaagaataaagaataccatccaaaaattttagcattagatgtggaagctgctttgcctccttcaaaacgcctgcatcgcgccttagaagcgatgtctgctaatgttgctgagaataccaagaatatacctgaagtgacaggaccaaatgaaatgactctaaatggctctttgttgacagcaagcagcctttctaataaatctgcagatgcagtggtcacagtatctaatagacctgtaatagttcaaagccctgaaccttctttagacacacagtttgtgcataacccatcaggcaaatgtacctcagaatcaattctacaaaataacagcattcctgattctgcttcagttccttcaaaagaaaatgatcatatcgtgttaaaaggtgatatttgtgaagaaaccctcatggatactaaaactgctaatggttcttgggattgtagtgaactaaataatgattcctgtgggaaaacttcagccctttgcatgaaattgaatcggcctgcacttaatgttacacaagccacatctgtacctgaccgattatcttcgtctttggagaaagccagtgaaaatgtggccgcaagtggtgtcaaagagacaaaaacatttggctcagctgtttgtgatgttgacagaagtgcagaaccaattgaccgttcaaacaacaatgtgacgagcaacacaatgcgacatagtgagactattgtagcggattcagtgaacaatgtgggggatacagcaagcaactcttcactggctactaaatcatccagtatacaatctgatgcagacacccggacgtctgaattgcatacattctcatctttggcattgaaagaactgaaccatagaaaaattaaagacaggagcacttctccagattcaatgccaatgaaagaacttatagctgttgcacaagctagaaggttttctcgatcaacttcctttccagataacttcctaaatgccaagtatattcctgaaacatcaataaatataccttctaaggaaggcccacacaggcagttgtcaccctcaaatcggataatcaggtctacttctggaaatgataatgttaattctaggagtccgtttgataatattcagcagaagaaattagcagcacatggagccaatgcagcgcgaaggtctttcaaagatttcctcagtacattgacaagaaccaaagaaagtatatcgcgcgcgacacgtcttgctatggaatgtgctaaatttggcattgctggtgaggcaattgacattatcgttgaacatctggaaaaggaatcaaatttgtataagagggtggatctcttctttcttgtagattcaataacacaatgctcccgcaatcagaaaggcggagctggagatgtatatccctctctcattcaggcagttctacctcgaatactctatgctgctgcacctcctggaaactcagcttgggagaatcgaaagcaatgtctcaaggttttgaaactttggcttgaaaggaaaacactttcagaatatatcatccgtcaccatattagagaaattgagactatcaacgaggcatcatttggaagttctcgccgtccttcaagaacagagagagctctaaatgaccctttgcgtgacaatgaaggaatgcttgttgatgagtatgggagtaatgctggttttcagctacccaacttaatttgcacaaaagtacttgaagaagaggaagaaaactcttctgaaggcaggagcttgagctttgaagctgttacacctgaacaggatgccccatataatgatgacaatgaagaatctcaaatgcctgttgagaagcatcaccatattctggaagaggttgatggtgagcttgagatggaggatgtagctccaccatctgatattggggcaaccaccaagtgccaaccagagcaaagtgacaccaatcgtgcaccatctgaccaacgcccttcagatgctggccctccacttcctgtggaccggcctccatctcctccgccattgccatcatctcctccacctgtccccgttcctcagagtgcacagatgcagcctaaattacaaatggcatctgatcccatggcgccacatcctcaaagagctacatatagtgttcaaagtcaacaacagcattctattgcagagcacccagttcaggatatggagggcaacaaaatcagataccacctcccccaccaatggcaccactcaatcctcctggtccccatggcagtttccctgctcccccagcaccttaccatgggaacaactatcatcggcctccaaccacatccatgcctaacgagggatatcatcagcaaccaccaccccctccaccgcctccaaatcaattcccttctgtgccaccagaacaccaacataggccacatcactggggtaataactgtccaccgtatcccgagagatatcggtacaatggacatgatcgaggtaatcacagacatgatagaaggcatcatggacatgacagacaacaccattatgatgatagaggataccactacgatgatagaggatatcactatgatgatagaggccattactttgatgatagaagacatcattttgacgatagaggacatcactttgatgagagagctattagggggccaatgcacaatgatgccgctgaccagggaagatattcttttcctccagccatgtgcaggtcctcctcggattcctgaccattttgaagctccaccagccccaatgcactatgggcgaccatcagatcctccgccaaggccttgtgcaggctggtctaggccgcctaggatatctgataactattctccctcgagacattctgtggagcctccagtttcacatacagctggaggtcatggtggatggagacctagataacctttttcggtatcgaagcggtgctctgatgctttccttggtctgtgggggcttaacctgtgggagagtctgtctggtgtctctgcttcaggttgaaggcacccacggaggtggagcactccaggaaagtgggagctggtacctgcctccttgtacagatgtatctcatggattctacggcggtcgggctgcctgaactgctgtttgtaccctagtaggggtttagactgcgcgaccacacgcagagctgagttgtaggggtgtagggtgtcttctatcaaccgatcgtagtcttacattgtactgtttgttagtgcaacagtcctcgattccattgctgaattcctcctggcctcatcagacgacagccagctgctctgatgtcttgccgaaactgtttgagcacagcgtacatatatgcctaaaaaagagaaatataaatcattttgcccgttgcacctgcttatatataagagcatggtcgaactaaggggtgtttggtttctaggttcgctcaattttattttatttaatatggaaattttagttaacctagaaattagtctctagaaactaaacatcttctaatgatgacttgtggttgatcatttctgtttctctagaataaaaaaat

SEQ ID NO: 80995 - DNA, 5422 bp, Zea Mays
ctttccaccgaactaccagcccccacccccctcccctgtcaaactagcgaagtcgcacgctcggctcgacggctcgagtaaataatacttcgtaaaaaataaactactaaaacgcgcacaaaaaccattccgagaggagaactaaaaaaatataaaaaatccccaaagctacctttcctcctgctctccctcccacgcctcttctcctcgccgccgccgccgccgccaccgctgagagaactaggactacgggcgggcgaagcacactggcttcctgcggacccgccgccgctccacgggcacaggcgttagccgtcgcgcggttgccctgtcagccctgatcggtgctgggcgggggtccgcggcgggctggtcgacgggcggtggcgggcgatggcgccggcgaagaggaagcgcgcagcagctgccgccgcggccgcggccgcggccaagtggaaggtgggcgacctcgtgctcgccaagatgaagggcttcccggcctggccggctatgattagtgaaccagagcagtggaagatgccttctactaaaaagaaaccgctggtttatttctatggtactaaacagattgctttctgcaattatgctgatctcgaggcattcaccgaagagaaaaaaagatccctacttgctaaaagacatggtaaaggggctgatttcctgagagcagttgatgagataattgaagtttatgattctctaaaggatataggtagcaacaaggttgacttgcctgccgaagaagtaaagccaggtgtagaaaagtttgctgaaaataatagccgcatggatactgaagatctggtcagtagctcctatatgcacaatgatagaaagatagaagatcattatgtcactaccaggagtcatgacatggtcaattctgacaggccttcagttgacgagcgatgtgttgtaaattctgctcctgatgagcctattgaaaatgtatccatccttgatgaaatgagggatatttctttgcgtactaattcattttcaaataagcaaagggatgcacagccacaaaattgctacacacgtactagggttccatctctgcggaagtcaagaagttcattaagtctggaatcaagaaaggctcaagataatgtctggttgcattctggtgaaggcacttccaaccaacctgtaactttgggggctagtaacggcaacagaatgttgaatactcctgctgaagtggatagtactagtaaccgtgaagcatctgaaaatggaactacagagacagaactgaaatcaaatggcacatcagatcttcccatgaacacagcagtaaatttcaagagaaaaagaaaatcagatagaaaacctggacctcattatagagattgtacaacaccaaataaagatgaccaattatgtgctgagtacagtgaaatccttccagattctccgaattcaaagaatgaagtaagcaagtcagatggagatgagcacttgccattggtcaaaagggcaagggtccgaatgggaaggtctcagttggaggattcaccagttgatgaaattgatgtttctaataagaagccagagcttgcaacagccttggaccaatgtgataggaatggtaaacctgcaagtcccgccaatgattactcagctgatcaggtgtctgcagtcgtaagttctgctcctaatctgtcctgcaaattggacacaactatcttgtcaaaggaaggtcatcttccttggaagaataaagaataccatccaaaaattttagcattagatgtggaagctgctttgcctccttcaaaacgcctgcatcgcgccttagaagcgatgtctgctaatgttgctgagaataccaagaatatacctgaagtgacaggaccaaatgaaatgactctaaatggctctttgttgacagcaagcagcctttctaataaatctgcagatgcagtggtcacagtatctaatagacctgtaatagttcaaagccctgaaccttctttagacacacagtttgtgcataacccatcaggcaaatgtacctcagaatcaattctacaaaataacagcattcctgattctgcttcagttccttcaaaagaaaatgatcatatcgtgttaaaaggtgatatttgtgaagaaaccctcatggatactaaaactgctaatggttcttgggattgtagtgaactaaataatgattcctgtgggaaaacttcagccctttgcatgaaattgaatcggcctgcacttaatgttacacaagccacatctgtacctgaccgattatcttcgtctttggagaaagccagtgaaaatgtggccgcaagtggtgtcaaagagacaaaaacatttggctcagctgtttgtgatgttgacagaagtgcagaaccaattgaccgttcaaacaacaatgtgacgagcaacacaatgcgacatagtgagactattgtagcggattcagtgaacaatgtgggggatacagcaagcaactcttcactggctactaaatcatccagtatacaatctgatgcagacacccggacgtctgaattgctccctttggaacaaaggttttacaaaacacaggaatatccgagtatgaaaaagttctatgaagtacttattgcttcactttgttttgctatttttgcacatggcttcaggcatacattctcatctttggcattgaaagaactgaaccatagaaaaattaaagacaggagcacttctccagattcaatgccaatgaaagaacttatagctgttgcacaagctagaaggttttctcgatcaacttcctttccagataacttcctaaatgccaagtatattcctgaaacatcaataaatataccttctaaggaaggcccacacaggcagttgtcaccctcaaatcggataatcaggtctacttctggaaatgataatgttaattctaggagtccgtttgataatattcagcagaagaaattagcagcacatggagccaatgcagcgcgaaggtctttcaaagatttcctcagtacattgacaagaaccaaagaaagtatatcgcgcgcgacacgtcttgctatggaatgtgctaaatttggcattgctggtgaggcaattgacattatcgttgaacatctggaaaaggaatcaaatttgtataagagggtggatctcttctttcttgtagattcaataacacaatgctcccgcaatcagaaaggcggagctggagatgtatatccctctctcattcaggcagttctacctcgaatactctatgctgctgcacctcctggaaactcagcttgggagaatcgaaagcaatgtctcaaggttttgaaactttggcttgaaaggaaaacactttcagaatatatcatccgtcaccatattagagaaattgagactatcaacgaggcatcatttggaagttctcgccgtccttcaagaacagagagagctctaaatgaccctttgcgtgacaatgaaggaatgcttgttgatgagtatgggagtaatgctggttttcagctacccaacttaatttgcacaaaagtacttgaagaagaggaagaaaactcttctgaaggcaggagcttgagctttgaagctgttacacctgaacaggatgccccatataatgatgacaatgaagaatctcaaatgcctgttgagaagcatcaccatattctggaagaggttgatggtgagcttgagatggaggatgtagctccaccatctgatattggggcaaccaccaagtgccaaccagagcaaagtgacaccaatcgtgcaccatctgaccaacgcccttcagatgctggccctccacttcctgtggaccggcctccatctcctccgccattgccatcatctcctccacctgtccccgttcctcagagtgcacagatgcagcctaaattacaaatggcatctgatcccatggcgccacatcctcaaagagctacatatagtgttcaaagtcaacaacagcattctattgcagagcacccaggtaacatgaattcttctgttgcaccattgccacccccaccgtttaacagttcaggatatggagggcaacaaaatcagataccacctcccccaccaatggcaccactcaatcctcctggtccccatggcagtttccctgctcccccagcaccttaccatgggaacaactatcatcggcctccaaccacatccatgcctaacgagggatatcatcagcaaccaccaccccctccaccgcctccaaatcaattcccttctgtgccaccagaacaccaacataggccacatcactggggtaataactgtccaccgtatcccgagagatatcggtacaatggacatgatcgaggtaatcacagacatgatagaaggcatcatggacatgacagacaacaccattatgatgatagaggataccactacgatgatagaggatatcactatgatgatagaggccattactttgatgatagaagacatcattttgacgatagaggacatcactttgatgagagagctattagggggccaatgcacaatgatgccgctgaccagggaagatattcttttcctccaggtcctcctcggattcctgaccattttgaagctccaccagccccaatgcactatgggcgaccatcagatcctccgccaaggccttgtgcaggctggtctaggccgcctaggatatctgataactattctccctcgagacattctgtggagcctccagtttcacatacagctggaggtcatggtggatggagacctagataacctttttcggtatcgaagcggtgctctgatgctttccttggtctgtgggggcttaacctgtgggagagtctgtctggtgtctctgcttcaggttgaaggcacccacggaggtggagcactccaggaaagtgggagctggtacctgcctccttgtacagatgtatctcatggattctacggcggtcgggctgcctgaactgctgtttgtaccctagtaggggtttagactgcgcgaccacacgcagagctgagttgtaggggtgtagggtgtcttctatcaaccgatcgtagtcttacattgtactgtttgttagtgcaacagtcctcgattccattgctgaattcctcctggcctcatcagacgacagccagctgctctgatgtcttgccgaaactgtttgagcacagcgtacatatatgcctaaaaaagagaaatataaatcattttgcccgttgcacctgcttatatataagagcatggtcgaactaaggggtgtttggtttctaggttcgctcaattttattttatttaatatggaaattttagttaacctagaaattagtctctagaaactaaacatcttctaatgatgacttgtggttgatcatttctgtttctctagaataaaaaaat

SEQ ID NO: 80996 - DNA, 5436 bp, Zea Mays
ctttccaccgaactaccagcccccacccccctcccctgtcaaactagcgaagtcgcacgctcggctcgacggctcgagtaaataatacttcgtaaaaaataaactactaaaacgcgcacaaaaaccattccgagaggagaactaaaaaaatataaaaaatccccaaagctacctttcctcctgctctccctcccacgcctcttctcctcgccgccgccgccgccgccaccgctgagagaactaggactacgggcgggcgaagcacactggcttcctgcggacccgccgccgctccacgggcacaggcgttagccgtcgcgcggttgccctgtcagccctgatcggtgctgggcgggggtccgcggcgggctggtcgacgggcggtggcgggcgatggcgccggcgaagaggaagcgcgcagcagctgccgccgcggccgcggccgcggccaagtggaaggtgggcgacctcgtgctcgccaagatgaagggcttcccggcctggccggctatgattagtgaaccagagcagtggaagatgccttctactaaaaagaaaccgctggtttatttctatggtactaaacagattgctttctgcaattatgctgatctcgaggcattcaccgaagagaaaaaaagatccctacttgctaaaagacatggtaaaggggctgatttcctgagagcagttgatgagataattgaagtttatgattctctaaaggatataggtagcaacaaggttgacttgcctgccgaagaagtaaagccaggtgtagaaaagtttgctgaaaataatagccgcatggatactgaagatctggtcagtagctcctatatgcacaatgatagaaagatagaagatcattatgtcactaccaggagtcatgacatggtcaattctgacaggccttcagttgacgagcgatgtgttgtaaattctgctcctgatgagcctattgaaaatgtatccatccttgatgaaatgagggatatttctttgcgtactaattcattttcaaataagcaaagggatgcacagccacaaaattgctacacacgtactagggttccatctctgcggaagtcaagaagttcattaagtctggaatcaagaaaggctcaaggttctgataatgtctggttgcattctggtgaaggcacttccaaccaacctgtaactttgggggctagtaacggcaacagaatgttgaatactcctgctgaagtggatagtactagtaaccgtgaagcatctgaaaatggaactacagagacagaactgaaatcaaatggcacatcagatcttcccatgaacacagcagtaaatttcaagagaaaaagaaaatcagatagaaaacctggacctcattatagagattgtacaacaccaaataaagatgaccaattatgtgctgagtacagtgaaatccttccagattctccgaattcaaagaatgaagtaagcaagtcagatggagatgagcacttgccattggtcaaaagggcaagggtccgaatgggaaggtctcagttggaggattcaccagttgatgaaattgatgtttctaataagaagccagagcttgcaacagccttggaccaatgtgataggaatggtaaacctgcaagtcccgccaatgattactcagctgatcaggtgtctgcagtcgtaagttctgctcctaatctgtcctgcaaattggacacaactatcttgtcaaaggaaggtcatcttccttggaagaataaagaataccatccaaaaattttagcattagatgtggaagctgctttgcctccttcaaaacgcctgcatcgcgccttagaagcgatgtctgctaatgttgctgagaataccaagaatatacctgaagtgacaggaccaaatgaaatgactctaaatggctctttgttgacagcaagcagcctttctaataaatctgcagatgcagtggtcacagtatctaatagacctgtaatagttcaaagccctgaaccttctttagacacacagtttgtgcataacccatcaggcaaatgtacctcagaatcaattctacaaaataacagcattcctgattctgcttcagttccttcaaaagaaaatgatcatatcgtgttaaaaggtgatatttgtgaagaaaccctcatggatactaaaactgctaatggttcttgggattgtagtgaactaaataatgattcctgtgggaaaacttcagccctttgcatgaaattgaatcggcctgcacttaatgttacacaagccacatctgtacctgaccgattatcttcgtctttggagaaagccagtgaaaatgtggccgcaagtggtgtcaaagagacaaaaacatttggctcagctgtttgtgatgttgacagaagtgcagaaccaattgaccgttcaaacaacaatgtgacgagcaacacaatgcgacatagtgagactattgtagcggattcagtgaacaatgtgggggatacagcaagcaactcttcactggctactaaatcatccagtatacaatctgatgcagacacccggacgtctgaattggctttaggctccctttggaacaaaggttttacaaaacacaggaatatccgagtatgaaaaagttctatgaagtacttattgcttcactttgttttgctatttttgcacatggcttcaggcatacattctcatctttggcattgaaagaactgaaccatagaaaaattaaagacaggagcacttctccagattcaatgccaatgaaagaacttatagctgttgcacaagctagaaggttttctcgatcaacttcctttccagataacttcctaaatgccaagtatattcctgaaacatcaataaatataccttctaaggaaggcccacacaggcagttgtcaccctcaaatcggataatcaggtctacttctggaaatgataatgttaattctaggagtccgtttgataatattcagcagaagaaattagcagcacatggagccaatgcagcgcgaaggtctttcaaagatttcctcagtacattgacaagaaccaaagaaagtatatcgcgcgcgacacgtcttgctatggaatgtgctaaatttggcattgctggtgaggcaattgacattatcgttgaacatctggaaaaggaatcaaatttgtataagagggtggatctcttctttcttgtagattcaataacacaatgctcccgcaatcagaaaggcggagctggagatgtatatccctctctcattcaggcagttctacctcgaatactctatgctgctgcacctcctggaaactcagcttgggagaatcgaaagcaatgtctcaaggttttgaaactttggcttgaaaggaaaacactttcagaatatatcatccgtcaccatattagagaaattgagactatcaacgaggcatcatttggaagttctcgccgtccttcaagaacagagagagctctaaatgaccctttgcgtgacaatgaaggaatgcttgttgatgagtatgggagtaatgctggttttcagctacccaacttaatttgcacaaaagtacttgaagaagaggaagaaaactcttctgaaggcaggagcttgagctttgaagctgttacacctgaacaggatgccccatataatgatgacaatgaagaatctcaaatgcctgttgagaagcatcaccatattctggaagaggttgatggtgagcttgagatggaggatgtagctccaccatctgatattggggcaaccaccaagtgccaaccagagcaaagtgacaccaatcgtgcaccatctgaccaacgcccttcagatgctggccctccacttcctgtggaccggcctccatctcctccgccattgccatcatctcctccacctgtccccgttcctcagagtgcacagatgcagcctaaattacaaatggcatctgatcccatggcgccacatcctcaaagagctacatatagtgttcaaagtcaacaacagcattctattgcagagcacccaggtaacatgaattcttctgttgcaccattgccacccccaccgtttaacagttcaggatatggagggcaacaaaatcagataccacctcccccaccaatggcaccactcaatcctcctggtccccatggcagtttccctgctcccccagcaccttaccatgggaacaactatcatcggcctccaaccacatccatgcctaacgagggatatcatcagcaaccaccaccccctccaccgcctccaaatcaattcccttctgtgccaccagaacaccaacataggccacatcactggggtaataactgtccaccgtatcccgagagatatcggtacaatggacatgatcgaggtaatcacagacatgatagaaggcatcatggacatgacagacaacaccattatgatgatagaggataccactacgatgatagaggatatcactatgatgatagaggccattactttgatgatagaagacatcattttgacgatagaggacatcactttgatgagagagctattagggggccaatgcacaatgatgccgctgaccagggaagatattcttttcctccaggtcctcctcggattcctgaccattttgaagctccaccagccccaatgcactatgggcgaccatcagatcctccgccaaggccttgtgcaggctggtctaggccgcctaggatatctgataactattctccctcgagacattctgtggagcctccagtttcacatacagctggaggtcatggtggatggagacctagataacctttttcggtatcgaagcggtgctctgatgctttccttggtctgtgggggcttaacctgtgggagagtctgtctggtgtctctgcttcaggttgaaggcacccacggaggtggagcactccaggaaagtgggagctggtacctgcctccttgtacagatgtatctcatggattctacggcggtcgggctgcctgaactgctgtttgtaccctagtaggggtttagactgcgcgaccacacgcagagctgagttgtaggggtgtagggtgtcttctatcaaccgatcgtagtcttacattgtactgtttgttagtgcaacagtcctcgattccattgctgaattcctcctggcctcatcagacgacagccagctgctctgatgtcttgccgaaactgtttgagcacagcgtacatatatgcctaaaaaagagaaatataaatcattttgcccgttgcacctgcttatatataagagcatggtcgaactaaggggtgtttggtttctaggttcgctcaattttattttatttaatatggaaattttagttaacctagaaattagtctctagaaactaaacatcttctaatgatgacttgtggttgatcatttctgtttctctagaataaaaaaat

SEQ ID NO: 80997 - DNA, 5080 bp, Zea Mays
ctttccaccgaactaccagcccccacccccctcccctgtcaaactagcgaagtcgcacgctcggctcgacggctcgagtaaataatacttcgtaaaaaataaactactaaaacgcgcacaaaaaccattccgagaggagaactaaaaaaatataaaaaatccccaaagctacctttcctcctgctctccctcccacgcctcttctcctcgccgccgccgccgccgccaccgctgagagaactaggactacgggcgggcgaagcacactggcttcctgcggacccgccgccgctccacgggcacaggcgttagccgtcgcgcggttgccctgtcagccctgatcggtgctgggcgggggtccgcggcgggctggtcgacgggcggtggcgggcgatggcgccggcgaagaggaagcgcgcagcagctgccgccgcggccgcggccgcggccaagtggaaggtgggcgacctcgtgctcgccaagatgaagggcttcccggcctggccggctatgattagtgaaccagagcagtggaagatgccttctactaaaaagaaaccgctggtttatttctatggtactaaacagattgctttctgcaattatgctgatctcgaggcattcaccgaagagaaaaaaagatccctacttgctaaaagacatggtaaaggggctgatttcctgagagcagttgatgagataattgaagtttatgattctctaaaggatataggtagcaacaaggttgacttgcctgccgaagaagtaaagccaggtgtagaaaagtttgctgaaaataatagccgcatggatactgaagatctggccttcagttgacgagcgatgtgttgtaaattctgctcctgatgagcctattgaaaatgtatccatccttgatgaaatgagggatatttctttgcgtactaattcattttcaaataagcaaagggatgcacagccacaaaattgctacacacgtactagggttccatctctgcggaagtcaagaagttcattaagtctggaatcaagaaaggctcaagataatgtctggttgcattctggtgaaggcacttccaaccaacctgtaactttgggggctagtaacggcaacagaatgttgaatactcctgctgaagtggatagtactagtaaccgtgaagcatctgaaaatggaactacagagacagaactgaaatcaaatggcacatcagatcttcccatgaacacagcagtaaatttcaagagaaaaagaaaatcagatagaaaacctggacctcattatagagattgtacaacaccaaataaagatgaccaattatgtgctgagtacagtgaaatccttccagattctccgaattcaaagaatgaagtaagcaagtcagatggagatgagcacttgccattggtcaaaagggcaagggtccgaatgggaaggtctcagttggaggattcaccagttgatgaaattgatgtttctaataagaagccagagcttgcaacagccttggaccaatgtgataggaatggtaaacctgcaagtcccgccaatgattactcagctgatcaggtgtctgcagtcgtaagttctgctcctaatctgtcctgcaaattggacacaactatcttgtcaaaggaaggtcatcttccttggaagaataaagaataccatccaaaaattttagcattagatgtggaagctgctttgcctccttcaaaacgcctgcatcgcgccttagaagcgatgtctgctaatgttgctgagaataccaagaatatacctgaagtgacaggaccaaatgaaatgactctaaatggctctttgttgacagcaagcagcctttctaataaatctgcagatgcagtggtcacagtatctaatagacctgtaatagttcaaagccctgaaccttctttagacacacagtttgtgcataacccatcaggcaaatgtacctcagaatcaattctacaaaataacagcattcctgattctgcttcagttccttcaaaagaaaatgatcatatcgtgttaaaaggtgatatttgtgaagaaaccctcatggatactaaaactgctaatggttcttgggattgtagtgaactaaataatgattcctgtgggaaaacttcagccctttgcatgaaattgaatcggcctgcacttaatgttacacaagccacatctgtacctgaccgattatcttcgtctttggagaaagccagtgaaaatgtggccgcaagtggtgtcaaagagacaaaaacatttggctcagctgtttgtgatgttgacagaagtgcagaaccaattgaccgttcaaacaacaatgtgacgagcaacacaatgcgacatagtgagactattgtagcggattcagtgaacaatgtgggggatacagcaagcaactcttcactggctactaaatcatccagtatacaatctgatgcagacacccggacgtctgaattgcatacattctcatctttggcattgaaagaactgaaccatagaaaaattaaagacaggagcacttctccagattcaatgccaatgaaagaacttatagctgttgcacaagctagaaggcagttgtcaccctcaaatcggataatcaggtctacttctggaaatgataatgttaattctaggagtccgtttgataatattcagcagaagaaattagcagcacatggagccaatgcagcgcgaaggtctttcaaagatttcctcagtacattgacaagaaccaaagaaagtatatcgcgcgcgacacgtcttgctatggaatgtgctaaatttggcattgctggtgaggcaattgacattatcgttgaacatctggaaaaggaatcaaatttgtataagagggtggatctcttctttcttgtagattcaataacacaatgctcccgcaatcagaaaggcggagctggagatgtatatccctctctcattcaggcagttctacctcgaatactctatgctgctgcacctcctggaaactcagcttgggagaatcgaaagcaatgtctcaaggttttgaaactttggcttgaaaggaaaacactttcagaatatatcatccgtcaccatattagagaaattgagactatcaacgaggcatcatttggaagttctcgccgtccttcaagaacagagagagctctaaatgaccctttgcgtgacaatgaaggaatgcttgttgatgagtatgggagtaatgctggttttcagctacccaacttaatttgcacaaaagtacttgaagaagaggaagaaaactcttctgaaggcaggagcttgagctttgaagctgttacacctgaacaggatgccccatataatgatgacaatgaagaatctcaaatgcctgttgagaagcatcaccatattctggaagaggttgatggtgagcttgagatggaggatgtagctccaccatctgatattggggcaaccaccaagtgccaaccagagcaaagtgacaccaatcgtgcaccatctgaccaacgcccttcagatgctggccctccacttcctgtggaccggcctccatctcctccgccattgccatcatctcctccacctgtccccgttcctcagagtgcacagatgcagcctaaattacaaatggcatctgatcccatggcgccacatcctcaaagagctacatatagtgttcaaagtcaacaacagcattctattgcagagcacccagttcaggatatggagggcaacaaaatcagataccacctcccccaccaatggcaccactcaatcctcctggtccccatggcagtttccctgctcccccagcaccttaccatgggaacaactatcatcggcctccaaccacatccatgcctaacgagggatatcatcagcaaccaccaccccctccaccgcctccaaatcaattcccttctgtgccaccagaacaccaacataggccacatcactggggtaataactgtccaccgtatcccgagagatatcggtacaatggacatgatcgaggtaatcacagacatgatagaaggcatcatggacatgacagacaacaccattatgatgatagaggataccactacgatgatagaggatatcactatgatgatagaggccattactttgatgatagaagacatcattttgacgatagaggacatcactttgatgagagagctattagggggccaatgcacaatgatgccgctgaccagggaagatattcttttcctccaggtcctcctcggattcctgaccattttgaagctccaccagccccaatgcactatgggcgaccatcagatcctccgccaaggccttgtgcaggctggtctaggccgcctaggatatctgataactattctccctcgagacattctgtggagcctccagtttcacatacagctggaggtcatggtggatggagacctagataacctttttcggtatcgaagcggtgctctgatgctttccttggtctgtgggggcttaacctgtgggagagtctgtctggtgtctctgcttcaggttgaaggcacccacggaggtggagcactccaggaaagtgggagctggtacctgcctccttgtacagatgtatctcatggattctacggcggtcgggctgcctgaactgctgtttgtaccctagtaggggtttagactgcgcgaccacacgcagagctgagttgtaggggtgtagggtgtcttctatcaaccgatcgtagtcttacattgtactgtttgttagtgcaacagtcctcgattccattgctgaattcctcctggcctcatcagacgacagccagctgctctgatgtcttgccgaaactgtttgagcacagcgtacatatatgcctaaaaaagagaaatataaatcattttgcccgttgcacctgcttatatataagagcatggtcgaactaaggggtgtttggtttctaggttcgctcaattttattttatttaatatggaaattttagttaacctagaaattagtctctagaaactaaacatcttctaatgatgacttgtggttgatcatttctgtttctctagaataaaaaaat

SEQ ID NO: 80998 - DNA, 5387 bp, Zea Mays
ctttccaccgaactaccagcccccacccccctcccctgtcaaactagcgaagtcgcacgctcggctcgacggctcgagtaaataatacttcgtaaaaaataaactactaaaacgcgcacaaaaaccattccgagaggagaactaaaaaaatataaaaaatccccaaagctacctttcctcctgctctccctcccacgcctcttctcctcgccgccgccgccgccgccaccgctgagagaactaggactacgggcgggcgaagcacactggcttcctgcggacccgccgccgctccacgggcacaggcgttagccgtcgcgcggttgccctgtcagccctgatcggtgctgggcgggggtccgcggcgggctggtcgacgggcggtggcgggcgatggcgccggcgaagaggaagcgcgcagcagctgccgccgcggccgcggccgcggccaagtggaaggtgggcgacctcgtgctcgccaagatgaagggcttcccggcctggccggctatgattagtgaaccagagcagtggaagatgccttctactaaaaagaaaccgctggtttatttctatggtactaaacagattgctttctgcaattatgctgatctcgaggcattcaccgaagagaaaaaaagatccctacttgctaaaagacatggtaaaggggctgatttcctgagagcagttgatgagataattgaagtttatgattctctaaaggatataggtagcaacaaggttgacttgcctgccgaagaagtaaagccaggtgtagaaaagtttgctgaaaataatagccgcatggatactgaagatctggtcagtagctcctatatgcacaatgatagaaagatagaagatcattatgtcactaccaggagtcatgacatggtcaattctgacaggccttcagttgacgagcgatgtgttgtaaattctgctcctgatgagcctattgaaaatgtatccatccttgatgaaatgagggatatttctttgcgtactaattcattttcaaataagcaaagggatgcacagccacaaaattgctacacacgtactagggttccatctctgcggaagtcaagaagttcattaagtctggaatcaagaaaggctcaaggttctgataatgtctggttgcattctggtgaaggcacttccaaccaacctgtaactttgggggctagtaacggcaacagaatgttgaatactcctgctgaagtggatagtactagtaaccgtgaagcatctgaaaatggaactacagagacagaactgaaatcaaatggcacatcagatcttcccatgaacacagcagtaaatttcaagagaaaaagaaaatcagatagaaaacctggacctcattatagagattgtacaacaccaaataaagatgaccaattatgtgctgagtacagtgaaatccttccagattctccgaattcaaagaatgaagtaagcaagtcagatggagatgagcacttgccattggtcaaaagggcaagggtccgaatgggaaggtctcagttggaggattcaccagttgatgaaattgatgtttctaataagaagccagagcttgcaacagccttggaccaatgtgataggaatggtaaacctgcaagtcccgccaatgattactcagctgatcaggtgtctgcagtcgtaagttctgctcctaatctgtcctgcaaattggacacaactatcttgtcaaaggaaggtcatcttccttggaagaataaagaataccatccaaaaattttagcattagatgtggaagctgctttgcctccttcaaaacgcctgcatcgcgccttagaagcgatgtctgctaatgttgctgagaataccaagaatatacctgaagtgacaggaccaaatgaaatgactctaaatggctctttgttgacagcaagcagcctttctaataaatctgcagatgcagtggtcacagtatctaatagacctgtaatagttcaaagccctgaaccttctttagacacacagtttgtgcataacccatcaggcaaatgtacctcagaatcaattctacaaaataacagcattcctgattctgcttcagttccttcaaaagaaaatgatcatatcgtgttaaaaggtgatatttgtgaagaaaccctcatggatactaaaactgctaatggttcttgggattgtagtgaactaaataatgattcctgtgggaaaacttcagccctttgcatgaaattgaatcggcctgcacttaatgttacacaagccacatctgtacctgaccgattatcttcgtctttggagaaagccagtgaaaatgtggccgcaagtggtgtcaaagagacaaaaacatttggctcagctgtttgtgatgttgacagaagtgcagaaccaattgaccgttcaaacaacaatgtgacgagcaacacaatgcgacatagtgagactattgtagcggattcagtgaacaatatgtctgcttttgaaatcgcatatgcaaaactgggtctatgtgatgacttaagacctagaagaatacatgcaacatctttctgctggcatggctttaggctccctttggaacaaaggttttacaaaacacaggaatatccgagtatgaaaaaggcatacattctcatctttggcattgaaagaactgaaccatagaaaaattaaagacaggagcacttctccagattcaatgccaatgaaagaacttatagctgttgcacaagctagaaggttttctcgatcaacttcctttccagataacttcctaaatgccaagtatattcctgaaacatcaataaatataccttctaaggaaggcccacacaggcagttgtcaccctcaaatcggataatcaggtctacttctggaaatgataatgttaattctaggagtccgtttgataatattcagcagaagaaattagcagcacatggagccaatgcagcgcgaaggtctttcaaagatttcctcagtacattgacaagaaccaaagaaagtatatcgcgcgcgacacgtcttgctatggaatgtgctaaatttggcattgctggtgaggcaattgacattatcgttgaacatctggaaaaggaatcaaatttgtataagagggtggatctcttctttcttgtagattcaataacacaatgctcccgcaatcagaaaggcggagctggagatgtatatccctctctcattcaggcagttctacctcgaatactctatgctgctgcacctcctggaaactcagcttgggagaatcgaaagcaatgtctcaaggttttgaaactttggcttgaaaggaaaacactttcagaatatatcatccgtcaccatattagagaaattgagactatcaacgaggcatcatttggaagttctcgccgtccttcaagaacagagagagctctaaatgaccctttgcgtgacaatgaaggaatgcttgttgatgagtatgggagtaatgctggttttcagctacccaacttaatttgcacaaaagtacttgaagaagaggaagaaaactcttctgaaggcaggagcttgagctttgaagctgttacacctgaacaggatgccccatataatgatgacaatgaagaatctcaaatgcctgttgagaagcatcaccatattctggaagaggttgatggtgagcttgagatggaggatgtagctccaccatctgatattggggcaaccaccaagtgccaaccagagcaaagtgacaccaatcgtgcaccatctgaccaacgcccttcagatgctggccctccacttcctgtggaccggcctccatctcctccgccattgccatcatctcctccacctgtccccgttcctcagagtgcacagatgcagcctaaattacaaatggcatctgatcccatggcgccacatcctcaaagagctacatatagtgttcaaagtcaacaacagcattctattgcagagcacccaggtaacatgaattcttctgttgcaccattgccacccccaccgtttaacagttcaggatatggagggcaacaaaatcagataccacctcccccaccaatggcaccactcaatcctcctggtccccatggcagtttccctgctcccccagcaccttaccatgggaacaactatcatcggcctccaaccacatccatgcctaacgagggatatcatcagcaaccaccaccccctccaccgcctccaaatcaattcccttctgtgccaccagaacaccaacataggccacatcactggggtaataactgtccaccgtatcccgagagatatcggtacaatggacatgatcgaggtaatcacagacatgatagaaggcatcatggacatgacagacaacaccattatgatgatagaggataccactacgatgatagaggatatcactatgatgatagaggccattactttgatgatagaagacatcattttgacgatagaggacatcactttgatgagagagctattagggggccaatgcacaatgatgccgctgaccagggaagatattcttttcctccaggtcctcctcggattcctgaccattttgaagctccaccagccccaatgcactatgggcgaccatcagatcctccgccaaggccttgtgcaggctggtctaggccgcctaggatatctgataactattctccctcgagacattctgtggagcctccagtttcacatacagctggaggtcatggtggatggagacctagataacctttttcggtatcgaagcggtgctctgatgctttccttggtctgtgggggcttaacctgtgggagagtctgtctggtgtctctgcttcaggttgaaggcacccacggaggtggagcactccaggaaagtgggagctggtacctgcctccttgtacagatgtatctcatggattctacggcggtcgggctgcctgaactgctgtttgtaccctagtaggggtttagactgcgcgaccacacgcagagctgagttgtaggggtgtagggtgtcttctatcaaccgatcgtagtcttacattgtactgtttgttagtgcaacagtcctcgattccattgctgaattcctcctggcctcatcagacgacagccagctgctctgatgtcttgccgaaactgtttgagcacagcgtacatatatgcctaaaaaagagaaatataaatcattttgcccgttgcacctgcttatatataagagcatggtcgaactaaggggtgtttggtttctaggttcgctcaattttattttatttaatatggaaattttagttaacctagaaattagtctctagaaactaaacatcttctaatgatgacttgtggttgatcatttctgtttctctagaataaaaaaat

SEQ ID NO: 80999 - DNA, 3181 bp, Zea Mays
ctttcatttcccctcccgcccacctctccctctctccgccggacgatcgcctttcacgatggctcgccgacgccgccgtgtcttccgcggcagggtgcccccggacctccaccgggcctacggcgcacttgcacgcactctcggccacgccgtcctctcactcatcccgccgccgacgcaggcgggcacaccctgctctgcctgccgcggacgcggaggcgccggttgcctcgcgtgccgccgctgggagtacctcctccgcgatggtgacccggtcgcgtaccgcagcctcatcacccgcgctgtctgcgccgtcgcgccgtccgggtctgcaaccccgccgccgctgtacacgccggggaatggcgggcactcacaggccaagctcgttggggtggcgatcaagttgatgatgatggatcgggcgtgtacaacaacgaacgtcctctccagcggttgccgtgcgattggggatttactcatgtgctatattctaaggcattcatcaatatttttgcctgttaagaagaatgttttttttcaagtaactggcctcccgctcaatgatttcctgcaaaagcctatgtttgcgagtgcggcaaagaatcaacaaccccaatccacgaaaggaaaatacttgtgctatctgtgccagaacccagagaggtcacaaatcatttatggaggctatgccaataattccaaagttgcatgttcagaacttcctttgactaatggaccaataaagtgttccaatttagacaatcaaaattctaggaaaagaaaaaggctgtacaaatggcaacgcctcaaaaaacagaagcagatttttcctagttccgaggacaaatcattaactagtcagagtgaaataagcaccaatgggtttggtgtccatgatgttttattggaggacttatgtgctacagtgaaggataaatcacagtttttggaaccgacagtagataatgattccttagcaatgaatattagaacttcccagtgtaacagtacatcaagaattcaatctacatccccgcaagttggacttcccaatttcatgcatctcaataatggtctcatctgcttcaattgcttaatgttgaattcctccaaacgtgtctcagtagatttgcttatatcaagacatactatcttctacaatagaaagacttcctataacgtcttccatggcaaccacatattaaacaaaaggaaaataccagatgcattatcacttataatacatatatttggattcaagggatgctgcgcaaagttattgaaatgcaactgccatgtgtctactacaacaaattctaattgcatgtgtctttcgctgcctaaactaatgaataagctcatcagaaattctaagcgctgccagtataggaaactatttctgaagcattgtcctgtcaattccaagacaaaacttcaggattttgcgtggtacatccaggaaagaagcaatccagtcatgctatttttcaacagtgaggttcattccaaaagcaaaagatatgagaccattagtaaatctcagagctcaatcaaaaaatgccctcctcaataattgtcacctgattataaacaaagtaaaggatgagaatccagacaagtttggttcttctgtttttgattacaataatgtgcatcaaaatatctggcattttatttcttcagtaagaagtcacctgaaggaaaaaataaagatatatatagttgttgccgatgtatcgaaggcattcgattgcattactcatgatatgttactgaaagttgtggatgatgcattgaaatgtgatgactatgttctgaggaaatgcaaaaaagtagtttgcaactggtctaagaatgccatctaccgtttcgattcaaatgtttctatcagcaacggtgataatgtatgtgattttttgattcagttatcatcaaggggtggcattttagtcgaccagggaaaaagttgcaagatacggaagaaagagattcaatgtttcctttccaagcaagtgaagtgcaacattttgaagattgggcaaaacttctactcacaacgagtaggcatcattcaaggaaacaagttatctcccaacctttgttccctgtactttggtcaccttgaaaattctgagctattgaaatctcttcatgataacaagattgattcagaaaaggatgttttaacacctagaagtttattaatgaggttcattgacgatttcatattcatatctttctccaaggagcaagctctaaatttcttcaataggatgagaagagggtttgtcaactacaactgctacatgaatgacagcaaatatggtttcaacttcgaggttgcaaacagtgaacattgtagtaataggatctacaagggtgatgatggattctctttcataccatggagtggcttgcttataaattgtgaaactttggaaattcaagctgattatacaaggtatctggacatccatatttcctccaccatcactgctaagatgcattcttcagcgaagtaccttgagagcaagctgtgtcattacatgcgtccgaagtgtcatcccattttctttgattctgtgatcaactcaccaggcacagtaagactgaacatatatcaaaatttcctcttatgcgcaatgaagtttcactgttatttccggagcatgcctgatcccggtatcatgaaaccggagctactgcatataattaagagaacgttcagatatatgcatagcctcgtcgccaaacggatgcacgaagcggaactgcaatacgacgtgcgcccagttctgaagcttaggcgaaaggaaaccatgtggcttggcctgtcagcgtaccttcgagtgcttcagaaaaagcaatcacgttacagtgaattgttggcgtcgctgagagaagaaattgggagatgtggtcatctggaccgtcacaacgatgctttgcgctacgctgtagatgactctcactcgtcagtgttctggaagtttaagttctagaaggaaactgggagagtagaagattgctggagctagtgtcttttgtgaacaggaacctttggtgtccaagtgacagacgagtggggtcaaacatggtcgagacttttgttttgatatatactcccgccatttcgtaatgggcattcatggccttggatctatccgtttcacaatgc

SEQ ID NO: 81000 - DNA, 3458 bp, Zea Mays
cacctctccctctctccgccggacgatcgcctttcacgatggctcgccgacgccgccgtgtcttccgcggcagggtgcccccggacctccaccgggcctacggcgcacttgcacgcactctcggccacgccgtcctctcactcatcccgccgccgacgcaggcgggcacaccctgctctgcctgccgcggacgcggaggcgccggttgcctcgcgtgccgccgctgggagtacctcctccgcgatggtgacccggtcgcgtaccgcagcctcatcacccgcgctgtctgcgccgtcgcgccgtccgggtctgcaaccccgccgccgctgtacacgccggggaatggcgggcactcacaggccaagctcgttggggtggcgatcaagttgatgatgatggatcgggcgtgtacaacaacgaacgtcctctccagcggttgccgtgcgattggggatttactcatgtgctatattctaaggcattcatcaatatttttgcctgttaagaagaatgttttttttcaagtaactggcctcccgctcaatgatttcctgcaaaagcctatgtttgcgagtgcggcaaagaatcaacaaccccaatccacgaaaggaaaatacttgtgctatctgtgccagaacccagagaggtcacaaatcatttatggaggctatgccaataattccaaagttgcatgttcagaacttcctttgactaatggaccaataaagtgttccaatttagacaatcaaaattctaggaaaagaaaaaggctgtacaaatggcaacgcctcaaaaaacagaagcagatttttcctagttccgaggacaaatcattaactagtcagagtgaaataagcaccaatgggtttggtgtccatgatgttttattggaggacttatgtgctacagtgaaggataaatcacagtttttggaaccgacagtagataatgattccttagcaatgaatattagaacttcccagtgtaacagtacatcaagaattcaatctacatccccgcaagttggacttcccaatttcatgcatctcaatgtgtctttcgctgcctaaactaatgaataagctcatcagaaattctaagcgctgccagtataggaaactatttctgaagcattgtcctgtcaattccaagtgtgcagctgatgttgccaagaaccataataacaaggcacactttttaattggaggaaaatcggcatactatgatcagtcttatgttcaattggaggcttacagtacacatcaacaagtagtttcattcatctgggcagtgttgacacgaattatacctgagccgttgcttggaaactctagcagcaagagatctttaaggataaacatttggaaatttataaagttgcgtaggtttgaatcattttgcttgagcgattgtattggtgagctgaaagtatcacattattcttggttatcaaatattggattttctgattgcttttgctctgctctaatggagaaagaaatttggtcatcaaatggttccgaggaggagaaacttcaaaatcttctgcgttgttggattagttggatgttttctgatatagtgataccattagtccagtcatatttttatgttacagaaagggaatctaggcgatatgatgttttatattatccaaagacagtttggagaaacttgactagtacagctattgcttccctaaacagacaaaacttcaggattttgcgtggtacatccaggaaagaagcaatccagtcatgctatttttcaacagtgaggttcattccaaaagcaaaagatatgagaccattagtaaatctcagagctcaatcaaaaaatgccctcctcaataattgtcacctgattataaacaaagtaaaggatgagaatccagacaagtttggttcttctgtttttgattacaataatgtgcatcaaaatatctggcattttatttcttcagtaagaagtcacctgaaggaaaaaataaagatatatatagttgttgccgatgtatcgaaggcattcgattgcattactcatgatatgttactgaaagttgtggatgatgcattgaaatgtgatgactatgttctgaggaaatgcaaaaaagtagtttgcaactggtctaagaatgccatctaccgtttcgattcaaatgtttctatcagcaacggtgataatgtatgtgattttttgattcagttatcatcaaggggtggcattttagtcgaccagggaaaaagttgcaagatacggaagaaagagattcaatgtttcctttccaagcaagtgaagtgcaacattttgaagattgggcaaaacttctactcacaacgagtaggcatcattcaaggaaacaagttatctcccaacctttgttccctgtactttggtcaccttgaaaattctgagctattgaaatctcttcatgataacaagattgattcagaaaaggatgttttaacacctagaagtttattaatgaggttcattgacgatttcatattcatatctttctccaaggagcaagctctaaatttcttcaataggatgagaagagggtttgtcaactacaactgctacatgaatgacagcaaatatggtttcaacttcgaggttgcaaacagtgaacattgtagtaataggatctacaagggtgatgatggattctctttcataccatggagtggcttgcttataaattgtgaaactttggaaattcaagctgattatacaaggtatctggacatccatatttcctccaccatcactgctaagatgcattcttcagcgaagtaccttgagagcaagctgtgtcattacatgcgtccgaagtgtcatcccattttctttgattctgtgatcaactcaccaggcacagtaagactgaacatatatcaaaatttcctcttatgcgcaatgaagtttcactgttatttccggagcatgcctgatcccggtatcatgaaaccggagctactgcatataattaagagaacgttcagatatatgcatagcctcgtcgccaaacggatgcacgaagcggaactgcaatacgacgtgcgcccagttctgaagcttaggcgaaaggaaaccatgtggcttggcctgtcagcgtaccttcgagtgcttcagaaaaagcaatcacgttacagtgaattgttggcgtcgctgagagaagaaattgggagatgtggtcatctggaccgtcacaacgatgctttgcgctacgctgtagatgactctcactcgtcagtgttctggaagtttaagttctagaaggaaactgggagagtagaagattgctggagctagtgtcttttgtgaacaggaacctttggtgtccaagtgacagacgagtggggtcaaacatggtcgagacttttgttttgatatatactcccgccatttcgtaatgggcattcatggccttggatctatccgtttcacaatgc

SEQ ID NO: 81001 - DNA, 3505 bp, Zea Mays
cggacgatcgcctttcacgatggctcgccgacgccgccgtgtcttccgcggcagggtgcccccggacctccaccgggcctacggcgcacttgcacgcactctcggccacgccgtcctctcactcatcccgccgccgacgcaggcgggcacaccctgctctgcctgccgcggacgcggaggcgccggttgcctcgcgtgccgccgctgggagtacctcctccgcgatggtgacccggtcgcgtaccgcagcctcatcacccgcgctgtctgcgccgtcgcgccgtccgggtctgcaaccccgccgccgctgtacacgccggggaatggcgggcactcacaggccaagctcgttggggtggcgatcaagttgatgatgatggatcgggcgtgtacaacaacgaacgtcctctccagcggttgccgtgcgggtggccaaactacttgtgttattgagcttgtttcttcttcatcttgggacattctcttgcataggattggggatttactcatgtgctatattctaaggcattcatcaatatttttgcctgttaagaagaatgttttttttcaagtaactggcctcccgctcaatgatttcctgcaaaagcctatgtttgcgagtgcggcaaagaatcaacaaccccaatccacgaaaggaaaatacttgtgctatctgtgccagaacccagagaggtcacaaatcatttatggaggctatgccaataattccaaagttgcatgttcagaacttcctttgactaatggaccaataaagtgttccaatttagacaatcaaaattctaggaaaagaaaaaggctgtacaaatggcaacgcctcaaaaaacagaagcagatttttcctagttccgaggacaaatcattaactagtcagagtgaaataagcaccaatgggtttggtgtccatgatgttttattggaggacttatgtgctacagtgaaggataaatcacagtttttggaaccgacagtagataatgattccttagcaatgaatattagaacttcccagtgtaacagtacatcaagaattcaatctacatccccgcaagttggacttcccaatttcatgcatctcaatgtgtctttcgctgcctaaactaatgaataagctcatcagaaattctaagcgctgccagtataggaaactatttctgaagcattgtcctgtcaattccaagtgtgcagctgatgttgccaagaaccataataacaaggcacactttttaattggaggaaaatcggcatactatgatcagtcttatgttcaattggaggcttacagtacacatcaacaagtagtttcattcatctgggcagtgttgacacgaattatacctgagccgttgcttggaaactctagcagcaagagatctttaaggataaacatttggaaatttataaagttgcgtaggtttgaatcattttgcttgagcgattgtattggtgagctgaaagtatcacattattcttggttatcaaatattggattttctgattgcttttgctctgctctaatggagaaagaaatttggtcatcaaatggttccgaggaggagaaacttcaaaatcttctgcgttgttggattagttggatgttttctgatatagtgataccattagtccagtcatatttttatgttacagaaagggaatctaggcgatatgatgttttatattatccaaagacagtttggagaaacttgactagtacagctattgcttccctaaacagacaaaacttcaggattttgcgtggtacatccaggaaagaagcaatccagtcatgctatttttcaacagtgaggttcattccaaaagcaaaagatatgagaccattagtaaatctcagagctcaatcaaaaaatgccctcctcaataattgtcacctgattataaacaaagtaaaggatgagaatccagacaagtttggttcttctgtttttgattacaataatgtgcatcaaaatatctggcattttatttcttcagtaagaagtcacctgaaggaaaaaataaagatatatatagttgttgccgatgtatcgaaggcattcgattgcattactcatgatatgttactgaaagttgtggatgatgcattgaaatgtgatgactatgttctgaggaaatgcaaaaaagtagtttgcaactggtctaagaatgccatctaccgtttcgattcaaatgtttctatcagcaacggtgataatgtatgtgattttttgattcagttatcatcaaggggtggcattttagtcgaccagggaaaaagttgcaagatacggaagaaagagattcaatgtttcctttccaagcaagtgaagtgcaacattttgaagattgggcaaaacttctactcacaacgagtaggcatcattcaaggaaacaagttatctcccaacctttgttccctgtactttggtcaccttgaaaattctgagctattgaaatctcttcatgataacaagattgattcagaaaaggatgttttaacacctagaagtttattaatgaggttcattgacgatttcatattcatatctttctccaaggagcaagctctaaatttcttcaataggatgagaagagggtttgtcaactacaactgctacatgaatgacagcaaatatggtttcaacttcgaggttgcaaacagtgaacattgtagtaataggatctacaagggtgatgatggattctctttcataccatggagtggcttgcttataaattgtgaaactttggaaattcaagctgattatacaaggtatctggacatccatatttcctccaccatcactgctaagatgcattcttcagcgaagtaccttgagagcaagctgtgtcattacatgcgtccgaagtgtcatcccattttctttgattctgtgatcaactcaccaggcacagtaagactgaacatatatcaaaatttcctcttatgcgcaatgaagtttcactgttatttccggagcatgcctgatcccggtatcatgaaaccggagctactgcatataattaagagaacgttcagatatatgcatagcctcgtcgccaaacggatgcacgaagcggaactgcaatacgacgtgcgcccagttctgaagcttaggcgaaaggaaaccatgtggcttggcctgtcagcgtaccttcgagtgcttcagaaaaagcaatcacgttacagtgaattgttggcgtcgctgagagaagaaattgggagatgtggtcatctggaccgtcacaacgatgctttgcgctacgctgtagatgactctcactcgtcagtgttctggaagtttaagttctagaaggaaactgggagagtagaagattgctggagctagtgtcttttgtgaacaggaacctttggtgtccaagtgacagacgagtggggtcaaacatggtcgagacttttgttttgatatatactcccgccatttcgtaatgggcattcatggccttggatctatccgtttcacaatgc

SEQ ID NO: 81002 - DNA, 3330 bp, Zea Mays
ctgttaactccttggccgactcgttcaaatggaagaaggttaaggtcctgtcgtcctgatgctcccgataacaacaacaactccgttcggcaggcggtccaaatcgccgccgctccgatccatcatccacgctcgcattatctatcccttctgattaaaattaatctccgtgacgatatcgcactgattccttcttcctcgttcccgctgagcggtcagcggctgcagagtgcagactgagtgatcgctacttctacgcgcgccgcgagcaccaccgaacaagtagcaaccggggtggattgagcgtggtcccaacacgggccagaattccgccatgatgaggccatcgccgccgcggcgcctatccctcgccgcccccttcctcatcctcctgctgctcacgctcctctcgccgcctcgagcggcggcggcgggcggctcatccgcgtgggtggcgctccgcggggcggcgggcagccgaaaggcgtctccggcggagcaggaaggggcggccgcggggctgctgcgccggctgctccctttccactctggcagcttcagcttccagatcgactccaagggcggcgtctgcggtcaatcaagctgcttcaggataagcaacgtcgttgacggctcgggcaaaggtggagcggagattctgatccagggaaccacagctgttgagcttgcatctggcctacattggtatttgaaatactggtgtggcgcacatatctcctgggacaagactgggggtgcccagctggcttcgattccttctcctggatctctgccacgggtgcagggcaagggagtcaagattgagcgtcctgttccgtggaattactatcagaatgtcgtcacttctagttactcttttgtgtggtgggactggaaaagatgggagaaagaaattgactggatggcgcttcaaggaattaacttgcctttagcatttactggacaggaatctatctggcagaaggtttttaagagttttaatgttaccgacagagatttagatgatttttttggtggaccagctttccttgcttgggctagaatggggaacttgcatgggtggggtggaccactgtcacaaaactggttggatcaacaattggcattgcagaagaaaattctatcccggatgattgagcttgggatggtccctgttcttccatcgttctcaggaaatgtcccagctattttcgcaaaattatttccgtcagccaacattacgcgacttggtgattggaatacagttgatgctaatcctaagtggtgttgcacttatcttcttgatccttctgattcattgtttatagatgtggggcaggcttttatcaggcaacagataaaagagtacggcgatgtaaccaacatctataactgtgacacattcaatgagaatactccaccaacagatgaaccggcatatatttcatcacttggttctgctatctatgaagcaatgtcccgaggtaacaagaatgcagtatggttaatgcagggttggttattctactcagatgctgcattctggaaggagccacaaatgaaagcactacttcactctgttccaattggtaagatgatagttctcgatttatttgctgatgtcaagcccatttggaaagtgtcctctcagttttacggcgtaccatacatctggtgcatgttacacaactttggtgggaacattgaaatgtatggcatacttgattcaatttcatctggccccattgatgcccgtacaagttacaattcaacaatgattggcgttggcatgtgcatggagggaatagagcacaatccagttgtttatgaacttatgtctgaaatggcatttcataataagaaggttgaggttgagtgagatcgggattaattgaagttttctgccttgagttaaatgttgacctgtgcatcagagaaggattgtccaaaacaccaaacatttgtaatttgtgtagtttcttggtagacatgctttctgcgaccttgtttacatgaggattggctaaaaacatactcctgtaggagatatggtcaagcaaatgctgacatagagaaagcttggagatatttgtatcatacaatatacaattgcactgatgggattgcggaccataataaagactatatagttgaatttccagacataagtcccagctcagttacttatcaggtttctaaacgaaggggcatgtcaattacgagaaaccataggaggtttttcttaagcgaggtgtctggaatcctaccgcagccgcatctgtggtactctacgaaggaggccgtcaaagcccttgaactatttcttgatgcaggaagcacattttcagaaagtctcacgtataggtatgaccttgtcgacctaactaggcagtgcctatccaaactagcgaatgaagtttaccttgacgcgataagtttgtaccaaaagaaagattcacatggcctgaatgctcacgcgaggaaatttcttgagatcatcgtggatatcgatacgttactagctgctgatgataactttctgctgggcccctggctggaaagtgcaaaaagccttgctataactgaaaaggaacgccagcagtacgagtggaacgccagaacacaggtgacgatgtggtatgacaacacggagaccgagcagagtaaactgcatgactacgccaataagttttggagcgggctgctgaagagctactaccttccaagggcgtcaaagtacttcgcctacttaacgaggagcctgcaagagaaccggagcttccagctggaggagtggaggaaggactggatctcgtattccaacgagtggcagtccggaaaggaggtgtacgccgtgaaggccacgggtgatgctttggcgattgccaggtcactgtacagaaaatacttgaggccttgagctagtgctagtcaatgcacggatgtgaccattagaataagtggattccacatctctctccatcaatttaagtttaattgatacatataatttaatatatggtgtcagtcagatatctttgagttttaaatcttgattagcacaattaaataaaatagatattgctcgttcctatttttatctctgactcctccggagtccggagagcaactccaaaaaagagacctatatttgagtcctaaatattgtttttgacctgatttgatttgttttaggaccctaacatattatctgccaacaatcaggccttaaacatctatttatcaataaccaaacgggctagcacagaaaaatcaagcgccaaacaacgtaagagtgaagtcttatatgaatttactgcaatgttggag

SEQ ID NO: 81003 - DNA, 3368 bp, Zea Mays
aagaaggttaaggtcctgtcgtcctgatgctcccgataacaacaacaactccgttcggcaggcggtccaaatcgccgccgctccgatccatcatccacgctcgcattatctatcccttctgattaaaattaatctccgtgacgatatcgcactgattccttcttcctcgttcccgctgagcggtcagcggctgcagagtgcagactgagtgatcgctacttctacgcgcgccgcgagcaccaccgaacaagtagcaaccggggtggattgagcgtggtcccaacacgggccagaattccgccatgatgaggccatcgccgccgcggcgcctatccctcgccgcccccttcctcatcctcctgctgctcacgctcctctcgccgcctcgagcggcggcggcgggcggctcatccgcgtgggtggcgctccgcggggcggcgggcagccgaaaggcgtctccggcggagcaggaaggggcggccgcggggctgctgcgccggctgctccctttccactctggcagcttcagcttccagatcgactccaagggcggcgtctgcggtcaatcaagctgcttcaggataagcaacgtcgttgacggctcgggcaaaggtggagcggagattctgatccagggaaccacagctgttgagcttgcatctggcctacattggtatttgaaatactggtgtggcgcacatatctcctgggacaagactgggggtgcccagctggcttcgattccttctcctggatctctgccacgggtgcagggcaagggagtcaagattgagcgtcctgttccgtggaattactatcagaatgtcgtcacttctagttactcttttgtgtggtgggactggaaaagatgggagaaagaaattgactggatggcgcttcaaggaattaacttgcctttagcatttactggacaggaatctatctggcagaaggtttttaagagttttaatgttaccgacagagatttagatgatttttttggtggaccagctttccttgcttgggctagaatggggaacttgcatgggtggggtggaccactgtcacaaaactggttggatcaacaattggcattgcagaagaaaattctatcccggatgattgagcttgggatggtccctgttcttccatcgttctcaggaaatgtcccagctattttcgcaaaattatttccgtcagccaacattacgcgacttggtgattggaatacagttgatgctaatcctaagtggtgttgcacttatcttcttgatccttctgattcattgtttatagatgtggggcaggcttttatcaggcaacagataaaagagtacggcgatgtaaccaacatctataactgtgacacattcaatgagaatactccaccaacagatgaaccggcatatatttcatcacttggttctgctatctatgaagcaatgtcccgaggtaacaagaatgcagtatggttaatgcagggttggttattctactcagatgctgcattctggaaggagccacaaatgaaagcactacttcactctgttccaattggtaagatgatagttctcgatttatttgctgatgtcaagcccatttggaaagtgtcctctcagttttacggcgtaccatacatctggtgcatgttacacaactttggtgggaacattgaaatgtatggcatacttgattcaatttcatctggccccattgatgcccgtacaagttacaattcaacaatgattggcgttggcatgtgcatggagggaatagagcacaatccagttgtttatgaacttatgtctgaaatggcatttcataataagaaggttgaggttgagctgtatagagtatggagcatgaggtgccacagtagacatagtttgcactttatatatacataattgaaggtgagatcgggattaattgaagttttctgccttgagttaaatgttgacctgtgcatcagagaaggattgtccaaaacaccaaacatttgtaatttgtgtagtttcttggtagacatgctttctgcgaccttgtttacatgaggattggctaaaaacatactcctgtaggagatatggtcaagcaaatgctgacatagagaaagcttggagatatttgtatcatacaatatacaattgcactgatgggattgcggaccataataaagactatatagttgaatttccagacataagtcccagctcagttacttatcaggtttctaaacgaaggggcatgtcaattacgagaaaccataggaggtttttcttaagcgaggtgtctggaatcctaccgcagccgcatctgtggtactctacgaaggaggccgtcaaagcccttgaactatttcttgatgcaggaagcacattttcagaaagtctcacgtataggtatgaccttgtcgacctaactaggcagtgcctatccaaactagcgaatgaagtttaccttgacgcgataagtttgtaccaaaagaaagattcacatggcctgaatgctcacgcgaggaaatttcttgagatcatcgtggatatcgatacgttactagctgctgatgataactttctgctgggcccctggctggaaagtgcaaaaagccttgctataactgaaaaggaacgccagcagtacgagtggaacgccagaacacaggtgacgatgtggtatgacaacacggagaccgagcagagtaaactgcatgactacgccaataagttttggagcgggctgctgaagagctactaccttccaagggcgtcaaagtacttcgcctacttaacgaggagcctgcaagagaaccggagcttccagctggaggagtggaggaaggactggatctcgtattccaacgagtggcagtccggaaaggaggtgtacgccgtgaaggccacgggtgatgctttggcgattgccaggtcactgtacagaaaatacttgaggccttgagctagtgctagtcaatgcacggatgtgaccattagaataagtggattccacatctctctccatcaatttaagtttaattgatacatataatttaatatatggtgtcagtcagatatctttgagttttaaatcttgattagcacaattaaataaaatagatattgctcgttcctatttttatctctgactcctccggagtccggagagcaactccaaaaaagagacctatatttgagtcctaaatattgtttttgacctgatttgatttgttttaggaccctaacatattatctgccaacaatcaggccttaaacatctatttatcaataaccaaacgggctagcacagaaaaatcaagcgccaaacaacgtaagagtgaagtcttatatgaatttactgcaatgttggag

SEQ ID NO: 81004 - DNA, 3361 bp, Zea Mays
aaggttaaggtcctgtcgtcctgatgctcccgataacaacaacaactccgttcggcaggcggtccaaatcgccgccgctccgatccatcatccacgctcgcattatctatcccttctgattaaaattaatctccgtgacgatatcgcactgattccttcttcctcgttcccgctgagcggtcagcggctgcagagtgcagactgagtgatcgctacttctacgcgcgccgcgagcaccaccgaacaagtagcaaccggggtggattgagcgtggtcccaacacgggccagaattccgccatgatgaggccatcgccgccgcggcgcctatccctcgccgcccccttcctcatcctcctgctgctcacgctcctctcgccgcctcgagcggcggcggcgggcggctcatccgcgtgggtggcgctccgcggggcggcgggcagccgaaaggcgtctccggcggagcaggaaggggcggccgcggggctgctgcgccggctgctccctttccactctggcagcttcagcttccagatcgactccaagggcggcgtctgcggtcaatcaagctgcttcaggataagcaacgtcgttgacggctcgggcaaaggtggagcggagattctgatccagggaaccacagctgttgagcttgcatctggcctacattggtatttgaaatactggtgtggcgcacatatctcctgggacaagactgggggtgcccagctggcttcgattccttctcctggatctctgccacgggtgcagggcaagggagtcaagattgagcgtcctgttccgtggaattactatcagaatgtcgtcacttctagttactcttttgtgtggtgggactggaaaagatgggagaaagaaattgactggatggcgcttcaaggaattaacttgcctttagcatttactggacaggaatctatctggcagaaggtttttaagagttttaatgttaccgacagagatttagatgatttttttggtggaccagctttccttgcttgggctagaatggggaacttgcatgggtggggtggaccactgtcacaaaactggttggatcaacaattggcattgcagaagaaaattctatcccggatgattgagcttgggatggtccctggtacattgttgttttattgtctaaaattactattcttcaacctttaacatatgccattgcatttgtaccacctttccatgctttttttagcaatgtgtttttatatgaggtcaaaagatcaatggactttttactatcaatattctattactacggtgggttaaatactgtttcaagttatacttatgacgcactattactctacagttcttccatcgttctcaggaaatgtcccagctattttcgcaaaattatttccgtcagccaacattacgcgacttggtgattggaatacagttgatgctaatcctaagtggtgttgcacttatcttcttgatccttctgattcattgtttatagatgtggggcaggcttttatcaggcaacagataaaagagtacggcgatgtaaccaacatctataactgtgacacattcaatgagaatactccaccaacagatgaaccggcatatatttcatcacttggttctgctatctatgaagcaatgtcccgaggtaacaagaatgcagtatggttaatgcagggttggttattctactcagatgctgcattctggaaggagccacaaatgaaagcactacttcactctgttccaattggtaagatgatagttctcgatttatttgctgatgtcaagcccatttggaaagtgtcctctcagttttacggcgtaccatacatctggtgcatgttacacaactttggtgggaacattgaaatgtatggcatacttgattcaatttcatctggccccattgatgcccgtacaagttacaattcaacaatgattggcgttggcatgtgcatggagggaatagagcacaatccagttgtttatgaacttatgtctgaaatggcatttcataataagaaggttgaggttgaggattggctaaaaacatactcctgtaggagatatggtcaagcaaatgctgacatagagaaagcttggagatatttgtatcatacaatatacaattgcactgatgggattgcggaccataataaagactatatagttgaatttccagacataagtcccagctcagttacttatcaggtttctaaacgaaggggcatgtcaattacgagaaaccataggaggtttttcttaagcgaggtgtctggaatcctaccgcagccgcatctgtggtactctacgaaggaggccgtcaaagcccttgaactatttcttgatgcaggaagcacattttcagaaagtctcacgtataggtatgaccttgtcgacctaactaggcagtgcctatccaaactagcgaatgaagtttaccttgacgcgataagtttgtaccaaaagaaagattcacatggcctgaatgctcacgcgaggaaatttcttgagatcatcgtggatatcgatacgttactagctgctgatgataactttctgctgggcccctggctggaaagtgcaaaaagccttgctataactgaaaaggaacgccagcagtacgagtggaacgccagaacacaggtgacgatgtggtatgacaacacggagaccgagcagagtaaactgcatgactacgccaataagttttggagcgggctgctgaagagctactaccttccaagggcgtcaaagtacttcgcctacttaacgaggagcctgcaagagaaccggagcttccagctggaggagtggaggaaggactggatctcgtattccaacgagtggcagtccggaaaggaggtgtacgccgtgaaggccacgggtgatgctttggcgattgccaggtcactgtacagaaaatacttgaggccttgagctagtgctagtcaatgcacggatgtgaccattagaataagtggattccacatctctctccatcaatttaagtttaattgatacatataatttaatatatggtgtcagtcagatatctttgagttttaaatcttgattagcacaattaaataaaatagatattgctcgttcctatttttatctctgactcctccggagtccggagagcaactccaaaaaagagacctatatttgagtcctaaatattgtttttgacctgatttgatttgttttaggaccctaacatattatctgccaacaatcaggccttaaacatctatttatcaataaccaaacgggctagcacagaaaaatcaagcgccaaacaacgtaagagtgaagtcttatatgaatttactgcaatgttggag

SEQ ID NO: 81005 - DNA, 3279 bp, Zea Mays
aaggttaaggtcctgtcgtcctgatgctcccgataacaacaacaactccgttcggcaggcggtccaaatcgccgccgctccgatccatcatccacgctcgcattatctatcccttctgattaaaattaatctccgtgacgatatcgcactgattccttcttcctcgttcccgctgagcggtcagcggctgcagagtgcagactgagtgatcgctacttctacgcgcgccgcgagcaccaccgaacaagtagcaaccggggtggattgagcgtggtcccaacacgggccagaattccgccatgatgaggccatcgccgccgcggcgcctatccctcgccgcccccttcctcatcctcctgctgctcacgctcctctcgccgcctcgagcggcggcggcgggcggctcatccgcgtgggtggcgctccgcggggcggcgggcagccgaaaggcgtctccggcggagcaggaaggggcggccgcggggctgctgcgccggctgctccctttccactctggcagcttcagcttccagatcgactccaagggcggcgtctgcggtcaatcaagctgcttcaggataagcaacgtcgttgacggctcgggcaaaggatccagggaaccacagctgttgagcttgcatctggcctacattggtatttgaaatactggtgtggcgcacatatctcctgggacaagactgggggtgcccagctggcttcgattccttctcctggatctctgccacgggtgcagggcaagggagtcaagattgagcgtcctgttccgtggaattactatcagaatgtcgtcacttctagttactcttttgtgtggtgggactggaaaagatgggagaaagaaattgactggatggcgcttcaaggaattaacttgcctttagcatttactggacaggaatctatctggcagaaggtttttaagagttttaatgttaccgacagagatttagatgatttttttggtggaccagctttccttgcttgggctagaatggggaacttgcatgggtggggtggaccactgtcacaaaactggttggatcaacaattggcattgcagaagaaaattctatcccggatgattgagcttgggatggtccctgttcttccatcgttctcaggaaatgtcccagctattttcgcaaaattatttccgtcagccaacattacgcgacttggtgattggaatacagttgatgctaatcctaagtggtgttgcacttatcttcttgatccttctgattcattgtttatagatgtggggcaggcttttatcaggcaacagataaaagagtacggcgatgtaaccaacatctataactgtgacacattcaatgagaatactccaccaacagatgaaccggcatatatttcatcacttggttctgctatctatgaagcaatgtcccgaggtaacaagaatgcagtatggttaatgcagggttggttattctactcagatgctgcattctggaaggagccacaaatgaaagcactacttcactctgttccaattggtaagatgatagttctcgatttatttgctgatgtcaagcccatttggaaagtgtcctctcagttttacggcgtaccatacatctggtgcatgttacacaactttggtgggaacattgaaatgtatggcatacttgattcaatttcatctggccccattgatgcccgtacaagttacaattcaacaatgattggcgttggcatgtgcatggagggaatagagcacaatccagttgtttatgaacttatgtctgaaatggcatttcataataagaaggttgaggttgagtgagatcgggattaattgaagttttctgccttgagttaaatgttgacctgtgcatcagagaaggattgtccaaaacaccaaacatttgtaatttgtgtagtttcttggtagacatgctttctgcgaccttgtttacatgaggattggctaaaaacatactcctgtaggagatatggtcaagcaaatgctgacatagagaaagcttggagatatttgtatcatacaatatacaattgcactgatgggattgcggaccataataaagactatatagttgaatttccagacataagtcccagctcagttacttatcaggtttctaaacgaaggggcatgtcaattacgagaaaccataggaggtttttcttaagcgaggtgtctggaatcctaccgcagccgcatctgtggtactctacgaaggaggccgtcaaagcccttgaactatttcttgatgcaggaagcacattttcagaaagtctcacgtataggtatgaccttgtcgacctaactaggcagtgcctatccaaactagcgaatgaagtttaccttgacgcgataagtttgtaccaaaagaaagattcacatggcctgaatgctcacgcgaggaaatttcttgagatcatcgtggatatcgatacgttactagctgctgatgataactttctgctgggcccctggctggaaagtgcaaaaagccttgctataactgaaaaggaacgccagcagtacgagtggaacgccagaacacaggtgacgatgtggtatgacaacacggagaccgagcagagtaaactgcatgactacgccaataagttttggagcgggctgctgaagagctactaccttccaagggcgtcaaagtacttcgcctacttaacgaggagcctgcaagagaaccggagcttccagctggaggagtggaggaaggactggatctcgtattccaacgagtggcagtccggaaaggaggtgtacgccgtgaaggccacgggtgatgctttggcgattgccaggtcactgtacagaaaatacttgaggccttgagctagtgctagtcaatgcacggatgtgaccattagaataagtggattccacatctctctccatcaatttaagtttaattgatacatataatttaatatatggtgtcagtcagatatctttgagttttaaatcttgattagcacaattaaataaaatagatattgctcgttcctatttttatctctgactcctccggagtccggagagcaactccaaaaaagagacctatatttgagtcctaaatattgtttttgacctgatttgatttgttttaggaccctaacatattatctgccaacaatcaggccttaaacatctatttatcaataaccaaacgggctagcacagaaaaatcaagcgccaaacaacgtaagagtgaagtcttatatgaatttactgcaatgttggag

SEQ ID NO: 81006 - DNA, 3342 bp, Zea Mays
aaggttaaggtcctgtcgtcctgatgctcccgataacaacaacaactccgttcggcaggcggtccaaatcgccgccgctccgatccatcatccacgctcgcattatctatcccttctgattaaaattaatctccgtgacgatatcgcactgattccttcttcctcgttcccgctgagcggtcagcggctgcagagtgcagactgagtgatcgctacttctacgcgcgccgcgagcaccaccgaacaagtagcaaccggggtggattgagcgtggtcccaacacgggccagaattccgccatgatgaggccatcgccgccgcggcgcctatccctcgccgcccccttcctcatcctcctgctgctcacgctcctctcgccgcctcgagcggcggcggcgggcggctcatccgcgtgggtggcgctccgcggggcggcgggcagccgaaaggcgtctccggcggagcaggaaggggcggccgcggggctgctgcgccggctgctccctttccactctggcagcttcagcttccagatcgactccaagggcggcgtctgcggtcaatcaagctgcttcaggataagcaacgtcgttgacggctcgggcaaaggtggagcggagattctgatccagggaaccacagctgttgagcttgcatctggcctacattggtatttgaaatactggtgtggcgcacatatctcctgggacaagactgggggtgcccagctggcttcgattccttctcctggatctctgccacgggtgcagggcaagggagtcaagattgagcgtcctgttccgtggaattactatcagaatgtcgtcacttctagttactcttttgtgtggtgggactggaaaagatgggagaaagaaattgactggatggcgcttcaaggaattaacttgcctttagcatttactggacaggaatctatctggcagaaggtttttaagagttttaatgttaccgacagagatttagatgatttttttggtggaccagctttccttgcttgggctagaatggggaacttgcatgggtggggtggaccactgtcacaaaactggttggatcaacaattggcattgcagaagaaaattctatcccggatgattgagcttgggatggtccctgttcttccatcgttctcaggaaatgtcccagctattttcgcaaaattatttccgtcagccaacattacgcgacttggtgattggaatacagttgatgctaatcctaagtggtgttgcacttatcttcttgatccttctgattcattgtttatagatgtggggcaggcttttatcaggcaacagataaaagagtacggcgatgtaaccaacatctataactgatgaaccggcatatatttcatcacttggttctgctatctatgaagcaatgtcccgaggtaacaagaatgcagtatggttaatgcagggttggttattctactcagatgctgcattctggaaggagccacaaatgaaagcactacttcactctgttccaattggtaagatgatagttctcgatttatttgctgatgtcaagcccatttggaaagtgtcctctcagttttacggcgtaccatacatctggtatgtcatcttttaacaaccgctccctaccatcctgtaattccagaccattatttttgtattctcattgttactttaaaatatgaatataattcctgattttcaaccatatttactgatagatttgctcaatctaggtgcatgttacacaactttggtgggaacattgaaatgtatggcatacttgattcaatttcatctggccccattgatgcccgtacaagttacaattcaacaatgattggcgttggcatgtgcatggagggaatagagcacaatccagttgtttatgaacttatgtctgaaatggcatttcataataagaaggttgaggttgaggattggctaaaaacatactcctgtaggagatatggtcaagcaaatgctgacatagagaaagcttggagatatttgtatcatacaatatacaattgcactgatgggattgcggtgtgatttcaaacaagcccctttgttgcaactatccagagcctgtctgtatagtaacatgtcctttcatattttggttgcaggaccataataaagactatatagttgaatttccagacataagtcccagctcagttacttatcaggtttctaaacgaaggggcatgtcaattacgagaaaccataggaggtttttcttaagcgaggtgtctggaatcctaccgcagccgcatctgtggtactctacgaaggaggccgtcaaagcccttgaactatttcttgatgcaggaagcacattttcagaaagtctcacgtataggtatgaccttgtcgacctaactaggcagtgcctatccaaactagcgaatgaagtttaccttgacgcgataagtttgtaccaaaagaaagattcacatggcctgaatgctcacgcgaggaaatttcttgagatcatcgtggatatcgatacgttactagctgctgatgataactttctgctgggcccctggctggaaagtgcaaaaagccttgctataactgaaaaggaacgccagcagtacgagtggaacgccagaacacaggtgacgatgtggtatgacaacacggagaccgagcagagtaaactgcatgactacgccaataagttttggagcgggctgctgaagagctactaccttccaagggcgtcaaagtacttcgcctacttaacgaggagcctgcaagagaaccggagcttccagctggaggagtggaggaaggactggatctcgtattccaacgagtggcagtccggaaaggaggtgtacgccgtgaaggccacgggtgatgctttggcgattgccaggtcactgtacagaaaatacttgaggccttgagctagtgctagtcaatgcacggatgtgaccattagaataagtggattccacatctctctccatcaatttaagtttaattgatacatataatttaatatatggtgtcagtcagatatctttgagttttaaatcttgattagcacaattaaataaaatagatattgctcgttcctatttttatctctgactcctccggagtccggagagcaactccaaaaaagagacctatatttgagtcctaaatattgtttttgacctgatttgatttgttttaggaccctaacatattatctgccaacaatcaggccttaaacatctatttatcaataaccaaacgggctagcacagaaaaatcaagcgccaaacaacgtaagagtgaagtcttatatgaatttactgcaatgttggag

SEQ ID NO: 81007 - DNA, 2343 bp, Zea Mays
tagcactatagtacttcaaattaaaagaaaggcagacccagcgctagaggctcccacatgagtggggtctggggaagggataaaccgagggaagcatttcccctgcaaatgcggagagtccgcttcgaacgcgcgacatggtgactcaagttttaatgttaccgacagagatttagatgatttttttggtggaccagctttccttgcttgggctagaatggggaacttgcatgggtggggtggaccactgtcacaaaactggttggatcaacaattggcattgcagaagaaaattctatcccggatgattgagcttgggatggtccctgttcttccatcgttctcaggaaatgtcccagctattttcgcaaaattatttccgtcagccaacattacgcgacttggtgattggaatacagttgatgctaatcctaagtggtgttgcacttatcttcttgatccttctgattcattgtttatagatgtggggcaggcttttatcaggcaacagataaaagagtacggcgatgtaaccaacatctataactgtgacacattcaatgagaatactccaccaacagatgaaccggcatatatttcatcacttggttctgctatctatgaagcaatgtcccgaggtaacaagaatgcagtatggttaatgcagggttggttattctactcagatgctgcattctggaaggagccacaaatgaaagcactacttcactctgttccaattggtaagatgatagttctcgatttatttgctgatgtcaagcccatttggaaagtgtcctctcagttttacggcgtaccatacatctggtgcatgttacacaactttggtgggaacattgaaatgtatggcatacttgattcaatttcatctggccccattgatgcccgtacaagttacaattcaacaatgattggcgttggcatgtgcatggagggaatagagcacaatccagttgtttatgaacttatgtctgaaatggcatttcataataagaaggttgaggttgaggattggctaaaaacatactcctgtaggagatatggtcaagcaaatgctgacatagagaaagcttggagatatttgtatcatacaatatacaattgcactgatgggattgcggaccataataaagactatatagttgaatttccagacataagtcccagctcagttacttatcaggtttctaaacgaaggggcatgtcaattacgagaaaccataggaggtttttcttaagcgaggtgtctggaatcctaccgcagccgcatctgtggtactctacgaaggaggccgtcaaagcccttgaactatttcttgatgcaggaagcacattttcagaaagtctcacgtataggtatgaccttgtcgacctaactaggcagtgcctatccaaactagcgaatgaagtttaccttgacgcgataagtttgtaccaaaagaaagattcacatggcctgaatgctcacgcgaggaaatttcttgagatcatcgtggatatcgatacgttactagctgctgatgataactttctgctgggcccctggctggaaagtgcaaaaagccttgctataactgaaaaggaacgccagcagtacgagtggaacgccagaacacaggtgacgatgtggtatgacaacacggagaccgagcagagtaaactgcatgactacgccaataagttttggagcgggctgctgaagagctactaccttccaagggcgtcaaagtacttcgcctacttaacgaggagcctgcaagagaaccggagcttccagctggaggagtggaggaaggactggatctcgtattccaacgagtggcagtccggaaaggaggtgtacgccgtgaaggccacgggtgatgctttggcgattgccaggtcactgtacagaaaatacttgaggccttgagctagtgctagtcaatgcacggatgtgaccattagaataagtggattccacatctctctccatcaatttaagtttaattgatacatataatttaatatatggtgtcagtcagatatctttgagttttaaatcttgattagcacaattaaataaaatagatattgctcgttcctatttttatctctgactcctccggagtccggagagcaactccaaaaaagagacctatatttgagtcctaaatattgtttttgacctgatttgatttgttttaggaccctaacatattatctgccaacaatcaggccttaaacatctatttatcaataaccaaacgggctagcacagaaaaatcaagcgccaaacaacgtaagagtgaagtcttatatgaatttactgcaatgttggag

SEQ ID NO: 81008 - DNA, 2319 bp, Zea Mays
gagagtccgcttcgaacgcgcgacatggtgactcactgagcagaatcttggccagtgtatgtgtaacaacaactactattcaggctgcacagctttgcgcagtcgtggccactaggttatctcaagttttaatgttaccgacagagatttagatgatttttttggtggaccagctttccttgcttgggctagaatggggaacttgcatgggtggggtggaccactgtcacaaaactggttggatcaacaattggcattgcagaagaaaattctatcccggatgattgagcttgggatggtccctgttcttccatcgttctcaggaaatgtcccagctattttcgcaaaattatttccgtcagccaacattacgcgacttggtgattggaatacagttgatgctaatcctaagtggtgttgcacttatcttcttgatccttctgattcattgtttatagatgtggggcaggcttttatcaggcaacagataaaagagtacggcgatgtaaccaacatctataactgtgacacattcaatgagaatactccaccaacagatgaaccggcatatatttcatcacttggttctgctatctatgaagcaatgtcccgaggtaacaagaatgcagtatggttaatgcagggttggttattctactcagatgctgcattctggaaggagccacaaatgaaagcactacttcactctgttccaattggtaagatgatagttctcgatttatttgctgatgtcaagcccatttggaaagtgtcctctcagttttacggcgtaccatacatctggtgcatgttacacaactttggtgggaacattgaaatgtatggcatacttgattcaatttcatctggccccattgatgcccgtacaagttacaattcaacaatgattggcgttggcatgtgcatggagggaatagagcacaatccagttgtttatgaacttatgtctgaaatggcatttcataataagaaggttgaggttgaggattggctaaaaacatactcctgtaggagatatggtcaagcaaatgctgacatagagaaagcttggagatatttgtatcatacaatatacaattgcactgatgggattgcggaccataataaagactatatagttgaatttccagacataagtcccagctcagttacttatcaggtttctaaacgaaggggcatgtcaattacgagaaaccataggaggtttttcttaagcgaggtgtctggaatcctaccgcagccgcatctgtggtactctacgaaggaggccgtcaaagcccttgaactatttcttgatgcaggaagcacattttcagaaagtctcacgtataggtatgaccttgtcgacctaactaggcagtgcctatccaaactagcgaatgaagtttaccttgacgcgataagtttgtaccaaaagaaagattcacatggcctgaatgctcacgcgaggaaatttcttgagatcatcgtggatatcgatacgttactagctgctgatgataactttctgctgggcccctggctggaaagtgcaaaaagccttgctataactgaaaaggaacgccagcagtacgagtggaacgccagaacacaggtgacgatgtggtatgacaacacggagaccgagcagagtaaactgcatgactacgccaataagttttggagcgggctgctgaagagctactaccttccaagggcgtcaaagtacttcgcctacttaacgaggagcctgcaagagaaccggagcttccagctggaggagtggaggaaggactggatctcgtattccaacgagtggcagtccggaaaggaggtgtacgccgtgaaggccacgggtgatgctttggcgattgccaggtcactgtacagaaaatacttgaggccttgagctagtgctagtcaatgcacggatgtgaccattagaataagtggattccacatctctctccatcaatttaagtttaattgatacatataatttaatatatggtgtcagtcagatatctttgagttttaaatcttgattagcacaattaaataaaatagatattgctcgttcctatttttatctctgactcctccggagtccggagagcaactccaaaaaagagacctatatttgagtcctaaatattgtttttgacctgatttgatttgttttaggaccctaacatattatctgccaacaatcaggccttaaacatctatttatcaataaccaaacgggctagcacagaaaaatcaagcgccaaacaacgtaagagtgaagtcttatatgaatttactgcaatgttggag

SEQ ID NO: 81009 - DNA, 2514 bp, Zea Mays
cgaacgcgcgacatggtgactcactgagcagaatcttggccagtgtatgtgtaacaacaactactattcaggctgcacagctttgcgcagtcgtggccactaggttatctcaagttttaatgttaccgacagagatttagatgatttttttggtggaccagctttccttgcttgggctagaatggggaacttgcatgggtggggtggaccactgtcacaaaactggttggatcaacaattggcattgcagaagaaaattctatcccggatgattgagcttgggatggtccctggtacattgttgttttattgtctaaaattactattcttcaacctttaacatatgccattgcatttgtaccacctttccatgctttttttagcaatgtgtttttatatgaggtcaaaagatcaatggactttttactatcaatattctattactacggtgggttaaatactgtttcaagttatacttatgacgcactattactctacagttcttccatcgttctcaggaaatgtcccagctattttcgcaaaattatttccgtcagccaacattacgcgacttggtgattggaatacagttgatgctaatcctaagtggtgttgcacttatcttcttgatccttctgattcattgtttatagatgtggggcaggcttttatcaggcaacagataaaagagtacggcgatgtaaccaacatctataactgtgacacattcaatgagaatactccaccaacagatgaaccggcatatatttcatcacttggttctgctatctatgaagcaatgtcccgaggtaacaagaatgcagtatggttaatgcagggttggttattctactcagatgctgcattctggaaggagccacaaatgaaagcactacttcactctgttccaattggtaagatgatagttctcgatttatttgctgatgtcaagcccatttggaaagtgtcctctcagttttacggcgtaccatacatctggtgcatgttacacaactttggtgggaacattgaaatgtatggcatacttgattcaatttcatctggccccattgatgcccgtacaagttacaattcaacaatgattggcgttggcatgtgcatggagggaatagagcacaatccagttgtttatgaacttatgtctgaaatggcatttcataataagaaggttgaggttgaggattggctaaaaacatactcctgtaggagatatggtcaagcaaatgctgacatagagaaagcttggagatatttgtatcatacaatatacaattgcactgatgggattgcggaccataataaagactatatagttgaatttccagacataagtcccagctcagttacttatcaggtttctaaacgaaggggcatgtcaattacgagaaaccataggaggtttttcttaagcgaggtgtctggaatcctaccgcagccgcatctgtggtactctacgaaggaggccgtcaaagcccttgaactatttcttgatgcaggaagcacattttcagaaagtctcacgtataggtatgaccttgtcgacctaactaggcagtgcctatccaaactagcgaatgaagtttaccttgacgcgataagtttgtaccaaaagaaagattcacatggcctgaatgctcacgcgaggaaatttcttgagatcatcgtggatatcgatacgttactagctgctgatgataactttctgctgggcccctggctggaaagtgcaaaaagccttgctataactgaaaaggaacgccagcagtacgagtggaacgccagaacacaggtgacgatgtggtatgacaacacggagaccgagcagagtaaactgcatgactacgccaataagttttggagcgggctgctgaagagctactaccttccaagggcgtcaaagtacttcgcctacttaacgaggagcctgcaagagaaccggagcttccagctggaggagtggaggaaggactggatctcgtattccaacgagtggcagtccggaaaggaggtgtacgccgtgaaggccacgggtgatgctttggcgattgccaggtcactgtacagaaaatacttgaggccttgagctagtgctagtcaatgcacggatgtgaccattagaataagtggattccacatctctctccatcaatttaagtttaattgatacatataatttaatatatggtgtcagtcagatatctttgagttttaaatcttgattagcacaattaaataaaatagatattgctcgttcctatttttatctctgactcctccggagtccggagagcaactccaaaaaagagacctatatttgagtcctaaatattgtttttgacctgatttgatttgttttaggaccctaacatattatctgccaacaatcaggccttaaacatctatttatcaataaccaaacgggctagcacagaaaaatcaagcgccaaacaacgtaagagtgaagtcttatatgaatttactgcaatgttggag

SEQ ID NO: 81010 - DNA, 2414 bp, Zea Mays
cttggccagtgtatgtgtaacaacaactactattcaggctgcacagctttgcgcagtcgtggccactaggttatctcaagttttaatgttaccgacagagatttagatgatttttttggtggaccagctttccttgcttgggctagaatggggaacttgcatgggtggggtggaccactgtcacaaaactggttggatcaacaattggcattgcagaagaaaattctatcccggatgattgagcttgggatggtccctgttcttccatcgttctcaggaaatgtcccagctattttcgcaaaattatttccgtcagccaacattacgcgacttggtgattggaatacagttgatgctaatcctaagtggtgttgcacttatcttcttgatccttctgattcattgtttatagatgtggggcaggcttttatcaggcaacagataaaagagtacggcgatgtaaccaacatctataactgtgacacattcaatgagaatactccaccaacagatgaaccggcatatatttcatcacttggttctgctatctatgaagcaatgtcccgaggtaacaagaatgcagtatggttaatgcagggttggttattctactcagatgctgcattctggaaggagccacaaatgaaagcactacttcactctgttccaattggtaagatgatagttctcgatttatttgctgatgtcaagcccatttggaaagtgtcctctcagttttacggcgtaccatacatctggtgcatgttacacaactttggtgggaacattgaaatgtatggcatacttgattcaatttcatctggccccattgatgcccgtacaagttacaattcaacaatgattggcgttggcatgtgcatggagggaatagagcacaatccagttgtttatgaacttatgtctgaaatggcatttcataataagaaggttgaggttgagtgagatcgggattaattgaagttttctgccttgagttaaatgttgacctgtgcatcagagaaggattgtccaaaacaccaaacatttgtaatttgtgtagtttcttggtagacatgctttctgcgaccttgtttacatgaggattggctaaaaacatactcctgtaggagatatggtcaagcaaatgctgacatagagaaagcttggagatatttgtatcatacaatatacaattgcactgatgggattgcggaccataataaagactatatagttgaatttccagacataagtcccagctcagttacttatcaggtttctaaacgaaggggcatgtcaattacgagaaaccataggaggtttttcttaagcgaggtgtctggaatcctaccgcagccgcatctgtggtactctacgaaggaggccgtcaaagcccttgaactatttcttgatgcaggaagcacattttcagaaagtctcacgtataggtatgaccttgtcgacctaactaggcagtgcctatccaaactagcgaatgaagtttaccttgacgcgataagtttgtaccaaaagaaagattcacatggcctgaatgctcacgcgaggaaatttcttgagatcatcgtggatatcgatacgttactagctgctgatgataactttctgctgggcccctggctggaaagtgcaaaaagccttgctataactgaaaaggaacgccagcagtacgagtggaacgccagaacacaggtgacgatgtggtatgacaacacggagaccgagcagagtaaactgcatgactacgccaataagttttggagcgggctgctgaagagctactaccttccaagggcgtcaaagtacttcgcctacttaacgaggagcctgcaagagaaccggagcttccagctggaggagtggaggaaggactggatctcgtattccaacgagtggcagtccggaaaggaggtgtacgccgtgaaggccacgggtgatgctttggcgattgccaggtcactgtacagaaaatacttgaggccttgagctagtgctagtcaatgcacggatgtgaccattagaataagtggattccacatctctctccatcaatttaagtttaattgatacatataatttaatatatggtgtcagtcagatatctttgagttttaaatcttgattagcacaattaaataaaatagatattgctcgttcctatttttatctctgactcctccggagtccggagagcaactccaaaaaagagacctatatttgagtcctaaatattgtttttgacctgatttgatttgttttaggaccctaacatattatctgccaacaatcaggccttaaacatctatttatcaataaccaaacgggctagcacagaaaaatcaagcgccaaacaacgtaagagtgaagtcttatatgaatttactgcaatgttggag

SEQ ID NO: 81011 - DNA, 2286 bp, Zea Mays
cagctttgcgcagtcgtggccactaggttatctcaagttttaatgttaccgacagagatttagatgatttttttggtggaccagctttccttgcttgggctagaatggggaacttgcatgggtggggtggaccactgtcacaaaactggttggatcaacaattggcattgcagaagaaaattctatcccggatgattgagcttgggatggtccctgttcttccatcgttctcaggaaatgtcccagctattttcgcaaaattatttccgtcagccaacattacgcgacttggtgattggaatacagttgatgctaatcctaagtggtgttgcacttatcttcttgatccttctgattcattgtttatagatgtggggcaggcttttatcaggcaacagataaaagagtacggcgatgtaaccaacatctataactgtgacacattcaatgagaatactccaccaacagatgaaccggcatatatttcatcacttggttctgctatctatgaagcaatgtcccgaggtaacaagaatgcagtatggttaatgcagggttggttattctactcagatgctgcattctggaaggagccacaaatgaaagcactacttcactctgttccaattggtgcatgttacacaactttggtgggaacattgaaatgtatggcatacttgattcaatttcatctggccccattgatgcccgtacaagttacaattcaacaatgattggcgttggcatgtgcatggagggaatagagcacaatccagttgtttatgaacttatgtctgaaatggcatttcataataagaaggttgaggttgagtgagatcgggattaattgaagttttctgccttgagttaaatgttgacctgtgcatcagagaaggattgtccaaaacaccaaacatttgtaatttgtgtagtttcttggtagacatgctttctgcgaccttgtttacatgaggattggctaaaaacatactcctgtaggagatatggtcaagcaaatgctgacatagagaaagcttggagatatttgtatcatacaatatacaattgcactgatgggattgcggaccataataaagactatatagttgaatttccagacataagtcccagctcagttacttatcaggtttctaaacgaaggggcatgtcaattacgagaaaccataggaggtttttcttaagcgaggtgtctggaatcctaccgcagccgcatctgtggtactctacgaaggaggccgtcaaagcccttgaactatttcttgatgcaggaagcacattttcagaaagtctcacgtataggtatgaccttgtcgacctaactaggcagtgcctatccaaactagcgaatgaagtttaccttgacgcgataagtttgtaccaaaagaaagattcacatggcctgaatgctcacgcgaggaaatttcttgagatcatcgtggatatcgatacgttactagctgctgatgataactttctgctgggcccctggctggaaagtgcaaaaagccttgctataactgaaaaggaacgccagcagtacgagtggaacgccagaacacaggtgacgatgtggtatgacaacacggagaccgagcagagtaaactgcatgactacgccaataagttttggagcgggctgctgaagagctactaccttccaagggcgtcaaagtacttcgcctacttaacgaggagcctgcaagagaaccggagcttccagctggaggagtggaggaaggactggatctcgtattccaacgagtggcagtccggaaaggaggtgtacgccgtgaaggccacgggtgatgctttggcgattgccaggtcactgtacagaaaatacttgaggccttgagctagtgctagtcaatgcacggatgtgaccattagaataagtggattccacatctctctccatcaatttaagtttaattgatacatataatttaatatatggtgtcagtcagatatctttgagttttaaatcttgattagcacaattaaataaaatagatattgctcgttcctatttttatctctgactcctccggagtccggagagcaactccaaaaaagagacctatatttgagtcctaaatattgtttttgacctgatttgatttgttttaggaccctaacatattatctgccaacaatcaggccttaaacatctatttatcaataaccaaacgggctagcacagaaaaatcaagcgccaaacaacgtaagagtgaagtcttatatgaatttactgcaatgttggag

SEQ ID NO: 81012 - DNA, 1947 bp, Zea Mays
cacactttcctatatgaatacagttgatgctaatcctaagtggtgttgcacttatcttcttgatccttctgattcattgtttatagatgtggggcaggcttttatcaggcaacagataaaagagtacggcgatgtaaccaacatctataactgtgacacattcaatgagaatactccaccaacagatgaaccggcatatatttcatcacttggttctgctatctatgaagcaatgtcccgaggtaacaagaatgcagtatggttaatgcagggttggttattctactcagatgctgcattctggaaggagccacaaatgaaagcactacttcactctgttccaattggtaagatgatagttctcgatttatttgctgatgtcaagcccatttggaaagtgtcctctcagttttacggcgtaccatacatctggtgcatgttacacaactttggtgggaacattgaaatgtatggcatacttgattcaatttcatctggccccattgatgcccgtacaagttacaattcaacaatgattggcgttggcatgtgcatggagggaatagagcacaatccagttgtttatgaacttatgtctgaaatggcatttcataataagaaggttgaggttgaggattggctaaaaacatactcctgtaggagatatggtcaagcaaatgctgacatagagaaagcttggagatatttgtatcatacaatatacaattgcactgatgggattgcggaccataataaagactatatagttgaatttccagacataagtcccagctcagttacttatcaggtttctaaacgaaggggcatgtcaattacgagaaaccataggaggtttttcttaagcgaggtgtctggaatcctaccgcagccgcatctgtggtactctacgaaggaggccgtcaaagcccttgaactatttcttgatgcaggaagcacattttcagaaagtctcacgtataggtatgaccttgtcgacctaactaggcagtgcctatccaaactagcgaatgaagtttaccttgacgcgataagtttgtaccaaaagaaagattcacatggcctgaatgctcacgcgaggaaatttcttgagatcatcgtggatatcgatacgttactagctgctgatgataactttctgctgggcccctggctggaaagtgcaaaaagccttgctataactgaaaaggaacgccagcagtacgagtggaacgccagaacacaggtgacgatgtggtatgacaacacggagaccgagcagagtaaactgcatgactacgccaataagttttggagcgggctgctgaagagctactaccttccaagggcgtcaaagtacttcgcctacttaacgaggagcctgcaagagaaccggagcttccagctggaggagtggaggaaggactggatctcgtattccaacgagtggcagtccggaaaggaggtgtacgccgtgaaggccacgggtgatgctttggcgattgccaggtcactgtacagaaaatacttgaggccttgagctagtgctagtcaatgcacggatgtgaccattagaataagtggattccacatctctctccatcaatttaagtttaattgatacatataatttaatatatggtgtcagtcagatatctttgagttttaaatcttgattagcacaattaaataaaatagatattgctcgttcctatttttatctctgactcctccggagtccggagagcaactccaaaaaagagacctatatttgagtcctaaatattgtttttgacctgatttgatttgttttaggaccctaacatattatctgccaacaatcaggccttaaacatctatttatcaataaccaaacgggctagcacagaaaaatcaagcgccaaacaacgtaagagtgaagtcttatatgaatttactgcaatgttggag

SEQ ID NO: 81013 - DNA, 2212 bp, Zea Mays
ccgagctgcttgcggacacaaaaaaagcgttacatgctggcagtcactctgtcaatgttgctcgacatcagtttacatgtcgtgtgggcgtgtggcaaattttgccatgtcttaaacatatcaagtctgtgtactgccagtgcttatgtgcctgatttcaatatgaaagaatacagttgatgctaatcctaagtggtgttgcacttatcttcttgatccttctgattcattgtttatagatgtggggcaggcttttatcaggcaacagataaaagagtacggcgatgtaaccaacatctataactgtgacacattcaatgagaatactccaccaacagatgaaccggcatatatttcatcacttggttctgctatctatgaagcaatgtcccgagggttggttattctactcagatgctgcattctggaaggagccacaaatgaaagcactacttcactctgttccaattggtaagatgatagttctcgatttatttgctgatgtcaagcccatttggaaagtgtcctctcagttttacggcgtaccatacatctggtgcatgttacacaactttggtgggaacattgaaatgtatggcatacttgattcaatttcatctggccccattgatgcccgtacaagttacaattcaacaatgattggcgttggcatgtgcatggagggaatagagcacaatccagttgtttatgaacttatgtctgaaatggcatttcataataagaaggttgaggttgagtgagatcgggattaattgaagttttctgccttgagttaaatgttgacctgtgcatcagagaaggattgtccaaaacaccaaacatttgtaatttgtgtagtttcttggtagacatgctttctgcgaccttgtttacatgaggattggctaaaaacatactcctgtaggagatatggtcaagcaaatgctgacatagagaaagcttggagatatttgtatcatacaatatacaattgcactgatgggattgcggaccataataaagactatatagttgaatttccagacataagtcccagctcagttacttatcaggtttctaaacgaaggggcatgtcaattacgagaaaccataggaggtttttcttaagcgaggtgtctggaatcctaccgcagccgcatctgtggtactctacgaaggaggccgtcaaagcccttgaactatttcttgatgcaggaagcacattttcagaaagtctcacgtataggtatgaccttgtcgacctaactaggcagtgcctatccaaactagcgaatgaagtttaccttgacgcgataagtttgtaccaaaagaaagattcacatggcctgaatgctcacgcgaggaaatttcttgagatcatcgtggatatcgatacgttactagctgctgatgataactttctgctgggcccctggctggaaagtgcaaaaagccttgctataactgaaaaggaacgccagcagtacgagtggaacgccagaacacaggtgacgatgtggtatgacaacacggagaccgagcagagtaaactgcatgactacgccaataagttttggagcgggctgctgaagagctactaccttccaagggcgtcaaagtacttcgcctacttaacgaggagcctgcaagagaaccggagcttccagctggaggagtggaggaaggactggatctcgtattccaacgagtggcagtccggaaaggaggtgtacgccgtgaaggccacgggtgatgctttggcgattgccaggtcactgtacagaaaatacttgaggccttgagctagtgctagtcaatgcacggatgtgaccattagaataagtggattccacatctctctccatcaatttaagtttaattgatacatataatttaatatatggtgtcagtcagatatctttgagttttaaatcttgattagcacaattaaataaaatagatattgctcgttcctatttttatctctgactcctccggagtccggagagcaactccaaaaaagagacctatatttgagtcctaaatattgtttttgacctgatttgatttgttttaggaccctaacatattatctgccaacaatcaggccttaaacatctatttatcaataaccaaacgggctagcacagaaaaatcaagcgccaaacaacgtaagagtgaagtcttatatgaatttactgcaatgttggag

SEQ ID NO: 81014 - DNA, 2094 bp, Zea Mays
atcagtttacatgtcgtgtgggcgtgtggcaaattttgccatgtcttaaacatatcaattgatgctaatcctaagtggtgttgcacttatcttcttgatccttctgattcattgtttatagatgtggggcaggcttttatcaggcaacagataaaagagtacggcgatgtaaccaacatctataactgtgacacattcaatgagaatactccaccaacagatgaaccggcatatatttcatcacttggttctgctatctatgaagcaatgtcccgagggttggttattctactcagatgctgcattctggaaggagccacaaatgaaagcactacttcactctgttccaattggtaagatgatagttctcgatttatttgctgatgtcaagcccatttggaaagtgtcctctcagttttacggcgtaccatacatctggtgcatgttacacaactttggtgggaacattgaaatgtatggcatacttgattcaatttcatctggccccattgatgcccgtacaagttacaattcaacaatgattggcgttggcatgtgcatggagggaatagagcacaatccagttgtttatgaacttatgtctgaaatggcatttcataataagaaggttgaggttgagtgagatcgggattaattgaagttttctgccttgagttaaatgttgacctgtgcatcagagaaggattgtccaaaacaccaaacatttgtaatttgtgtagtttcttggtagacatgctttctgcgaccttgtttacatgaggattggctaaaaacatactcctgtaggagatatggtcaagcaaatgctgacatagagaaagcttggagatatttgtatcatacaatatacaattgcactgatgggattgcggaccataataaagactatatagttgaatttccagacataagtcccagctcagttacttatcaggtttctaaacgaaggggcatgtcaattacgagaaaccataggaggtttttcttaagcgaggtgtctggaatcctaccgcagccgcatctgtggtactctacgaaggaggccgtcaaagcccttgaactatttcttgatgcaggaagcacattttcagaaagtctcacgtataggtatgaccttgtcgacctaactaggcagtgcctatccaaactagcgaatgaagtttaccttgacgcgataagtttgtaccaaaagaaagattcacatggcctgaatgctcacgcgaggaaatttcttgagatcatcgtggatatcgatacgttactagctgctgatgataactttctgctgggcccctggctggaaagtgcaaaaagccttgctataactgaaaaggaacgccagcagtacgagtggaacgccagaacacaggtgacgatgtggtatgacaacacggagaccgagcagagtaaactgcatgactacgccaataagttttggagcgggctgctgaagagctactaccttccaagggcgtcaaagtacttcgcctacttaacgaggagcctgcaagagaaccggagcttccagctggaggagtggaggaaggactggatctcgtattccaacgagtggcagtccggaaaggaggtgtacgccgtgaaggccacgggtgatgctttggcgattgccaggtcactgtacagaaaatacttgaggccttgagctagtgctagtcaatgcacggatgtgaccattagaataagtggattccacatctctctccatcaatttaagtttaattgatacatataatttaatatatggtgtcagtcagatatctttgagttttaaatcttgattagcacaattaaataaaatagatattgctcgttcctatttttatctctgactcctccggagtccggagagcaactccaaaaaagagacctatatttgagtcctaaatattgtttttgacctgatttgatttgttttaggaccctaacatattatctgccaacaatcaggccttaaacatctatttatcaataaccaaacgggctagcacagaaaaatcaagcgccaaacaacgtaagagtgaagtcttatatgaatttactgcaatgttggag

SEQ ID NO: 81015 - DNA, 738 bp, Zea Mays
aaggtgaaagtcgatgccagtagtagctacagcagttaatgcgaaaaactgaagcatgccacgcctgaccgacccccttctcgcctaatgtccgtgccccgactgcgtctccgccccgactcacccgcagcctgtctctgctcggcggcggccgtctcgactgcgggagaggggagcgccccttcgccgatctgatcgggagctgcaggccaaacggcgaggcgagcccatcaggaaccaccatggcagcggcagccgccgactccgatcccgccgcagctgtggccgacatgtccacctgcgcccattgtcaacgagagatcccttcttcgaacatcgacttgcattctgtacattgtgcccgtaacctccaaaagtgccagcactgtggagaaatgattcctaggaaacttatggatgaacactatgatgcaaaccatgccccgatcagttgctctctttgcaaagaaacaatagaacgtgtgaggtgggatcttcataaaggcgaaaagtgcccacaaagaatcgtcgcttgtgaatattgcgagtttgaattgcctgcagttgatctccatgagcatcaggatgtatgtggaaaccgaacagaactttgccaaacatgcaggaagtatattagattgtgtgaatggatagggcacgaaatacagtgccatacaagctcaaatggttctgcagacacatccaggttcagtgctaatctgatcgatgttttttaag

SEQ ID NO: 81016 - DNA, 1116 bp, Zea Mays
aaggtgaaagtcgatgccagtagtagctacagcagttaatgcgaaaaactgaagcatgccacgcctgaccgacccccttctcgcctaatgtccgtgccccgactgcgtctccgccccgactcacccgcagcctgtctctgctcggcggcggccgtctcgactgcgggagaggggagcgccccttcgccgatctgatcgggagctgcaggccaaacggcgaggcgagcccatcaggaaccaccatggcagcggcagccgccgactccgatcccgccgcagctgtggccgacatgtccacctgcgcccattgatcagttgctctctttgcaaagaaacaatagaacgtgtgaggtgggatcttcataaaggcgaaaagtgcccacaaagaatcgtcgcttgtgaatattgcgagtttgaattgcctgcagttgatctccatgagcatcaggatgtatgtggaaaccgaacagaactttgccaaacatgcaggaagtatattagattgtgtgaatggatagggcacgaaatacagtgccatacaagctcaaatggttctgcagacacatccagagcaattccagagagagagctacgaccgccgccgccggtgcggccggcacgaccagcacgtcctgctcatgcttcaccacacaagcggctcctcttcacaatcgctgtcactggaatagcagttatggttggctccatactgttccaaagggacgagagtttctagctccagtggccatggacttactctgtatgtcatgttgtttcttgaccgggagagtcatgccacaggaggtgtatttatgtataataactcctcgaatcagtgcataaatcgagtttgtttgagagcatagccccaggcgtgggtttgtggaaaatgcaaagtaaccgtggataaatgcgttcgcccttggcagttctggaacttctgtttgttctgacatcggacttgcatttgttcgtctgtaaagtcgagatgagttatacaatcggggtatcatatctggaaagcgacacgatgcagcagttgttaatagtttggtttatactgtatcctgtagtgttctaatgtaccaatttgtgggaaactggactatcttcaaa

SEQ ID NO: 81017 - DNA, 1247 bp, Zea Mays
aaggtgaaagtcgatgccagtagtagctacagcagttaatgcgaaaaactgaagcatgccacgcctgaccgacccccttctcgcctaatgtccgtgccccgactgcgtctccgccccgactcacccgcagcctgtctctgctcggcggcggccgtctcgactgcgggagaggggagcgccccttcgccgatctgatcgggagctgcaggccaaacggcgaggcgagcccatcaggaaccaccatggcagcggcagccgccgactccgatcccgccgcagctgtggccgacatgtccacctgcgcccattgtcaacgagagatcccttcttcgaacatcgacttgcattctgtacattgtgcccgtaacctccaaaagtgccagcactgtggagaaatgattcctaggaaacttatggatgaacactatgatgcaaaccatgccccgttgctctctttgcaaagaaacaatagaacgtgtgaggtgggatcttcataaaggcgaaaagtgcccacaaagaatcgtcgcttgtgaatattgcgagtttgaattgcctgcagttgatctccatgagcatcaggatgtatgtggaaaccgaacagaactttgccaaacatgcaggaagtatattagattgtgtgaatggatagggcacgaaatacagtgccatacaagctcaaatggttctgcagacacatccagagcaattccagagagagagctacgaccgccgccgccggtgcggccggcacgaccagcacgtcctgctcatgcttcaccacacaagcggctcctcttcacaatcgctgtcactggaatagcagttatggttggctccatactgttccaaagggacgagagtttctagctccagtggccatggacttactctgtatgtcatgttgtttcttgaccgggagagtcatgccacaggaggtgtatttatgtataataactcctcgaatcagtgcataaatcgagtttgtttgagagcatagccccaggcgtgggtttgtggaaaatgcaaagtaaccgtggataaatgcgttcgcccttggcagttctggaacttctgtttgttctgacatcggacttgcatttgttcgtctgtaaagtcgagatgagttatacaatcggggtatcatatctggaaagcgacacgatgcagcagttgttaatagtttggtttatactgtatcctgtagtgttctaatgtaccaatttgtgggaaactggactatcttcaaa

SEQ ID NO: 81018 - DNA, 1082 bp, Zea Mays
tctttgcttagcacccaacgctaccctcttggtccaatccaacccatccatctactagcctctcataggttctggcacgccgaaaactccgtataaaacacacaccgccctcctacggatcaaaccacccctcggaaaaccccaaaaaagcgtcagaaaaagaagagagagctgggggatggacacgcacgtcggcaaattaatcgactcggtgggctccatcttccgcggcagcgacgtcctgccctgggtttcgagagtgaggttgctgaggctgcaaatgaagaacagaaaaccgagagcctgatgaggctctcctgggcgcttgttcactctagacagcctgaagatgtcaaccggggcatcggaatgcttgaagcttcattggacaggtctagcagcccagaggaaacaagggagaagctctacttgttagctgttggtcgttacagaactggggattatacaagaagccgacagcttttggaaagatgcttagagatccaacatgactggagacaagccataactttgcaaaggctcgttgaagaaaaaaccaaaagagatggtatgattggcatggctatcatcacaggcgcctttggagttgtgggtcttgttgctggtggtataattgctgcggcttcttcgtcatccaggaagagatgaggatatcttctctgttgaagtgaataagaaaaaggcgggcaaaagcttggtggtgggtgacagtgctcatcattttttgctccgtgtgaaggggtgctcacttgtcttttttcgcgtgagagaccaactttgtattgcgtccaaacgagagatatatgtattgttaaacagtagaggtcgaggctgccgaacattctgtttttactaccaaccttgtattgcgttcaaatgagatatatgtgttgtataacatgtttttttcaatgcacggaggagttccttggatactctcaagaagaggtcgggcagcctgagcacccagccagctcggttccctgcagacacaacatgctgtgagctttgtcatccgctagttcgtgtttatgaactaaaacacgacaaataaaaaagaa

SEQ ID NO: 81019 - DNA, 2257 bp, Zea Mays
gctaccctcttggtccaatccaacccatccatctactagcctctcataggttctggcacgccgaaaactccgtataaaacacacaccgccctcctacggatcaaaccacccctcggaaaaccccaaaaaagcgtcagaaaaagaagagagagctgggggatggacacgcacgtcggcaaattaatcgactcggtgggctccatcttccgcggcagcgacgtcctgccctggtgcgatcccgacatcatcgccgtaagcctctccttcccctcctcttctcgccgagataactgcggcctccgctgccggctgcctcccagggaggcctgttgatgaatgccgccaatccgaccgtttccttcttccgccttcttgtcgctctggtgggatgcgcacgagaggcccacgaatcggcacggggttcgctgagtcgttgctgcgctgggaattgtgtcgcaggttccttgtagtcacggggaattcactagctcaccttgccggtcggttgaaccaacaatggatcacctcccattccaccgtggcgctactgcggtcattaagcaaaacaaaccaattatccgattgcatcccgttatctggtcaaaccgtgtttgatcacgctcacgcacgcctaatcgtaatcgttgccacacgttctttatgatcaattcctttttatcagggtttcgagagtgaggttgctgaggctgcaaatgaagaacagaaaaccgagagcctgatgaggctctcctgggcgcttgttcactctagacagcctgaagatgtcaaccggggcatcggaatgcttgaagcttcattggacaggtctagcagcccagaggaaacaagggagaagctctacttgttagctgttggtcgttacagaactggggattatacaagaagccgacagcttttggaaagatgcttagaggtttgatcaggaaatgtgttatctgttgttattcctctgatgtgaccttccggttttgttttagtctcaggccttagtcctgtactgtcaagcaaggcacccctgaatttgattgcctgcatgttgaacaaaacatttcatgttttcttcagatccaacatgactggagacaagccataactttgcaaaggctcgttgaagaaaaaaccaaaagaggttggtatactatttatgcttcccattttcagtgtacgcagatcataaaatgaatgtccatggatttttcatctcctactaatatccactatcaaggtaggaaaatgaattgccaatagcttatcatgtgcaactataatgccaacaggatggccctgtttgtttccacttataatcaccatacctcaggttttttttttcaactcctgattttgctagttcaaagttttgaagcggtggcgaacagaagcagaaacaatcgaggcatttggtcggattcttgctttttccccccatcgagattccgactataagcacttaagcacaaacaaacaatgctgatgtctagtaatttttcatgtcctaaagtaaatatccgaatataagcagaaacaaacagggctggtgtccctccacaatcaggtctggacctaaaaagtagggacgaagacatcatgtctcaacaaaattgtatctaccatatttcacatattagaaacgaataatagtacaaacctctaatcattccaatgcactgtttctggtttgtctaacttgggtaacattacttacttgatggttaaatgcagatggtatgattggcatggctatcatcacaggcgcctttggagttgtgggtcttgttgctggtggtataattgctgcggcttcttcgtcatccaggaagagatgaggatatcttctctgttgaagtgaataagaaaaaggcgggcaaaagcttggtggtgggtgacagtgctcatcattttttgctccgtgtgaaggggtgctcacttgtcttttttcgcgtgagagaccaactttgtattgcgtccaaacgagagatatatgtattgttaaacagtagaggtcgaggctgccgaacattctgtttttactaccaaccttgtattgcgttcaaatgagatatatgtgttgtataacatgtttttttcaatgcacggaggagttccttggatactctcaagaagaggtcgggcagcctgagcacccagccagctcggttccctgcagacacaacatgctgtgagctttgtcatccgctagttcgtgtttatgaactaaaacacgacaaataaaaaagaa

SEQ ID NO: 81020 - DNA, 1369 bp, Zea Mays
aatccaacccatccatctactagcctctcataggttctggcacgccgaaaactccgtataaaacacacaccgccctcctacggatcaaaccacccctcggaaaaccccaaaaaagcgtcagaaaaagaagagagagctgggggatggacacgcacgtcggcaaattaatcgactcggtgggctccatcttccgcggcagcgacgtcctgccctggtgcgatcccgacatcatcgccgtaagcctctccttcccctcctcttctcgccgagataactgcggcctccgctgccggctgcctcccagggaggcctgttgatgaatgccgccaatccgaccgtttccttcttccgccttcttgtcgctctggtgggatgcgcacgagaggcccacgaatcggcacggggttcgctgagtcgttgctgcgctgggaattgtgtcgcaggttccttgtagtcacggggaattcactagctcaccttgccggtcggttgaaccaacaatggatcacctcccattccaccgtggcgctactgcgggtttcgagagtgaggttgctgaggctgcaaatgaagaacagaaaaccgagagcctgatgaggctctcctgggcgcttgttcactctagacagcctgaagatgtcaaccggggcatcggaatgcttgaagcttcattggacaggtctagcagcccagaggaaacaagggagaagctctacttgttagctgttggtcgttacagaactggggattatacaagaagccgacagcttttggaaagatgcttagagatccaacatgactggagacaagccataactttgcaaaggctcgttgaagaaaaaaccaaaagagatggtatgattggcatggctatcatcacaggcgcctttggagttgtgggtcttgttgctggtggtataattgctgcggcttcttcgtcatccaggaagagatgaggatatcttctctgttgaagtgaataagaaaaaggcgggcaaaagcttggtggtgggtgacagtgctcatcattttttgctccgtgtgaaggggtgctcacttgtcttttttcgcgtgagagaccaactttgtattgcgtccaaacgagagatatatgtattgttaaacagtagaggtcgaggctgccgaacattctgtttttactaccaaccttgtattgcgttcaaatgagatatatgtgttgtataacatgtttttttcaatgcacggaggagttccttggatactctcaagaagaggtcgggcagcctgagcacccagccagctcggttccctgcagacacaacatgctgtgagctttgtcatccgctagttcgtgtttatgaactaaaacacgacaaataaaaaagaa

SEQ ID NO: 81021 - DNA, 1078 bp, Zea Mays
cttgactccttgagcccagtgcccagacggcttgcgcttggcctcacctcctcttctcgtcgagcggataacagaaccgatgtgcaagctccggccggagcgtcaggataagaaccgcgcgccggcaggcagctgctcctgcgactgcgagcgcccgtccaatggcgtccctctccccttccctccacctcccttgcaattcaagaactggcttccttggaaagacacgtgggattcgtccttgtgttttccctgctggaagagttggatttgtcagaacagtagtggaatgcaaggaatctagaattggaaagcagcccatcgaagttccatcaaatgttactctcacattagaagagcagtttgtcaaagctaagggtccgctgggggagttatctctgagctttccaggtgacttgaagatcgtgaaagaagaatccggtaacctgagagtttataagactgcagagaccaagagggcgaaccagatgcacggacttttcagacaacatcatcgtcggtgtgtcaaaaggattcgacaagaagcttcagttagtaggtgtcgggtaccgtgcggcggtggagggcaacgatctcgtgatgaacctgggattctcccaccctgttcggatggccattcccgaaggcctggcggtcaaggtggaagagaacacaaggatcatcgtgagcggctacgacaagagcgcgatcggtcagttcgctgctaccataaagaagtggaggccacctgagccatacaaggggaagggtatcagatacatggatgaagttgtcagaaggaaggaaggaaaagctgggaagaagaaatagaagtgtttgttttttgtttgtcctttccatgcttcatttcattttcccgctgtaacggtcctcgtctgctatgaccgaacccgagaaaaaaagtattgttctgtggctgtgctgatcatgccatatttatgtgcaccttgagcatcccagtatcccactgtaatggtttccatgtacaccaagcggagccgtttgacccccgtttggttggtgaagacgcaaaactgctcgatgagcgctaccgcta

SEQ ID NO: 81022 - DNA, 1538 bp, Zea Mays
ctcacccgcactggccccaccgggcggcagacgcctggctgggctgcggccaagtggccacctcctcgcgtccggcctggcgtccccatgcacgcccggcctcgccttcccttccccgatatctcttcgtctcgccgccgccgcgcgcgcactctcgtgtgacgtgtcccagcagtccgtccagtccctggcttctctcccccttgttgttcttggctccgcgatggcggtgggttgcttcaaccccgtgctctcgccgcttgttccttcgccgccgggtaggcgcgtccgagcggcgctgcggtgccggtggcatcgtcacccgctgaccgcggtctccctccggcggctcccgtgcggcgcggcagctggtcgtggcacgcggcggctcgcggcggcggcagagtcgcaggccgtgcaggagcagccggcgcgggcggaagaggccggcggggcgggtgccgctgaggcgtcctccaagctggttctggtcgttggcggaaccggcggcgtggggcagttggttgtagcatcattgctgagcaggaacatcaagtcaaggttgctcctaagagatccagaaaaggcgtcgtccctgtttggcaagcaggatgagagtgtactacaggtttacaaagcggacacaagaaaccctaatgatttggatccacagatgtttgagggagttacgcatgtgatatgttgtactggaactacagcatttccgtctaagcgctgggatggagataacactccagaacgtgtagattgggatggcatcagaaatcttgtcagtgccttgccacagacagtcaagagactggttcttgtgtcatccattggtgttacaaaatacaatgagataccatggagcatcatgaatctctttggtgtgcttaagtacaagaagatgggagaagactttgtctgcaattcagggataccattcacgattattagggctggaagattgacagacgggccctacacttcgtatgatcttaatacacttcttaaagctacagctggagagcgacgagcagtagtcataggcaaaggtgacaagcttgtgggggaagttagcagacttgtggtagcagaagcttgtatccaagctttagatattgaatccactgaaggacaaatatatgagattaactcaggtgaagggcccggaactgacccagagaaatgggaggagctattcagatctgctcggtcagactagtggcattctgcaaagcgtagtaacgtaatgtaggaatatgcatcgtaatacaatgtaatccatagagtgcagccctaattcaatagtcactgaacagtagcgatcatgtagagaatatttggtttgtgtacatagtatgagcattcatatatgacgattatacctcctaaaagtgatagtttttgttggaaagtaaaatgttcagtgttatccttatccactttcagacttgattttattttctttttctcggaatgcaatcataatttgattgttcatttcaatatatatccttatttttcaaatatgt

SEQ ID NO: 81023 - DNA, 1537 bp, Zea Mays
acccgcactggccccaccgggcggcagacgcctggctgggctgcggccaagtggccacctcctcgcgtccggcctggcgtccccatgcacgcccggcctcgccttcccttccccgatatctcttcgtctcgccgccgccgcgcgcgcactctcgtgtgacgtgtcccagcagtccgtccagtccctggcttctctcccccttgttgttcttggctccgcgatggcggtgggttgcttcaaccccgtgctctcgccgcttgttccttcgccgccgggtaggcgcgtccgagcggcgctgcggtgccggtggcatcgtcacccgctgaccgcggtctccctccggcggctcccgtgcggcgcggcagctggtcgtggcacgcggcggctcgcggcggcggcagagtcgcaggccgtgcaggagcagccggcgcgggcggaagaggccggcggggcgggtgccgctgaggcgtcctccaagctggttctggtcgttggcggaaccggcggcgtggggcagttggttgtagcatcattgctgagcaggaacatcaagtcaaggttgctcctaagagatccagaaaaggcgtcgtccctgtttggcaagcaggatgagagtgtactacaggtttacaaagcggacacaagaaaccctaatgatttggatccacagatgtttgagggagttacgcatgtgatatgttgtactggaactacagcatttccgtctaagcgctgggatggagataacactccagaacgtattgggatggcatcagaaatcttgtcagtgccttgccacagacagtcaagagactggttcttgtgtcatccattggtgttacaaaatacaatgagataccatggagcatcatgaatctctttggtgtgcttaagtacaagaagatgggagaagactttgtctgcaattcagggataccattcacgattattagggctggaagattgacagacgggccctacacttcgtatgatcttaatacacttcttaaagctacagctggagagcgacgagcagtagtcataggcaaaggtgacaagcttgtgggggaagttagcagacttgtggtagcagaagcttgtatccaagctttagatattgaatccactgaaggacaaatatatgagattaactcagttaagggtgaagggcccggaactgacccagagaaatgggaggagctattcagatctgctcggtcagactagtggcattctgcaaagcgtagtaacgtaatgtaggaatatgcatcgtaatacaatgtaatccatagagtgcagccctaattcaatagtcactgaacagtagcgatcatgtagagaatatttggtttgtgtacatagtatgagcattcatatatgacgattatacctcctaaaagtgatagtttttgttggaaagtaaaatgttcagtgttatccttatccactttcagacttgattttattttctttttctcggaatgcaatcataatttgattgttcatttcaatatatatccttatttttcaaatatgt

SEQ ID NO: 81024 - DNA, 1557 bp, Zea Mays
acccgcactggccccaccgggcggcagacgcctggctgggctgcggccaagtggccacctcctcgcgtccggcctggcgtccccatgcacgcccggcctcgccttcccttccccgatatctcttcgtctcgccgccgccgcgcgcgcactctcgtgtgacgtgtcccagcagtccgtccagtccctggcttctctcccccttgttgttcttggctccgcgatggcggtgggttgcttcaaccccgtgctctcgccgcttgttccttcgccgccgggtaggcgcgtccgagcggcgctgcggtgccggtggcatcgtcacccgctgaccgcggtctccctccggcggctcccgtgcggcgcggcagctggtcgtggcacgcggcggctcgcggcggcggcagagtcgcaggccgtgcaggagcagccggcgcgggcggaagaggccggcggggcgggtgccgctgaggcgtcctccaagctggttctggtcgttggcggaaccggcggcgtggggcagttggttgtagcatcattgctgagcaggaacatcaagtcaaggttgctcctaagagatccagaaaaggcgtcgtccctgtttggcaagcaggatgagagtgtactacaggtttacaaagcggacacaagaaaccctaatgatttggatccacagatgtttgagggggtctcttttatagggagttacgcatgtgatatgttgtactggaactacagcatttccgtctaagcgctgggatggagataacactccagaacgtgtagattgggatggcatcagaaatcttgtcagtgccttgccacagacagtcaagagactggttcttgtgtcatccattggtgttacaaaatacaatgagataccatggagcatcatgaatctctttggtgtgcttaagtacaagaagatgggagaagactttgtctgcaattcagggataccattcacgattattagggctggaagattgacagacgggccctacacttcgtatgatcttaatacacttcttaaagctacagctggagagcgacgagcagtagtcataggcaaaggtgacaagcttgtgggggaagttagcagacttgtggtagcagaagcttgtatccaagctttagatattgaatccactgaaggacaaatatatgagattaactcagttaagggtgaagggcccggaactgacccagagaaatgggaggagctattcagatctgctcggtcagactagtggcattctgcaaagcgtagtaacgtaatgtaggaatatgcatcgtaatacaatgtaatccatagagtgcagccctaattcaatagtcactgaacagtagcgatcatgtagagaatatttggtttgtgtacatagtatgagcattcatatatgacgattatacctcctaaaagtgatagtttttgttggaaagtaaaatgttcagtgttatccttatccactttcagacttgattttattttctttttctcggaatgcaatcataatttgattgttcatttcaatatatatccttatttttcaaatatgt

SEQ ID NO: 81025 - DNA, 1536 bp, Zea Mays
acccgcactggccccaccgggcggcagacgcctggctgggctgcggccaagtggccacctcctcgcgtccggcctggcgtccccatgcacgcccggcctcgccttcccttccccgatatctcttcgtctcgccgccgccgcgcgcgcactctcgtgtgacgtgtcccagcagtccgtccagtccctggcttctctcccccttgttgttcttggctccgcgatggcggtgggttgcttcaaccccgtgctctcgccgcttgttccttcgccgccgggtaggcgcgtccgagcggcgctgcggtgccggtggcatcgtcacccgctgaccgcggtctccctccggcggctcccgtgcggcgcggcagctggtcgtggcacgcggcggctcgcggcggcggcagagtcgcaggccgtgcaggagcagccggcgcgggcggaagaggccggcggggcgggtgccgctgaggcgtcctccaagctggttctggtcgttggcggaaccggcggcgtggttggttgtagcatcattgctgagcaggaacatcaagtcaaggttgctcctaagagatccagaaaaggcgtcgtccctgtttggcaagcaggatgagagtgtactacaggtttacaaagcggacacaagaaaccctaatgatttggatccacagatgtttgagggagttacgcatgtgatatgttgtactggaactacagcatttccgtctaagcgctgggatggagataacactccagaacgtgtagattgggatggcatcagaaatcttgtcagtgccttgccacagacagtcaagagactggttcttgtgtcatccattggtgttacaaaatacaatgagataccatggagcatcatgaatctctttggtgtgcttaagtacaagaagatgggagaagactttgtctgcaattcagggataccattcacgattattagggctggaagattgacagacgggccctacacttcgtatgatcttaatacacttcttaaagctacagctggagagcgacgagcagtagtcataggcaaaggtgacaagcttgtgggggaagttagcagacttgtggtagcagaagcttgtatccaagctttagatattgaatccactgaaggacaaatatatgagattaactcagttaagggtgaagggcccggaactgacccagagaaatgggaggagctattcagatctgctcggtcagactagtggcattctgcaaagcgtagtaacgtaatgtaggaatatgcatcgtaatacaatgtaatccatagagtgcagccctaattcaatagtcactgaacagtagcgatcatgtagagaatatttggtttgtgtacatagtatgagcattcatatatgacgattatacctcctaaaagtgatagtttttgttggaaagtaaaatgttcagtgttatccttatccactttcagacttgattttattttctttttctcggaatgcaatcataatttgattgttcatttcaatatatatccttatttttcaaatatgt

SEQ ID NO: 81026 - DNA, 1615 bp, Zea Mays
acccgcactggccccaccgggcggcagacgcctggctgggctgcggccaagtggccacctcctcgcgtccggcctggcgtccccatgcacgcccggcctcgccttcccttccccgatatctcttcgtctcgccgccgccgcgcgcgcactctcgtgtgacgtgtcccagcagtccgtccagtccctggcttctctcccccttgttgttcttggctccgcgatggcggtgggttgcttcaaccccgtgctctcgccgcttgttccttcgccgccgggtaggcgcgtccgagcggcgctgcggtgccggtggcatcgtcacccgctgaccgcggtctccctccggcggctcccgtgcggcgcggcagctggtcgtggcacgcggcggctcgcggcggcggcagagtcgcaggccgtgcaggagcagccggcgcgggcggaagaggccggcggggcgggtgccgctgaggcgtcctccaagctggttctggtcgttggcggaaccggcggcgtggggcagttggttgtagcatcattgctgagcaggaacatcaagtcaaggttgctcctaagagatccagaaaaggcgtcgtccctgtttggcaagcaggatgagagtgtactacaggtttacaaagcggacacaagaaaccctaatgatttggatccacagatgtttgagggagttacgcatgtgatatgttgtactggaactacagcatttccgtctaagcgctgggatggagataacactccagaacgtgtagacaaaaggattttctgcaaggataatcttgatggagcttaggaccttccaattccaaactgaagcaaataaaagattgggatggcatcagaaatcttgtcagtgccttgccacagacagtcaagagactggttcttgtgtcatccattggtgttacaaaatacaatgagataccatggagcatcatgaatctctttggtgtgcttaagtacaagaagatgggagaagactttgtctgcaattcagggataccattcacgattattagggctggaagattgacagacgggccctacacttcgtatgatcttaatacacttcttaaagctacagctggagagcgacgagcagtagtcataggcaaaggtgacaagcttgtgggggaagttagcagacttgtggtagcagaagcttgtatccaagctttagatattgaatccactgaaggacaaatatatgagattaactcagttaagggtgaagggcccggaactgacccagagaaatgggaggagctattcagatctgctcggtcagactagtggcattctgcaaagcgtagtaacgtaatgtaggaatatgcatcgtaatacaatgtaatccatagagtgcagccctaattcaatagtcactgaacagtagcgatcatgtagagaatatttggtttgtgtacatagtatgagcattcatatatgacgattatacctcctaaaagtgatagtttttgttggaaagtaaaatgttcagtgttatccttatccactttcagacttgattttattttctttttctcggaatgcaatcataatttgattgttcatttcaatatatatccttatttttcaaatatgt

SEQ ID NO: 81027 - DNA, 1532 bp, Zea Mays
acccgcactggccccaccgggcggcagacgcctggctgggctgcggccaagtggccacctcctcgcgtccggcctggcgtccccatgcacgcccggcctcgccttcccttccccgatatctcttcgtctcgccgccgccgcgcgcgcactctcgtgtgacgtgtcccagcagtccgtccagtccctggcttctctcccccttgttgttcttggctccgcgatggcggtgggttgcttcaaccccgtgctctcgccgcttgttccttcgccgccgggtaggcgcgtccgagcggcgctgcggtgccggtggcatcgtcacccgctgaccgcggtctccctccggcggctcccgtgcggcgcggcagctggtcgtggcacgcggcggctcgcggcggcggcagagtcgcaggccgtgcaggagcagccggcgcgggcggaagaggccggcggggcgggtgccgctgaggcgtcctccaagctggttctggtcgttggcggaaccggcggcgtggttggttgtagcatcattgctgagcaggaacatcaagtcaaggttgctcctaagagatccagaaaaggcgtcgtccctgtttggcaagcaggatgagagtgtactacaggtttacaaagcggacacaagaaaccctaatgatttggatccacagatgtttgagggagttacgcatgtgatatgttgtactggaactacagcatttccgtctaagcgctgggatggagataacactccagaacgtattgggatggcatcagaaatcttgtcagtgccttgccacagacagtcaagagactggttcttgtgtcatccattggtgttacaaaatacaatgagataccatggagcatcatgaatctctttggtgtgcttaagtacaagaagatgggagaagactttgtctgcaattcagggataccattcacgattattagggctggaagattgacagacgggccctacacttcgtatgatcttaatacacttcttaaagctacagctggagagcgacgagcagtagtcataggcaaaggtgacaagcttgtgggggaagttagcagacttgtggtagcagaagcttgtatccaagctttagatattgaatccactgaaggacaaatatatgagattaactcagttaagggtgaagggcccggaactgacccagagaaatgggaggagctattcagatctgctcggtcagactagtggcattctgcaaagcgtagtaacgtaatgtaggaatatgcatcgtaatacaatgtaatccatagagtgcagccctaattcaatagtcactgaacagtagcgatcatgtagagaatatttggtttgtgtacatagtatgagcattcatatatgacgattatacctcctaaaagtgatagtttttgttggaaagtaaaatgttcagtgttatccttatccactttcagacttgattttattttctttttctcggaatgcaatcataatttgattgttcatttcaatatatatccttatttttcaaatatgt

SEQ ID NO: 81028 - DNA, 1860 bp, Zea Mays
acccgcactggccccaccgggcggcagacgcctggctgggctgcggccaagtggccacctcctcgcgtccggcctggcgtccccatgcacgcccggcctcgccttcccttccccgatatctcttcgtctcgccgccgccgcgcgcgcactctcgtgtgacgtgtcccagcagtccgtccagtccctggcttctctcccccttgttgttcttggctccgcgatggcggtgggttgcttcaaccccgtgctctcgccgcttgttccttcgccgccgggtaggcgcgtccgagcggcgctgcggtgccggtggcatcgtcacccgctgaccgcggtctccctccggcggctcccgtgcggcgcggcagctggtcgtggcacgcggcggctcgcggcggcggcagagtcgcaggccgtgcaggagcagccggcgcgggcggaagaggccggcggggcgggtgccgctgaggcgtcctccaagctggttctggtcgttggcggaaccggcggcgtggggcagttggttgtagcatcattgctgagcaggaacatcaagtcaaggttgctcctaagagatccagaaaaggcgtcgtccctgtttggcaagcaggatgagagtgtactacaggtttacaaagcggacacaagaaaccctaatgatttggatccacagatgtttgagggagttacgcatgtgatatgttgtactggaactacagcatttccgtctaagcgctgggatggagataacactccagaacgtgtagacaaaaggattttctgcaaggataatcttgatggagcttaggaccttccaattccaaactgaagcaaataaaaggttgaatgtaactgtgacagaggcccaataagttatttattggtttgaattctgaacatccgtttatgtgtttattatgtccattctatggtcaaatcgtgcacacatgtatgctttgtcattttaagtccatgcatgccaatgactattgctatatttatgtttatcacatatccaaactaacaatgtcagttatgggtgagacagtatctcagttcactgatcacacatttttcttgtgacagattgggatggcatcagaaatcttgtcagtgccttgccacagacagtcaagagactggttcttgtgtcatccattggtgttacaaaatacaatgagataccatggagcatcatgaatctctttggtgtgcttaagtacaagaagatgggagaagactttgtctgcaattcagggataccattcacgattattagggctggaagattgacagacgggccctacacttcgtatgatcttaatacacttcttaaagctacagctggagagcgacgagcagtagtcataggcaaaggtgacaagcttgtgggggaagttagcagacttgtggtagcagaagcttgtatccaagctttagatattgaatccactgaaggacaaatatatgagattaactcagttaagggtgaagggcccggaactgacccagagaaatgggaggagctattcagatctgctcggtcagactagtggcattctgcaaagcgtagtaacgtaatgtaggaatatgcatcgtaatacaatgtaatccatagagtgcagccctaattcaatagtcactgaacagtagcgatcatgtagagaatatttggtttgtgtacatagtatgagcattcatatatgacgattatacctcctaaaagtgatagtttttgttggaaagtaaaatgttcagtgttatccttatccactttcagacttgattttattttctttttctcggaatgcaatcataatttgattgttcatttcaatatatatccttatttttcaaatatgt

SEQ ID NO: 81029 - DNA, 809 bp, Zea Mays
cttaggaccttccaattccaaactgaagcaaataaaagattgggatggcatcagaaatcttgtcagtgccttgccacagacagtcaagagactggttcttgtgtcatccattggtgttacaaaatacaatgagataccatggagcatcatgaatctctttggtgtgcttaagtacaagaagatgggagaagactttgtctgcaattcagggataccattcacgattattagggctggaagattgacagacgggccctacacttcgtatgatcttaatacacttcttaaagctacagctggagagcgacgagcagtagtcataggcaaaggtgacaagcttgtgggggaagttagcagacttgtggtagcagaagcttgtatccaagctttagatattgaatccactgaaggacaaatatatgagattaactcaggtgaagggcccggaactgacccagagaaatgggaggagctattcagatctgctcggtcagactagtggcattctgcaaagcgtagtaacgtaatgtaggaatatgcatcgtaatacaatgtaatccatagagtgcagccctaattcaatagtcactgaacagtagcgatcatgtagagaatatttggtttgtgtacatagtatgagcattcatatatgacgattatacctcctaaaagtgatagtttttgttggaaagtaaaatgttcagtgttatccttatccactttcagacttgattttattttctttttctcggaatgcaatcataatttgattgttcatttcaatatatatccttatttttcaaatatgt

SEQ ID NO: 81030 - DNA, 802 bp, Zea Mays
cagaggcccaataagttatttattgattgggatggcatcagaaatcttgtcagtgccttgccacagacagtcaagagactggttcttgtgtcatccattggtgttacaaaatacaatgagataccatggagcatcatgaatctctttggtgtgcttaagtacaagaagatgggagaagactttgtctgcaattcagggataccattcacgattattagggctggaagattgacagacgggccctacacttcgtatgatcttaatacacttcttaaagctacagctggagagcgacgagcagtagtcataggcaaaggtgacaagcttgtgggggaagttagcagacttgtggtagcagaagcttgtatccaagctttagatattgaatccactgaaggacaaatatatgagattaactcagttaagggtgaagggcccggaactgacccagagaaatgggaggagctattcagatctgctcggtcagactagtggcattctgcaaagcgtagtaacgtaatgtaggaatatgcatcgtaatacaatgtaatccatagagtgcagccctaattcaatagtcactgaacagtagcgatcatgtagagaatatttggtttgtgtacatagtatgagcattcatatatgacgattatacctcctaaaagtgatagtttttgttggaaagtaaaatgttcagtgttatccttatccactttcagacttgattttattttctttttctcggaatgcaatcataatttgattgttcatttcaatatatatccttatttttcaaatatgt

SEQ ID NO: 81031 - DNA, 3322 bp, Zea Mays
cagaaatccaattttatcgtcgtcgacgtcgatccctctctcgttctctcaacaaatcgacgaagtccctgaactcatttccagcctctccgcgccccaaccaccgccaccgcgtgcgagatcacaagcctccacaccgtgaccaccggcgccgctgcggcgtcctgagcaggcggcgagcctcgtgcacagggcaggctcggctcgccggggcggacgagatgagcgggcacgactccaagtacttctctaccaccaagaagggggagatccccgagctgaaggaggagctcaactcccagtacaaggacaagagaaaagatgctgtcaagaaagtgattgctgctatgactgtaggaaaagatgtctcatcattgttcactgatgttgtgaactgcatgcagactgagaacttggagctcaagaaactagtatatttgtatctcatcaactatgctaaaagtcaacctgatcttgccattcttgctgtgaacacatttgttaaggattcacaagacccaaacccattgattcgtgctttggctgttaggacaatgggttgtatccgtgtggacaaaatcacagagtatctctgtgatccacttcaaagatgtctcaaggatgatgatccctatgtacggaagactgcagctatttgtgttgctaaactttatgatataaatgctgagctagtagaggatagaggatttctggaggcccttaaggatttaatatctgacaataatcctatggttgttgcaaatgctgttgctgctctggcagagattcaagatagtagtgttcgtccaatctttgaaatcaccagccatacactgtcaaagcttctgacagctctgaatgaatgcacagagtggggtcaagttttcattttggattctttgtcaagatacaaagcagcagatgccagggaagctgaaaacatagtggaacgagttacaccccgtctccaacatgcaaattgtgcggttgttctttctgctgtcaagataatccttctacaaatggagctcattacgagcacggatgtagtcaggaatctctgtaagaaaatggctccccctcttgttactcttttgtcagcagagcctgaaattcagtatgtagccttgaggaacattaatctgatagttcaaaagaggcctacaatactcgctcatgagattaaggttttcttttgcaagtacaatgaccctatatatgttaagatggaaaaactggagattatgataaagcttgcctcggatcgaaatatagatcaggtgctcttggaattcaaagaatatgccacagaggttgatgttgactttgtgcggaaagccgttcgtgcgattgggagatgtgcaattaaattggagagagctgctgaaaggtgcatcagcgttttgcttgagctgattaagataaaagttaattatgttgttcaggaagctataattgttatcaaagacatcttcagacgctaccctaacacgtgagttgtttctcaattaatttggggtatgagtctatcatcgctacactttgtgaaagtctggacactttagatgaaccagaggctaaggcatccatgatttggataattggagaatatgccgaaagaattgacaatgctgatgaacttcttgagagtttcttggaaacatttcctgaagaaccagcattagttcaactgcagctgctaaccgctactgttaaattgtttcttaagaagccaactgaggggccacaacagatgatacaggctgttctcaataatgccacagttgaaacagataatcctgatttgagggacagagcttatatatactggcgacttctgtctactgatcctgaggctgcgaaagatgtagttttggcagagaaacctgtgatcagtgatgactccaaccagcttgactcatcacttcttgatgagctgctagcaaacatttctaccctttcatcagtttatcataagcccccagaatcatttgtcagccgtgtcaaggcagctcctagggctgatgatgatgagtttgctgatacagctgaaacagggtattcggagtccccatcccagggagttgatggggcgtcgccttcctctagtgctggtacttcttctaatgtacccgtgaaacagccggcggcagcatccccacctggtccagtggtaatgccagaccttttaggtgatttaatgggtatggataatgctattgtccctgttgatgaacctgcagcaccttctggccctccgctacctgtcttactgccttcgaatacaggtcaagggctgcagattagtgcacaactaacacggcgtgatggccagatatactatgatatatctttcgagaatggcacccagggtgtcctagatggatttatgattcagtttaacaagaacacatttggtcttgctgctggtgaagcacttcaggttactccactgcaaccaggccaatcaacaaggacacttttacaaatgaacacgttccagaatatcagccctggtgcaccaaactcgctattacaagttgctgtgaaaaataatcagcagccagtgtggtacttcaatgacaaaattccactgcatgttttctttggtgaagatggaaaaatggaacgagctagttttcttgaggcctggaaatctttacctgatgacaatgaatttacaaaagaattcccgggctctgtaatcagcagtatagatgctacagttgagcgccttgcagcatcaaatgtgttctttatagccaagcggaaaaatgcaaacatggatgttctgtatctgtccgcgaagatgccccgcggaatcccctttcttatagaggttacagctgcggttggtgttcctggtgtgaaatgtgcagtcaaaactccaaatagagagatggttcctctcttctttgaagctatggaggctctcaccaagtgacgccaaagttaatggatatgtggttctacaaaaatttatcagtcgatgagctgctataggtgtttggatgcggcattttttttttcacggaagcttgtgtgaattgtagtttttgtattagattacagtatttaaactgatagttcctggttccaaagtttttcgccagaaatactggagatgttcttgcctcacataatctgtacatcttaccctgttggacctggaaattttcatcttgttatgcatagcatatgaaatatgactagttttctacacggctaatgtaaactgatactacctccgttgacaaatatttgttgcccgctagtttatttttgaactaaacggcgaaaaacaaaaaagaacgaagggagt

SEQ ID NO: 81032 - DNA, 3557 bp, Zea Mays
cgatccctctctcgttctctcaacaaatcgacgaagtccctgaactcatttccagcctctccgcgccccaaccaccgccaccgcgtgcgagatcacaagcctccacaccgtgaccaccggcgccgctgcggcgtcctgagcaggcggcgagcctcgtgcacagggcaggctcggctcgccggggcggacgagatgagcgggcacgactccaagtacttctctaccaccaagaagggggagatccccgagctgaaggaggagctcaactcccagtacaaggacaagagaaaagatgctgtcaagaaagtgattgctgctatgactgtaggaaaagatgtctcatcattgttcactgatgttgtgaactgcatgcagactgagaacttggagctcaagaaactagtatatttgtatctcatcaactatgctaaaagtcaacctgatcttgccattcttgctgtgaacacatttgttaaggattcacaagacccaaacccattgattcgtgctttggctgttaggacaatgggttgtatccgtgtggacaaaatcacagagtatctctgtgatccacttcaaagatgtctcaaggatgatgatccctatgtacggaagactgcagctatttgtgttgctaaactttatgatataaatgctgagctagtagaggatagaggatttctggaggcccttaaggatttaatatctgacaataatcctatggttgttgcaaatgctgttgctgctctggcagagattcaagatagtagtgttcgtccaatctttgaaatcaccagccatacactgtcaaagcttctgacagctctgaatgaatgcacagagtggggtcaagttttcattttggattctttgtcaagatacaaagcagcagatgccagggaagctgaaaacatagtggaacgagttacaccccgtctccaacatgcaaattgtgcggttgttctttctgctgtcaagataatccttctacaaatggagctcattacgagcacggatgtagtcaggaatctctgtaagaaaatggctccccctcttgttactcttttgtcagcagagcctgaaattcagtatgtagccttgaggaacattaatctgatagttcaaaagaggcctacaatactcgctcatgagattaaggttttcttttgcaagtacaatgaccctatatatgttaagatggaaaaactggagattatgataaagcttgcctcggatcgaaatatagatcaggtacataatcaaatattttttgttgtatgctgctgttgattctagcttatgttttattgatgtcaaagatcattttcagctacagttttggtttattatttttatttgtggcctcatacaatagagaagtgcagaaatcaacaaaggaagcattccagggacgatttcaatacgagtttgaaattcaattgctagatttcttgaacatgtttatcttatgagagacttgagagttctgttggtactggtgtgacttctctctgttcaagagttgaccgagctttttgtaggtgctcttggaattcaaagaatatgccacagaggttgatgttgactttgtgcggaaagccgttcgtgcgattgggagatgtgcaattaaattggagagagctgctgaaaggtgcatcagcgttttgcttgagctgattaagataaaagttaattatgttgttcaggaagctataattgttatcaaagacatcttcagacgctaccctaacacgtatgagtctatcatcgctacactttgtgaaagtctggacactttagatgaaccagaggctaaggcatccatgatttggataattggagaatatgccgaaagaattgacaatgctgatgaacttcttgagagtttcttggaaacatttcctgaagaaccagcattagttcaactgcagctgctaaccgctactgttaaattgtttcttaagaagccaactgaggggccacaacagatgatacaggctgttctcaataatgccacagttgaaacagataatcctgatttgagggacagagcttatatatactggcgacttctgtctactgatcctgaggctgcgaaagatgtagttttggcagagaaacctgtgatcagtgatgactccaaccagcttgactcatcacttcttgatgagctgctagcaaacatttctaccctttcatcagtttatcataagcccccagaatcatttgtcagccgtgtcaaggcagctcctagggctgatgatgatgagtttgctgatacagctgaaacagggtattcggagtccccatcccagggagttgatggggcgtcgccttcctctagtgctggtacttcttctaatgtacccgtgaaacagccggcggcagcatccccacctggtccagtggtaatgccagaccttttaggtgatttaatgggtatggataatgctattgtccctgttgatgaacctgcagcaccttctggccctccgctacctgtcttactgccttcgaatacaggtcaagggctgcagattagtgcacaactaacacggcgtgatggccagatatactatgatatatctttcgagaatggcacccagggtgtcctagatggatttatgattcagtttaacaagaacacatttggtcttgctgctggtgaagcacttcaggttactccactgcaaccaggccaatcaacaaggacacttttacaaatgaacacgttccagaatatcagccctggtgcaccaaactcgctattacaagttgctgtgaaaaataatcagcagccagtgtggtacttcaatgacaaaattccactgcatgttttctttggtgaagatggaaaaatggaacgagctagttttcttgaggcctggaaatctttacctgatgacaatgaatttacaaaagaattcccgggctctgtaatcagcagtatagatgctacagttgagcgccttgcagcatcaaatgtgttctttatagccaagcggaaaaatgcaaacatggatgttctgtatctgtccgcgaagatgccccgcggaatcccctttcttatagaggttacagctgcggttggtgttcctggtgtgaaatgtgcagtcaaaactccaaatagagagatggttcctctcttctttgaagctatggaggctctcaccaagtgacgccaaagttaatggatatgtggttctacaaaaatttatcagtcgatgagctgctataggtgtttggatgcggcattttttttttcacggaagcttgtgtgaattgtagtttttgtattagattacagtatttaaactgatagttcctggttccaaagtttttcgccagaaatactggagatgttcttgcctcacataatctgtacatcttaccctgttggacctggaaattttcatcttgttatgcatagcatatgaaatatgactagttttctacacggctaatgtaaactgatactacctccgttgacaaatatttgttgcccgctagtttatttttgaactaaacggcgaaaaacaaaaaagaacgaagggagt

SEQ ID NO: 81033 - DNA, 3245 bp, Zea Mays
cgatccctctctcgttctctcaacaaatcgacgaagtccctgaactcatttccagcctctccgcgccccaaccaccgccaccgcgtgcgagatcacaagcctccacaccgtgaccaccggcgccgctgcggcgtcctgagcaggcggcgagcctcgtgcacagggcaggctcggctcgccggggcggacgagatgagcgggcacgactccaagtacttctctaccaccaagaagggggagatccccgagctgaaggaggagctcaactcccagtacaaggacaagagaaaagatgctgtcaagaaagtgattgctgctatgactgtaggaaaagatgtctcatcattgttcactgatgttgtgaactgcatgcagactgagaacttggagctcaagaaactagtatatttgtatctcatcaactatgctaaaagtcaacctgatcttgccattcttgctgtgaacacatttgttaaggattcacaagacccaaacccattgattcgtgctttggctgttaggacaatgggttgtatccgtgtggacaaaatcacagagtatctctgtgatccacttcaaagatgtctcaaggatgatgatccctatgtacggaagactgcagctatttgtgttgctaaactttatgatataaatgctgagctagtagaggatagaggatttctggaggcccttaaggatttaatatctgacaataatcctatggttgttgcaaatgctgttgctgctctggcagagattcaagatagtagtgttcgtccaatctttgaaatcaccagccatacactgtcaaagcttctgacagctctgaatgaatgcacagagtggggtcaagttttcattttggattctttgtcaagatacaaagcagcagatgccagggaagctgaaaacatagtggaacgagttacaccccgtctccaacatgcaaattgtgcggttgttctttctgctgtcaagataatccttctacaaatggagctcattacgagcacggatgtagtcaggaatctctgtaagaaaatggctccccctcttgttactcttttgtcagcagagcctgaaattcagtatgtagccttgaggaacattaatctgatagttcaaaagaggcctacaatactcgctcatgagattaaggttttcttttgcaagtacaatgaccctatatatgttaagatggaaaaactggagattatgataaagcttgcctcggatcgaaatatagatcaggtgctcttggaattcaaagaatatgccacagaggttgatgttgactttgtgcggaaagccgttcgtgcgattgggagatgtgcaattaaattggagagagctgctgaaaggtgcatcagcgttttgcttgagctgattaagataaaagttaattatgttgttcaggaagctataattgttatcaaagacatcttcagacgctaccctaacacgtatgagtctatcatcgctacactttgtgaaagtctggacactttagatgaaccagaggctaaggcatccatgatttggataattggagaatatgccgaaagaattgacaatgctgatgaacttcttgagagtttcttggaaacatttcctgaagaaccagcattagttcaactgcagctgctaaccgctactgttaaattgtttcttaagaagccaactgaggggccacaacagatgatacagttgaaacagataatcctgatttgagggacagagcttatatatactggcgacttctgtctactgatcctgaggctgcgaaagatgtagttttggcagagaaacctgtgatcagtgatgactccaaccagcttgactcatcacttcttgatgagctgctagcaaacatttctaccctttcatcagtttatcataagcccccagaatcatttgtcagccgtgtcaaggcagctcctagggctgatgatgatgagtttgctgatacagctgaaacagggtattcggagtccccatcccagggagttgatggggcgtcgccttcctctagtgctggtacttcttctaatgtacccgtgaaacagccggcggcagcatccccacctggtccagtggtaatgccagaccttttaggtgatttaatgggtatggataatgctattgtccctgttgatgaacctgcagcaccttctggccctccgctacctgtcttactgccttcgaatacaggtcaagggctgcagattagtgcacaactaacacggcgtgatggccagatatactatgatatatctttcgagaatggcacccagggtgtcctagatggatttatgattcagtttaacaagaacacatttggtcttgctgctggtgaagcacttcaggttactccactgcaaccaggccaatcaacaaggacacttttacaaatgaacacgttccagaatatcagccctggtgcaccaaactcgctattacaagttgctgtgaaaaataatcagcagccagtgtggtacttcaatgacaaaattccactgcatgttttctttggtgaagatggaaaaatggaacgagctagttttcttgaggcctggaaatctttacctgatgacaatgaatttacaaaagaattcccgggctctgtaatcagcagtatagatgctacagttgagcgccttgcagcatcaaatgtgttctttatagccaagcggaaaaatgcaaacatggatgttctgtatctgtccgcgaagatgccccgcggaatcccctttcttatagaggttacagctgcggttggtgttcctggtgtgaaatgtgcagtcaaaactccaaatagagagatggttcctctcttctttgaagctatggaggctctcaccaagtgacgccaaagttaatggatatgtggttctacaaaaatttatcagtcgatgagctgctataggtgtttggatgcggcattttttttttcacggaagcttgtgtgaattgtagtttttgtattagattacagtatttaaactgatagttcctggttccaaagtttttcgccagaaatactggagatgttcttgcctcacataatctgtacatcttaccctgttggacctggaaattttcatcttgttatgcatagcatatgaaatatgactagttttctacacggctaatgtaaactgatactacctccgttgacaaatatttgttgcccgctagtttatttttgaactaaacggcgaaaaacaaaaaagaacgaagggagt

SEQ ID NO: 81034 - DNA, 1900 bp, Zea Mays
tggctttaccctatgatgctaatccatgttggtgcaggtgggtagacaagaacacagatggatcaatcagcgtctggagcgacgcggctgtgcgcctggccctccgtcgcggtctgttacctatatctccgcaaaggcacatggataaattttttcaaggctgaagcagttattagttgcaatctccagcataacaaattcgcgaatccgactctcgagcgtacctaccatggatccaaaaatcttagggatacccatggcctaaacttgttgctgaatccccgctgcctccacggcgtccatgccctagctatttgatgcttgcttcagcccagggttttcctccgaatcccccttctccagcctcagctcccctctccaatcgcagttgcagttgcggctgggctaggctttcgtcagcagcactttcctcccctcggctcttgacagatcgaactgcttccatcagcaattcaatcgggagatggccaccactcagttcgccatggttgaggagctggcctcgctcatcaaggacaacctgcacagcaagcatctcatcctctccaccgaggagtccctcgtcgcagccctccaggagctgcactgccgtgaagaggacgacggcgcggcggatacgatagagctccagcctgccggggcctaccaccgccttctcttgcatcgccttgctgaaatttatgggttcgcgcatgaatcggccggtgaaggcgaggatcgacatttggtcctccagcgctgccccgaaacagccatattttcaaaaacctcagaaggcagatattgtccaaaaagacatttctgttaaaagctcgcgtctgaaagacaatacagactcgaaacctctgaggcagccagcagtacatcctgcagcatcattaaaggagagggaagctgcttatcgagctgctcgtgagcggatcttctctgtggatgatgccaagggaaacgataggtcatacgtgaaatgtcggcaggttcctgttgttgctcaacggatgattgcccatgcactcggtcaaaaggttcaaaataccacagaggcagttgcctccacagaaagcagaggaaaacataaacagctgccaaatgggaaaagtattccgacacatagcaggaacaacttctgcccagttacaccagataacaaagaagcggttcgaaatggtaggccaaactcagctggttgtaactcgtatcaaactccatcaagccaaagacgccacacaactaatactagagctgttactgctgaaggcttgaagaaagaacagactggagcagctaaaagaatgtttgcacatgcactgggtctgtctgcagctcgaggaagtaatggtgcgctgcccaaaccgaagtaaagatgtggatttgagaacgggtaagtggagaaggttgcccagtgcaagctcaagctcctgccgtgggatgaacctgcaacggttggtgctcttctgtgccatctactactgtggagcgatttttgtggtgctgtaggagatgaaagcggttattggttggatgttaattgttggacttggacccagagaggatatgtggcccggcgctggttcgaaaattcaagctcagatggggaaagatgttgctggatacgcattacatgccaagccaagtggaagagaaacgcccctcctgtcactcgtatggtaatatcgctctaaggttgctgcaatttgtttactctagtacgttatttagagaggcacatcctgtgccgttacttttttcctttgactatacttatataaggacgacttgctggatttgtggtcttgatttaatttgtactcttagggcttgtttagcagcaagtgtaatggacgaaattgagaagtttaaaatctcttactatttaatt

SEQ ID NO: 81035 - DNA, 2432 bp, Zea Mays
ggcccacatcttagggtgtgaatgaaaaaaaggtaactccgccggcccacaagagcccagcctgagcccataaatcttgcccccgctgccgcgcgccaacaccgtcactcttgttgatcctaaaaccctaacccctagccagcgctccgccgccatccgccggcgagatggcgttgtacctgctgttcgagtcggcctccggctacggcctattccatgcgtacggtatcgatgagatcgggcagagcgttgaggccgtgcgctcctccgtgctggacctcgaccgcttcggcaaggccgtcaagctcactgccttcaatcctttctcctctgccgtcgacgcgctcaaccagtgcaacgctatctctgaaggaatcatgaccgatgagttgaggagcttcctggagctgaacctgccgaagcctaaggaggggaagaaggccaaatacagcctcggcgttgtcgagcccaaggtcggctcccacatctccgaggtcaccggcatcccctgtcagagcaacgagttcgtccaggagctgctccgcggtgtccgcctccacttcgaccgtttcatcaacgagcttaaggattctgacttggagaaggcccaacttggcctggggcatagctacagcagggctaaggtgaagttcaatgtgaatcgtgttgataacatggtgatccaagcaatatttctgctggatacacttgacaaggacatcaattccttctccatgagagtcagggaatggttctcatggcacttccctgagcttgtcaagattgtgaatgacaattacctttatgccaagcttgctaagtttattgtgaacaaatctgatttggcggaaaaagatatcccagctttggctgatatagttggtgatgaggacaaggctaaagaaattgttgaagcagcaaaggcttcaatgggccaggatctgtcaccagttgatttgatcaatgtccagcaatttgcccaaagggttatgaatctctctgagtatcgcaaaaacctttatgaatatctcgtgactaagatgaatgatattgcgcccaacctgacatcattgattggtgaagtagttggagctcgcctaatctctcatgctggcagtctttcaaaccttgccaagtgtgcagcttccacccttcaaatacttggtgctgagaaggccctattcagagcactgaaaactcgagggaatactccaaagtatgggcttatattccactcctcctttattggccgtgcttcaaccaagaacaagggcagaatggctcgttacctggcaaacaaatgctcgattgcttcacgcattgactgctactcggaggctagtacctctgtctttgggcaaaagttgcgcgagcaagtcgaggagagactggaattctatgacaagggtgttgcgcctcgtaaaaatcttgatgtgatgaaagctgctattgacagtatggtcaatgacaccttaatggatgatgatggtaagataatgagaaggcggacacatctgccaagaaaagcaagaaaaagaagaccaaaaccgagactgatggtgatgcaatggatgtggataagccctccaacgtggctgatggagaagctgagcttggaaccgagaagaagaaaaagaaaaagaagcacaagctagaggaggcacaggaggagaacggtgcagcacatgctaatggcgacgctgaagagacccagactcccaagaagaagaaaaagaagagccgtgaaatttcggaggaagctgaacctaagacagccactgaggggaagaagaagaaaaatgaagaagctgaacctaagacagccaccgaggggaagaagaagaaaaagaaggcagtcaaggctgatgaatgacaagctatttgttgtatgtcagtacaaatcctagtatttgttgaaaaccgagataagcacctagcttctagttcatgaggtgtacgatgcaattcaattcaactatgaagttctgcagtcaaggctgatgaatgacaagctatttgttgtatgtcagtacaaatcctagtatttgttgaaaaccgagataagcacctagcttctagttcatgaggtgtacgatgcaattcaattcaactatgaagttctgcaatccaactcaactacgaagttctatcgtctctagcttgattgtaatttttttatgagggtgcggttggataggcaaatagcttggtgagttggcgttcgattgttatattgagtgagaactgagatttgaaggcatcttcgagacacttttttgttagtagcatgaaacgtgggcgtccacacggctccgcccgacatcacagcggcgcgcccttggcaagcgctccccctccccctcccccgcggcaatcttggtgtcccccgcggcaagctcgccctcccccgcgaggcaatctcggcgtcctcg

SEQ ID NO: 81036 - DNA, 1206 bp, Zea Mays
gtctgcttgtactgcatacgtttgtgattaggttcaacatccaggagctgaacatctgatgacggttgatatccggaacatgcaagcaatggtcttgtttccgtgttcgatgctgcaatggccagattttctttaccaagctaggtttccatcatcatactattcaacattatattaagaccaaaaaggaacatggttcgccttgtcagccaactgaactaggctcagttcattgaattaatcatgaaacgtagtgtccttttacttcatactaactagccttgtcatttgaacaaataaccttagttggtagctaaaagtgattacaccaaagatacgcttcacccttttttagccaagcagcctttcaaaatgcatatgaatttgagatcattattcttgtcaataagtatttctttgttaggctattacactggttatgcttattttagaaatataaagttgatgtgcatggttggagaggaatacgatagtggaagttctcgggattgggctgccaagggaccaatgttatgggtagatgcagtggcggagctctataattttgacgccccagaccacttttaagaagccctccaagatattatgcaacaaaatataccgctaaaacatattataccataagcatagattaaaatactccctctgttttaaaatagtagtggttttagagaattagtgagttcataatatagacataaaaattcagagctaaaacaactactattttaaaactaagggagtagtatttgtctcaattcagcacctaaaaatataacaaacttaataaaaagagaggagaagagaataatcaacatataagtgaaaggggaaaaccgaggagaagagaacacttacaaaccagtgggacaataaaatggctagcgttgtctgctgtcatgctgtggactgtcggccttagagagatggaatcttcagtcttgtgctagggacagtaggacaaggagaggaagccaccaagccgattaagtctgccactctatcgtctagattatggaacagtgggtggctctctggctgaccggtggaaggcgaagtcggaggttggaggagctgctgaccgccacggtggagccgagcccgttcaggttgtgaacacacatctgcagagataaaaaaggagtggcatcaatggcagccacagattggggcatgaagtgtaac

SEQ ID NO: 81037 - DNA, 1698 bp, Zea Mays
gtctcctccgcagctcagctccagctccagggcagggtctacgggccatgtcggcggggcgcgcggcatactagtcccgcgccctcccgggcccggccactagtggaagcatctcgctgaaagcaagggggcgcgcgcccccgggctcgggacacgagggggcatcccatcgatgccttgctgggacggcctgccgctgccgtgtggacccacgcgagggggacagcgactgtgtagcaccgtgggcggggtgggccccagcggagtcaagcgggtgtaaattgcagcctctgctctggcggcccccgtgctttcatcattccgctccccacacccctgttcgtggcggcctccgcccctccctctcaggctctcaccaccgtctgctggtggttgccgcggcgccgctcctccctcgtggtggcggtggaggactacggtcggggatcgacggcttcttcgtccgttggcatacttgtcttgggtggtctagttggatcatttggcaggcgaggcgatacatcaaccaaccaaaagaaatgtcagctggcaggcaagcatactggtgttaccagtgccgacagagggtgaggccacggggccgggagatggtttgtccctactgcgattctgggtttgtggctgaaatggatgatgtagatgctctcatgagccacttcgttgggacggatcctgatttccatcgcgacccacggttcgggatcatggaggcgatctccgccgtgatgcggcatggtatggcagggatgaaccgggaggttgatgtcagagggaggccgaacttcttttcagacctggagatggagttcggttcagggccatggctgctcttccgtggccagctccccggccacctcaccgaggacaacggtttcgatgttttcgtcaatggacgacgtggcggcggcggcggcggcggcggcatgaggagggccaacatcgcggactacttcgttggccctggactggatgatcttatcgagcagttgacccagaatgatcgccgaggaccaccacctgctgcacagtcctcgatcgacgctatgcccacagtgaagatcacccagaggcatctcagtggggactcgcactgccctatctgcaaggagaagttcgagatgggatccgaagaagcaagagagatgccatgcaagcacctgtaccactccgactgcatagttccttggttagagcagcacaattcctgccccgtttgccgttacgagctcccgccacagggctctgccaccggtgctagctgctcgcgcgcgagatcaaccgaccagagccagagctcaagtagttcaagcagcagcgggagaaccagtgggcgtcaaaggagaaggaacccgttctcgttcctgtggcctttccgctcatcaagtagttctcgctagattagcctctggtaatctttgctcaggttcgaaatactgtttgtttttttgggtcaaatacgctggtctaatgggctttaatgtggtgggatctcaatctgtactgtatggtttgttaatgatcgccacacgatgcttctccttgcaagtatattattattaccacggtatcatcacaggcacttggttttgtttacttgtttgtgagcttgcaaacaattagtataagcctgattaatggatgttcggcttctttttaaaagaggctaaagttatgatc

SEQ ID NO: 81038 - DNA, 2182 bp, Zea Mays
gcacaaccacctctcctctgggtctcgtactctcgtcggtcccctctccggtccacactccctcgcgcccgctccactccactttcccttccccagtcggccagtccccatccccacccccagccccatgagccgccgccggtgaccagcaacatcccatgggctgcgtgcacggccgcccccccgcgtccagccccgaccacccaccgcagctgcccgagccgccggctcccgcggcgacgcaggaggccgccgggaaggccgagcagccggcggcgccagctgagaagccggcttggcgggagaggcgctcccgctcgtcgcgcaatgcccccgcccctagcttcgccaacagggcgcgcggggagcaggtcgccgccggctggcccgcctggctctccgccgtcgccggcgaggccattgacggatggaccccgcgccgcgccgactccttcgagaagattgacaagatcggccagggcacgtacagcaacgtgtacaaggcgcgcgacacggtgagcggcaagatcgtggcgctcaagaaggtgcgcttcgacaacctcgagcccgagagcgtccgcttcatggcccgcgagatcctcatcctccgacgcctcgaccaccctaacgtcgtcaaactcgacggccttgtcacctcccgcatgtcctgcagcctctacctcgtcttcgagtacatggagcacgacctcgctggcctcgccgccagtcccgaaattaagttcaccgaaccacaggttaagtgctatatgcatcagctgctgtcgggtctggagcactgccacgaccggggggtgctgcaccgcgacatcaagggctcgaatctgctcctggacaacaatggcatgctgaagattgcagattttggtctcgcgtcgttcttcgacccagaccgtaaacagccgatgacgagccgggtggtgaccctatggtaccgcccacccgaactgcttctcggcgcaacggattacggggtgggtgtggacctgtggagtgcagggtgtatcctggccgagttgctcgctgggaggccaattatgccaggacgaacagagctacataaaatttttaagttgtgtggctccccaacagaagaatattggaaaaagtcgaagctacctcatgctacaatatttaagcctcagcagccgtacagaaagcgaataagagagacgtttaaggattttccacaatcagcactgcagttgatcgagacactacttgcaattgatccagcagatcgcttaacagcgtcttctgcattaagaagtgatttctttacaaccgaaccttttgcatgcgaaccgtcaagtcttccaaaatatcctccaagcaaagagatagatgtgaaacgaagagacgaagaagccagacgtttaagagctgctggtggtagagctaatggtgatggagccaagaagacgagaacacgtgatcgacctaaggcagttccagctccagaggcaaatgctgaacttcaagtaaatattgataaaagaaggtttattactcatgcaaatgctaagagcaagagcgaaaagttccctcccccacatcaagatggtgcggttggtgtccccttggatgcttcaaatcatatggatccactatacgaacctccggacccatcttccttcagcactgtgttcacttacgagaaaggcgctgtgcctacttggtctggaccattggttgatcctgctgcagtggtgaaccaaaagggcaagcacaagtccgggcgctcatcgaaacagccggccactgcccgtgctcggtaagatcctaaggatcgatatttacaggtaaaaaataaggagacttcaacatggtgggaaaatactccatggcggcacctgcacgctgttttgcaaacgaggcatgcaatgataaagtagtttgttggttacctgttgtcatgtgagtgatttttttttctagacttcgtgtataggctggggagggagttgaagtagttacttctgtacattaggttttctttcctgctctttaagcagctggtgatgttagattcatttgaatggaagcttagatctctagtgttcccgccactacacccccttccattgtaacagtgtgttccctgcataatcagttcttatcaattcaattgaaatcgtaagttttggtgaagatttgatggatt

SEQ ID NO: 81039 - DNA, 2559 bp, Zea Mays
tgaagagtagaggagagagagagagagagagagagagagagagagagagagagagagagagagagagagaaaatgggcgtggcgacggtgacagagctgaagcagagcatctccgggaagaggacattccggccgagcctcatcagccgccacgccaatgagtggtaactcactcgcgttcctgcttcgttcctcggatcctgtgctcctctcctgaactcgactctgcgttctgccaggcctccgaccgacgtctccagcgacctcaccgtcgaggtcggcacctccagcttcgcactccacaagctgttcgcgcagttcccgctggtctcccggagcggcaagatccggcgcctcgtcgcggaggccaaggacgccaagctggcgcggctcagcctgcacggcaccccggggggcgcgccggcgttcgagctcgccgccaagttctgctacggcgtccacgtggacgtcacggtcgccaacgtcgccatgctgcgctgcgccgcgcactacctgcagatcaccgacgacttctccgacaagagcctggagctccgcgccgaggccttcctccgcgacgcggtgctccccagcatcgccagctccgtcgccgtgctccgcagctgcgaggcgctgctcccggccgccgaggacgtcggcctcgtgccccgcctcatcgccgccgtcgccaccaacgtgtgcaaggagcagctcacctcggggctgtccaagctggaccagtgcgcgcagctcaagcccgcggcggcgttcgccgacctcgacccgccggccgactggtggggcaagtccgtggccgcgctcggcctcgacttcttccagcggctgctctccgcggtcaaggccaaggggctcaagcaggagacggtcaccaggatcctcatcaactacgcgcagaacgcgctgcacgggctcatggccagggacgtgcacagatgcggcggcgcggacgccgacgccgtcaagaagcagcgcgccgtcgtggaggccatcgtgggccttctcccggcgcagtccaggaagagccccgtgcccatggccttcctctcggggctcctcaagacgtcgatggcggtgtccgcgtccagcatctgcagggccgacctggagaagcggatcggcatgcagatggaccaggccatcctggaggacatcctcatcgccgcgggcgccgccgtgggcgcgccggccggtcagcagcacgcgctgtacgacacggacgtggtggcgcgcatcttctcggtgttcctcaacctcgacgacgaccataacgaggaggacgacgggttcgactacgacagcccgcgctcgccgaagcagagcctcctggtgaaggccgccaagctgctggacagctacctcgcggaggtggcgctcgactctaacatcctcccgtccaagttcatctccctcgccgagctgctcccggaccacgctcgcgtcgtcaccgatggcctctaccgcgccgtcgacatcttcctcaaggtgcaccccaacatcaaggaggcggagcggtaccggctgtgcaaggcgatcgactgccagcggctgacgccggacgcgtgcagccacgcggcgcagaacgagcggctcccggtgcagatggcggtgcaggtgctctacttcgagcagctgcggctgcggagcgcgatccaggccgggggtggcagcagcatgggcgggcacgacggggcggtcttcttcgggtgcgccgcggccgccgcgtcggtgcagggcagcgtgaacatgcgctccggcagcggcgtgggcagcggcgccatgtcgccgcgggacaactacgcgtcggtgcggcgggagaaccgggagctgaagctggaggtggcgcggatgcggatgcggctcacggacctggagaaggaccacgtgagcatgaagcgggagctggtgcgcgtcggccccgccaaccgcctgctccggggcttggcgcgcagcctcggcaggctcttccgcatgcgccccgccgccgagccggggctgcagcagctcggggccaaggctaccgccgacgccaaggtgctcttccagcgccgccgccgccactccatctcatgatctcggttcctcgaatcggagaggcgaccggcgggcacgctgccgatcgagcgtgctcgcgaggatgagtggccacgctactgtacgtgcgtacagcaaagtttcgcgtgtgcaattgtgcatagcatacaagaaaggaagacatggtttgagtgagtgcacactgcaggtttatttcttcccggatttcgtgcggtgcgggcatcgcgtggtcttctgctcatgaaagtcatggcgttcgacacagcatgcgatgcgattcatgtatatggatggatggactatggaaaggtttcgaggggtgtatgtatctttgggaccagtggacacatggttcctcctgttttctctgtagtttccggccaaattccgttcagccgagcgatttctatttcttgtttaggcgaaattgttcagcaaagtaagaaggttattttaattccacctttattgaaagttgaaaaaaaa

SEQ ID NO: 81040 - DNA, 3433 bp, Zea Mays
gagcaccccctctccagccccgtccccgcctcctctctccctctctacactccaacggtccaacccaccaccgtcctcggccggtcctcggcctcgccgtactctccactctccataccctgcggcgcgctgctcgtactcttccctgccgcaaaccatcagtcaatctcgccgctcctagcgtccggttcagagattctctctcgctaccggccggggccgtctgtttctcgtccgagaggtcggagggctcctcgtggccggagcctggggcaggacctgccagagcggcgtgcatgaagactaaggcttacggtgacggtgaggagctggacaaagtgttggccaataggttctgttcatgatggtgcagtgcttctgtgcttgatggcttggtgctgttaaataattttgcattgattgtgatggagccagaatcactcgattttgaagacaatggtgaacaccaatcttcatcagaagcttctcttgcttcagatgtgatatatggtgactcgcctgtatgtccacgcatcggaagtgagcaccaggcagaaatccccaatctggctacagaagatgaacgtcgtgagctcatggctagttcacataatgattccatattgcatgggtatggttatcctgttgtggttgggttaactttaccaattatatgggcatcaccaagagaagccagtaagacagaacaggtattacaaatgcaaaattattcagaatctggaacaaaaggcagcactggagatgtgcaaagtcaggtgacctcaacttgtgcaaccagcaatgacactggcagatgtgatccgacattccaggatctacatgcagtagttcctgtagttcaaattaaatctgacattaatcaagcatataatgaaaaaatggccccttgcccctctcaagaaggccagaatgtcaccaataattcaataatgcagcagagagaaaccaaacaattaaatccgctgccttattcacccattgctctttggagtgatcttgaggcagagatctttctccttgggctctacattttcggcaagaatctcaacctgctgagcaggtttttgggtacaaagactgttggtgatgtgcttgcatactactatgggaagttctatagaagagatgcgtacaaaagatggtctgactgtagaaaggcgaaaactaggaaatgcattcttggggaacgcatttttcaaggatggcgacagcaagagctaatatcacgtctgaaatctaaaatccctaaagaagctcatgattcgttgattgaggttttcaaatctttcagtgatagccaaacatctttgaaggaatttgtcttcagtctgaaatccactgttggagcagaaacttttgtggaggcggttggggttggtaaagggaagcacgatttgactggattcattatggaccaatctaaacccaatcaagctctctctgttcacagtgacttgcctacaggcaaagactattcttcacttgcttcagaagatataatcaagttcttaaatggtgatttcagaagaagtaagactagatcaaattatattttctgggaagctgtatggccccgtttgcttgcaaatggttggcactcagagcagccaaaggatgttagcacaactaagaattgccttgtatttcttgtgccgggtataaagaagttctcgagatgtaaactcactaaaggtactcattattttgattctgtcagtgatgtcctcaaaagagtggcagcggatcctgttcttcttgagttggagattgatgtgataaacaatggtttaactgctgaggaaaatggcagtatcacagatgtgaaactgaaccagtatagtccattagatggatatcaggagcttcctaagttcacaataattgatactagcttagtcgagggggaagtgccattcaatgtcagggaactgaggaacttacctgcagattcaaatattagttttctcctttcacaacatccatctaatatggtgagttacagctcctctgaagaggaaggtgccaatgatagattatcagatgagcaggaagactatggacgagttaaagctgttgtcgatgaaattgaaatggtttcagctgcttcactacaaaacatggtgactgctaatggcaatgatgacaaactagatttgacaggcatcaaaacaaaacctgaaaagcgcaaatatttgtccccagtgtcaaaaggcagaatgctaaatagctgtagtaatgaacaggccagccggcgcagtttttctttctcaaaaggtggtgatttggagaaagagaaaagcaagccaccattgacttcatccaaaccagctgctcttgaagttggcgacacttttcagagctattctacaaaggataatctatctgagcagaaaaacaatgcattgaactctcttaccaattatgggcaaaatgagagaatggttatggagaacttaattaacaagtcatcagagcgtaaggttgatgcagtggctgaagttcactcaaagatcaatgccgatcagccaaaatttattaaagaaagagctgaggttgttggtccaattgacttgaataatctgggaacgctacacggtgataaggcaagccgaagcattcacatcacatcatttgaaaatcttggtagcgtgaaggttgttgaagcttcctccagttcagacaagaacatggcctgtgatccttcagggacagcaggaatgcctgttagcgaggtacctgatcctgctttgcaggtgaatgctcggaggcacggaaccagaaacaggcctcccaccgtaaaagctttagaagctgttgcgtttggacttcttggaagcgggaagcgtaagggtgacatgaagaacagggcgacaagccggccttctcagcgagctcgcaaggctgcaaaagactcagttcccgtggcttcttgtggtgatgcgaaggtgagatgagcagatttctgtgcgttgattggcacatgctgacaatcaacggtaccatgacaatgtgcggatgatgaatatcaagcaactgcatgaggcctggagctaagctgtccaaagctggtggttaccttaccattgtctaatgcggtgcctaccattcaggaaatcttccaggtgacgatggttttacagggtgcatggtcaccattcgagccaggaacccatccttagtttttttttttagtcaatagaagccctgtgcctgtcaagccttggctaattcagttttgcgtttataccgggattaatgttttggtacatcgctctatcgacttttgatgggtgcattcgtctctgagcttcttttgcagggaatagagcattcgtcagcttcataaaccactactaacatttcattttgtgtgaacctgcatagcttgcttcttgatccgatgcattctttt

SEQ ID NO: 81041 - DNA, 3060 bp, Zea Mays
gtgacggtgaggagctggacaaagtgttggccaataggttctgttcatgatgatggagccagaatcactcgattttgaagacaatggtgaacaccaatcttcatcagaagcttctcttgcttcagatgtgatatatggtgactcgcctgtatgtccacgcatcggaagtgagcaccaggcagaaatccccaatctggctacagaagatgaacgtcgtgagctcatggctagttcacataatgattccatattgcatgggtatggttatcctgttgtggttgggttaactttaccaattatatgggcatcaccaagagaagccagtaagacagaacaggtattacaaatgcaaaattattcagaatctggaacaaaaggcagcactggagatgtgcaaagtcaggtgacctcaacttgtgcaaccagcaatgacactggcagatgtgatccgacattccaggatctacatgcagtagttcctgtagttcaaattaaatctgacattaatcaagcatataatgaaaaaatggccccttgcccctctcaagaaggccagaatgtcaccaataattcaataatgcagcagagagaaaccaaacaattaaatccgctgccttattcacccattgctctttggagtgatcttgaggcagagatctttctccttgggctctacattttcggcaagaatctcaacctgctgagcaggtttttgggtacaaagactgttggtgatgtgcttgcatactactatgggaagttctatagaagagatgcgtacaaaagatggtctgactgtagaaaggcgaaaactaggaaatgcattcttggggaacgcatttttcaaggatggcgacagcaagagctaatatcacgtctgaaatctaaaatccctaaagaagctcatgattcgttgattgaggttttcaaatctttcagtgatagccaaacatctttgaaggaatttgtcttcagtctgaaatccactgttggagcagaaacttttgtggaggcggttggggttggtaaagggaagcacgatttgactggattcattatggaccaatctaaacccaatcaagctctctctgttcacagtgacttgcctacaggcaaagactattcttcacttgcttcagaagatataatcaagttcttaaatggtgatttcagaagaagtaagactagatcaaattatattttctgggaagctgtatggccccgtttgcttgcaaatggttggcactcagagcagccaaaggatgttagcacaactaagaattgccttgtatttcttgtgccgggtataaagaagttctcgagatgtaaactcactaaaggtactcattattttgattctgtcagtgatgtcctcaaaagagtggcagcggatcctgttcttcttgagttggagattgatgtgataaacaatggtttaactgctgaggaaaatggcagtatcacagatgtgaaactgaaccagtatagtccattagatggatatcaggagcttcctaagttcacaataattgatactagcttagtcgagggggaagtgccattcaatgtcagggaactgaggaacttacctgcagattcaaatattagttttctcctttcacaacatccatctaatatggtgagttacagctcctctgaagaggaaggtgccaatgatagattatcagatgagcaggaagactatggacgagttaaagctgttgtcgatgaaattgaaatggtttcagctgcttcactacaaaacatggtgactgctaatggcaatgatgacaaactagatttgacaggcatcaaaacaaaacctgaaaagcgcaaatatttgtccccagtgtcaaaaggcagaatgctaaatagctgtagtaatgaacaggccagccggcgcagtttttctttctcaaaaggtggtgatttggagaaagagaaaagcaagccaccattgacttcatccaaaccagctgctcttgaagttggcgacacttttcagagctattctacaaaggataatctatctgagcagaaaaacaatgcattgaactctcttaccaattatgggcaaaatgagagaatggttatggagaacttaattaacaagtcatcagagcgtaaggttgatgcagtggctgaagttcactcaaagatcaatgccgatcagccaaaatttattaaagaaagagctgaggttgttggtccaattgacttgaataatctgggaacgctacacggtgataaggcaagccgaagcattcacatcacatcatttgaaaatcttggtagcgtgaaggttgttgaagcttcctccagttcagacaagaacatggcctgtgatccttcagggacagcaggaatgcctgttagcgaggtacctgatcctgctttgcaggtgaatgctcggaggcacggaaccagaaacaggcctcccaccgtaaaagctttagaagctgttgcgtttggacttcttggaagcgggaagcgtaagggtgacatgaagaacagggcgacaagccggccttctcagcgagctcgcaaggctgcaaaagactcagttcccgtggcttcttgtggtgatgcgaaggtgagatgagcagatttctgtgcgttgattggcacatgctgacaatcaacggtaccatgacaatgtgcggatgatgaatatcaagcaactgcatgaggcctggagctaagctgtccaaagctggtggttaccttaccattgtctaatgcggtgcctaccattcaggaaatcttccaggtgacgatggttttacagggtgcatggtcaccattcgagccaggaacccatccttagtttttttttttagtcaatagaagccctgtgcctgtcaagccttggctaattcagttttgcgtttataccgggattaatgttttggtacatcgctctatcgacttttgatgggtgcattcgtctctgagcttcttttgcagggaatagagcattcgtcagcttcataaaccactactaacatttcattttgtgtgaacctgcatagcttgcttcttgatccgatgcattctttt

SEQ ID NO: 81042 - DNA, 4402 bp, Zea Mays
gttgggtccttcggggcttcacccaacgccccggagtggactacgacgagaccttcagcccccgtcgtcaagttcgccagcgttcgcaccgtcctctcactcgccctctctcgggactgggtgatccatcagctcgacgtcaagaatgccttcctccacggcactctgacggagactgtctactgcagccagcccaccggcttcgtcgacaaagcccgtccggatctggtctgccggctgaaccgctccctctacggcctcaagcaggcgccgcaggcctggtacagtcgcttcgcttcctacttggcctcaatcggcttcgtcgaggccaagtcggacacgtccctcttcatctaccgccgcggcgacaacaccgtcttccttctgctctacgtcgacgacattgtgctcatggcatccaccaccgacctcctacaacgcacgatcctcgccctgcagcgaaagttcgcgatgaaggacctggggcccctccaccacttcctcggcatcaccgccgagcaccggtcccagggtctcttcctccatcagcgccagtacgccatcgacacactggagcgggttggcgtgtccgactgcaagccctgctccacgcctgtcgacactcaggcgaagctctcagaggacgacgggcccccggtcaccgatgcgacgtcctaccggagcctgaccggcgcgctccagtacctcaccttctccgggcctgacatcgcctacgccgtctagcaggtgtgcctgcatatgcacaccccgcgggagcctcatctcaccgctctcaagcggatcctgcgctacctccgcggctccctcgactacggcctcctactccgaccatccccgacgtcggaactcgtggtctataccaatgccgactggctggctgtccagacacgcgccgatccacctccggttacgccgtgttcctgggcgccaacctcgtctcctgggccgctaagcggcagcccgtcgtctctcgctccagtgctgaggcagagtaccgcgtcgtggccaacggcgtggcagaggcctcctggctgcgacagctcctccacgagctccacagtcccctccagcgcgccaccctcgtctactgcgacaacgtcagcgcagtctacctctccaccaatcccgtgcagcatcagcgcacgaagcacgtggagatcgacctgcacttcgtccgcgagcgtgtcgccgccggtgacgttcgggttctcagcgtccccaccacgctgcagttcgccgacatcttcaccaaggggttaccgtcgagtgtatttttagactttcgctccagtctcaacatctgtacaggatagagttgcgactgcgggggggtgttagaactgtattagggtttatggggtctccctggtacatttaccgtttcacccttctgcctgtaatgggccaggcccaactcagtctattaatatacaggcccaccctagtgtagggttagggtttcacttctatcaggtttcctttggagaggtcgcaaaaatgctagaggtggacactgcctggtggcatggggcaaagtttgccgtcccctgcagctgggtggcttgggaatctctagcctccctgagctctgttgggctctccgcatgcgatggatttggctacaaaaaaactgactcaaacgaccttgggcagatctcccaatccaggtaccaggcaaggctcgagctttttttttgcagttctgatctctggaaagatagattgttgcatggagaaaaaattgcagatcttgttcctagactttttggtgcaatcccaaagcgattggtcaataccaggacggttcaggatgtcattctaagtaggagatgggtctctgatattaagggagctctctcagttgctgtgctcatggaatatcttcatctctgggagctgctatcaagttttgaactgcagcctagcattgaagataaacatcttttcagcctagcttcagatggcaaatattcggccaaatctgcttactgaggcctcttccttggctcaagctcttttgcatattataaggtgtggaaatcttgggccccgcccaaatgtcggtttttcatttggctagttactcataaaagatgctggacagcggataggcttgcaaaaagggggttggatcacccagaaaaatgtcttctgtgtgaccactgaccaagaggctgaaactatggatcatctccttgtgacctgtgtctttgcaagagaattctggtatcttttgctgagacagtttgggttacactctctagccccgcagatggcttgcttcctccttcctaggctggtgggaagaggctacaggagcagtgaatggacctatcaaaaagggtatgaactctcattttgggtgcttgggcgatttggaatcaccgaaatagatgtgttttttatggttggaattccaatatttctttaacccttcgctgggcaaatgaggagaggcaccggtggaaaatagcgggggcaaaaggcctttcttatctggcagcccccttagctgagtcctagggacctttttccctggtagtatgcgtgtgtcagggcctaaggaggcccacggaggggctgtggtagcagcagtcataggccctccaagggggattagataagtgttagaataggaacccataccctaaacaggggttgggagtgatattaatagagtgagtaactgggccaggcccattacacaggggtataacggtcattacaaggggaataacacaaaccctagacgggtagtctaacacccccccgcagtcacaactctatcctgtacagatgttgagactggatcggaagtcgaaaaagacactcgacggtaaccccttggtgaagatgtcggcgaactgaagcgtggtggggacgctgagaacgcggacgtcaccggcagcgacacgctcgcggacgaagtgcaggtcgatctccacatgcttcgtgcgttgatgctgcacggggttggtggagaggtagaccgcgctgacgttgtcgcagtagacgagggtggcgcgctggaggggactgtggagctcgtggaggagctggcgcagccaggaggcctcggccacgccgttggccacggcacggtactcggcctcagcgctggagcgagagacgacgggctgcctcttggcggcccaagagacgaggttggcgcccaggaagacggcgtagccggaggtggaccggcgcgtgtcgggacagccagcccagtcagcgtcggtgtagaccacgagctccgacgtcggggatgggcggagtaggaggccgtagtcgagggagccgcggaggtagcgtagaatccgcttgagcgcagtgagatggggctcccgcggagtgtgcatatgcaggcacacctgctggacggcgtaggcgatgtcgggcccggagaacgtgaggtactggagcgcgccggtgaggctccggtatgacgtcgcgtcggcgaccgggaggcccgtcgtcctcagagagcttcgcctgagtgtcgacaggcgtggagcagggcttgcagtcagacatgccagcccgctccaggatgtcgatggcgtactggcgctggtggaggaagagaccctgaggccgacgttcggcggtgatgccgaggaagtggtggaggggccccaggtccatcatcgcgaactcccgctgaagggcgacgatcgtgcggtgaaggaggtcggcggtggatgccgtgagcacaatgtcgtcgacgtagagcaggaggtagacggtgtcgtcgccgcgccggtagatgaacagggacgtgtccgacttggcctcgacgaagccgacggaggccaggtaggaggcgaagcgactgtaccaagcccgtggcgcctgcttgaggccgtacagggaccggttcagccggcaaaccaggtccggacggtcagcgtcgacgaagccagtgggctggctgcagtagacagtctccgtcagagtgccatggaggaaggcattcttgacatcgagctgatggatcgcccagtcgcgggagaggacggcgcgaacagtggcgaacttgacgacagggctgaagatctcgtcgtagtccactccggggcgctgggtgaagccccgaaggacccaacgggccttgtagcggtcgagggagccgtccgaggtcagcttgtggcgaaatagccacttgccggtgaccacgttggtgcctggtggacgcggtaccaggtcccaggtgtggttggccaagagggccgcgtactcctcctccatagcgcgacgccaatgtgggtcggcgagggcagtgcgaacggaggagggtaccggggaagcgtcgggtggagtgctggtcgtagcggctgccaggatgagccggtcaacggggcggagaacgccagcagcgcgc

SEQ ID NO: 81043 - DNA, 2903 bp, Zea Mays
ttccttatccccgccgctcctctgctcaggatttttctctcgtcatcccgcgtggacatttgctatgggcccagctcgccggttgccaccgctcagcttcagaaatatcccgccgtcgttcggtggtatttatctccccagctcgctcgctcctggccttcccctgccggcgcgcctattccctggccgaagccacctagtctcaggtccggtcagccggctcagttttttttttccagtaccgcgcgtcgtgcttccccttccagccgaccgaagctcccagctccagtcatggcgcgtccggttccctctcccatggctccctgtccgaccggccgagatccctccatggccgcgagctcagcccctgctctgctctcgctgccgagttcctctgcgcgtcttctctccctgctggcgcactcaaattcctgtgctcgccggagctctccctgccgtgcggctacagctcctgcgcccggccaagtttccctgcgcgccgcagttcgcccagcccctctgctcgccgagctctatccgctccccatggctgagcttcctgcgcgtgctgccatatccctgcaccagcgccgtagctccctctgtccagcagcttctctctcctggagtttctttgtgttctgctcagaccttgctccattccctcgccggccggtcgcgcgccctggtcggattccctgcgcgccgcgtgagctcgccggcgtgctccccatccggccatggtgccctgcgccggtcgagtttctctctgccgcgcgcagctcgcccaatcctctctgctcgttccgtcgtcgaagcttttggatgcgcgcgcccagctgaccttcctgtgtcgcgcgcgcgaatttttatcgcttggtcttaattcccgtcgcgtcgtcgacctcgccaaatgctttcgtcgtttggccctgtgtcgttaggctcgttgaccgtgttcgctaccgcgtgcacttattcctaatgcgcatcgcacagtagttgggtctcatgctcgtgtggttttgtcgatattctctaccggcagacctcgtcatcgaccatgttcaagtaattgtttggctcctcgtatcccgcttattcgataaaacactcaaatctatagactgtcaacgtactgctgccatacgcggctgtctctgtcacttgcgtcagctcgccaaacctacagctttatatatgttactctctcgtatcgtcgtcgagcttgccgaacctcgttcttccctgctcgatctcgtcgaaccccaaatcccggacgttaggcaaaaataagcgaggtccctgtgcatcgcttatcaagtgctcgatcggagacttcaatcgaaggttgtcgttgatccatgcgtcatcaagaatcccaagagtcgggtgaagacggagtccaatatcgtgatattctccaagtgctcgacaccagagctgaatcagaatccttgccgtgttcgcggatagcgcgtcagatttagaatggtaagccgattcaaaatttccgttagcttgattattaaagtagttcgatgaatgtgatatgcttattttcatgattttgaagcagttgcgtcgcggtaggattaaatatatgtgaagcacgatgaagttaggaatgcgaaagatagatcaaatagaattattggtctcaataaatgttagtaatttagcctgcgtatattgtgatgatcgatttagataaatcggtaaatcaagtaattgagatacatagttaaaagagttaataaaaaagctatgaaataaaaatagattttctagtgtaatatgtcaatttggttaatggatgtagtcgatgttcagctatgatatctatggtgcttaatgattggttttaaagtatttcatccttttttagtgtagattatctatattatacttgttatacttgtgttcatatatgtgcatcgtgcatcttatgaggtacgataaataatcacgtgatgcgaaagacgagccaagtcgaccccaagcgcgggctaacccgtaggatgacgttgatggacggaaccgaagatggataatctggcaaatgtcaagacagaagatgatcgccaagtggacatcgtctaacaacactaacctagtgttactccagacaagccccagtgcatttgtcccttccttgtgttttaaatgctttttcaccttatctgatgcattaggtgataggagttgcgtgataaacaattgatgcattaccattccttggaaactccttaatcccggttttataaaaagaactgataatgcgtagccctgcttagaaactcaaaaatcatttgttttcaaaaagaatgattgtggaacattggttatgggcctttcgtttcaaaaatcaaagcaaacttatggtgatgattctacttcggccagagtgggttcatcattcggaaaagagtacccctgccgggtaccaaaaatgggaaaatggtttgaataaatgtagaccaaacgctgagcagacaaggttgcccgtctgtgtcgattaaggaccgtaccgattgttggtctgctgatctaggaccctttatctggccacatacctcgtcatgggtaagtctgaacccggctattccatacataaagagacaatcgcgcactgggagttgagagatggcgagagtggcacgtatcctcctggcaaaggaccgcctaaaaggggtggtgtgctctcgggtggcgtggacctgttcatgtggtggaggatccgtgggaatagtagacatgtgcaaaagagttaagagaagtatatgtcgtgtggttggagatccccagctgggtattaatcgattcggatcgccaaacttctcggatatgaagactggatcttcgaccctcatcgtagataacaagcaaaacaaaagttggat

SEQ ID NO: 81044 - DNA, 1753 bp, Zea Mays
tgtgggctgggcctcatgtctccaaccttgtgaatcgatccgatcttctcggttcctcctccaaatccaccggcatctccaagccctagccccaaccccgaccgcccatgtccgccatcgcggcctcctcggccgccgccgccgcggcgtcgaactccgatgaggaagaaaactatgaggagtacatcccagtcgccaagcgccgggccatggaggccgagcgcctccgccagctccgcctctccaagtcggcgccggcctctgccgtctcatcactcccgatgccacctcccccgcctcttttgccagcgcagacctccgttcccgacgccgccgcgaagcccagccttctcgtcaaggccacgcagcttaagcgcgcggccccggaggtgaccgccacggagcagcgcatccagcaggagaaggaagtgattgaaaatctctcagacaacaaatcgctcaggtacttaaccttagatgaagcggataggctggttgacctaggatttgaagatgacatcaaggaggttttcgaccatttcaaggatcaaaggcaaactcttctcttttctgctactatgcctcagaagattcaaaattttgcgaagaacgcccttgtgaaaccagttactgtcaatgtgggaagagctggagcagcaaatctagacgtcattcaagaagtcgaatatgtaaaggaagatgctagaattatatacctccttgaatgcctccaaaagactccacctcctgttctcattttctgtgaaaacaaggctgatgtcgactacatccatgagtaccttcttctaaagggagtggaggctgttgctatccatggaggaaaagatcaagaggagagacagaacgcaattgactccttcaagactggtaggaaggatgttctggtggctactgatgttgcatcgaagggtcttgattttcctgacattcagcatgtcattaactatgacatgcccgccgaaatagagaactatgtccaccgaatcggtcgaactggtcgatgtgggaagactggcatagcaactaccttcatcaacaagaaccaaactgagaccacgcttctcgatctcaagcacctgctgaaggaggcaaagcagaggattccaccggtgttggcggagctcaacgatccattggatgatgaggaaataattgccaaggagagtggtgtcaaaggttgtgcgtattgtggtgggcttggccatcgtgtcagtgactgtccgaagttggagcatcaaaagtccatggcaattgctggctcgagaaaagactactttggcggcgggggttaccgaggagaaatatgattgctctaggttgatgcttgcgtgtggttatcagaagctaagatgctgcaatttcaggtcatacatgtcacatgtatcagccaccagaacatccttcctcccccatcgttgaagggagacggtctgcgttaacgaacttgtgatatgctgctgggtatgacactgcttgctactgacctaccatatatcttgtttgaaggacgcaagttgattatcctgccctgttgtaaaatgtaaccagaacaattgctggcgtatttcttaagcaccagttttagcccctttctgtaagcagtcgacatttcagttcaactcatgtatgtatattttgatcttgtatacagtactatatttccatcttacgtctgcttcggcatataagagcaactccagtagttggctaaagaattctctaaacaagaaat

SEQ ID NO: 81045 - DNA, 2522 bp, Zea Mays
gacagtgtagtgcctggcagttttcattacgacgacggcctccggccatttggtacaatcagtgccaaaaggtaggcctagattcttaataactaggttctcagaacgatgggtcgaggaacgagaatatggtatgcagtactgtactttaaaaagattctaacactacaagaatgagaatgttcatgtgctttcggaacagaatgatcgtttctaaaacgaggaacacgaagacgttccacgtttccagtttttaatcccaggtttgatggccctgcccctggcataggtgcacatgaaatggtgcgatgggcccctagccctgtgggctgtggctaggataaggaacaaggatctcctgccgaaaaattgcagtgctgatcaccgaccaccacgcccgccggggccgggaagtagatgaagtcatggatttaatctgatcagacactgatcgattgattagtcgcgctacttcaggatgctccccccaaaaccttgatgatcgatgtttacctcaacggatgacgacactgatacgacttgtttttggaggccccgctctatccataggaatcgagacaaggatctagttgtagtagaagaagtgaagggtttgtgcaagagaagacaaatggatgatacgattgaatgttgggatcagccacacgtaagtctagggtatcgacctagtcgccgccggccggaacgagaagaccgagcgcactgcatacctcaagctcctcctcaagctgtaccgcttcaacgccgtgatcctcaagcggtacttcattagcaagaccaaccgcctgtcacaacccagggacggtggaacgcaagccaccgtcgtgagctgttgccaggcggaagaacaacttccagatgcgtttcaacaggaaacgtgactgacgacaagagggtctacgaagtatctgcagtgaaggtggctgcgtgggcacggattctgagcgcgggtgacgagtgcctcgcctttgaccattgtccattgtccattgtcaggttgatggtcatctattgatgtacgctctattttttgtatctgaatgtgcagaattaatagttttatgaaaaaggcaaacatctttcgtatcaaaatgaactcttgagacattcacattttccttgttctctctcaatgatgagatcaaagcagacgggcggtcagaacctgatgttgtgttgagtgtctgcatttttatgcaatccacttatgggatgcatcagagagtgagaacaaggcatttcacttgcatccatatttgcctattaatatggtgtttatcttgcatgggtaacattgtagtttgcttgagcaaacaatcactcgtcatgttgtgcatatatccttgtaagtgctgtctctttctcatgatcgttgatttgcttacttttgagcatgcacctgcattgattattttcttcttggagatttctgaaggccaaggaggtataactggtgcatagatttatatggttgtcttaccagcccattgcattactacatggttgctttggtgccaaatggtctaaccgaaactttttttgtcatctttctatttgtttgctttcttttgatggttgattttatcatgttatcatatcagtttttttttttgctgatgtgataatttaatacattcttcaagcattgtttactgtactctttctttctttctttcttttgtttcactgctatgtgataatagaatggcagatgatggataatcttatcctacacactgaatctaatgtgttgaccaatactccgcttattgtctgatgccatcaattaacaagatctctgttcattgcttcttgggcatttgaaggaactttgtggactaaaagggagcaaattgaggtttgattgttctgcatttttttcttgtaacatttattaaatcatcagggtgtttactgttaaaatacttgcatacattcccatctgtttgctacatgaatatcattatggtataatgggttgtaaaagtttagggtgggaagcggtgtttgggtggctactctcttgtttattctttcggttatttggatgagaaatagattttgttgtcccattaacttatgtaacatctgaatctcactactaagaatgctagggaaaccgtgaaggactttggctctgcgtttggtgtgccacataaccacacgggcgcaagggaaggaagcttgagaaggcaagggggaggaggaaaacctctgcttccacctcggaagagaagcaacgaaacaacgaagagatgaaagagaatagcatcaaagaggggtgactgggctgtggcaccgaggtaacacggctcggcgtcatagatcttggcgttgaggtgcgtccttcgctggcaacaacagactgacgtggcgtcgacgtggccgagctcaagtcatgattcatggcactgagctagctagcaaggccctttttgaagcaccatgatcattcagccggggacgccgcagatgctcacttgtaacctacacatggcgcc

SEQ ID NO: 81046 - DNA, 2497 bp, Zea Mays
gacagtgtagtgcctggcagttttcattacgacgacggcctccggccatttggtacaatcagtgccaaaaggtaggcctagattcttaataactaggttctcagaacgatgggtcgaggaacgagaatatggtatgcagtactgtactttaaaaagattctaacactacaagaatgagaatgttcatgtgctttcggaacagaatgatcgtttctaaaacgaggaacacgaagacgttccacgtttccagtttttaatcccaggtttgatggccctgcccctggcataggtgcacatgaaatggtgcgatgggcccctagccctgtgggctgtggctaggataaggaacaaggatctcctgccgaaaaattgcagtgctgatcaccgaccaccacgcccgccggggccgggaagtagatgaagtcatggatttaatctgatcagacactgatcgattgattagtcgcgctacttcaggatgctccccccaaaaccttgatgatcgatgtttacctcaacggatgacgacactgatacgacttgtttttggaggccccgctctatccataggaatcgagacaaggatctagttgtagtagaagaagtgaagggtttgtgcaagagaagacaaatggatgatacgattgaatgttgggatcagccacacgtaagtctaggtagacatctctgctcttcatttgtgcgctatatatttttaccattcgtgtcgactcgccttcgaaaaccaaaccctagaacccgggccgccgccgccgcaggtcctcactggcactgctcgccgcgcgttgtagtggagacgtctaacctcctcgcaagcttctcgtctccggtaaccatggaccgttgtccgtatttgatacatagcccactttcctcgtgccaagcagggtatcgacctagtcgccgccggccggaacgagaagaccgagcgcactgcatacctcaagctcctcctcaagctgtaccgcttcaacgccgtgatcctcaagcggtacttcattagcaagaccaaccgcctgtcacaacccagggacggtggaacgcaagccaccgtcgtgagctgttgccaggcggaagaacaacttccagatgcgtttcaacaggaaacgtgactgacgacaagagggtctacgaagtatctgcagtgaaggtggctgcgtgggcacggattctgagcgcgggtgacgagtgcctcgcctttgaccattgtccattgtccattgtcaggttgatggtcatctattgatgtacgctctattttttgtatctgaatgtgcagaattaatagttttatgaaaaaggcaaacatctttcgtatcaaaatgaactcttgagacattcacattttccttgttctctctcaatgatgagatcaaagcagacgggcggtcagaacctgatgttgtgttgagtgtctgcatttttatgcaatccacttatgggatgcatcagagagtgagaacaaggcatttcacttgcatccatatttgcctattaatatggtgtttatcttgcatgggtaacattgtagtttgcttgagcaaacaatcactcgtcatgttgtgcatatatccttgtaagtgctgtctctttctcatgatcgttgatttgcttacttttgagcatgcacctgcattgattattttcttcttggagatttctgaaggccaaggaggtataactggtgcatagatttatatggttgtcttaccagcccattgcattactacatggttgctttggtgccaaatggtctaaccgaaactttttttgtcatctttctatttgtttgctttcttttgatggttgattttatcatgttatcatatcagtttttttttttgctgatgtgataatttaatacattcttcaagcattgtttactgtactctttctttctttctttcttttgtttcactgctatgtgataatagaatggcagatgatggataatcttatcctacacactgaatctaatgtgttgaccaatactccgcttattgtctgatgccatcaattaacaagatctctgttcattgcttcttgggcatttgaaggaactttgtggactaaaagggagcaaattgagggaaaccgtgaaggactttggctctgcgtttggtgtgccacataaccacacgggcgcaagggaaggaagcttgagaaggcaagggggaggaggaaaacctctgcttccacctcggaagagaagcaacgaaacaacgaagagatgaaagagaatagcatcaaagaggggtgactgggctgtggcaccgaggtaacacggctcggcgtcatagatcttggcgttgaggtgcgtccttcgctggcaacaacagactgacgtggcgtcgacgtggccgagctcaagtcatgattcatggcactgagctagctagcaaggccctttttgaagcaccatgatcattcagccggggacgccgcagatgctcacttgtaacctacacatggcgcc

SEQ ID NO: 81047 - DNA, 1613 bp, Zea Mays
gacagtgtagtgcctggcagttttcattacgacgacggcctccggccatttggtacaatcagtgccaaaaggtaggcctagattcttaataactaggttctcagaacgatgggtcgaggaacgagaatatggtatgcagtactgtactttaaaaagattctaacactacaagaatgagaatgttcatgtgctttcggaacagaatgatcgtttctaaaacgaggaacacgaagacgttccacgtttccagtttttaatcccaggtttgatggccctgcccctggcataggtgcacatgaaatggtgcgatgggcccctagccctgtgggctgtggctaggataaggaacaaggatctcctgccgaaaaattgcagtgctgatcaccgaccaccacgcccgccggggccgggaagtagatgaagtcatggatttaatctgatcagacactgatcgattgattagtcgcgctacttcaggatgctccccccaaaaccttgatgatcgatgtttacctcaacggatgacgacactgatacgacttgtttttggaggccccgctctatccataggaatcgagacaaggatctagttgtagtagaagaagtgaagggtttgtgcaagagaagacaaatggatgatacgattgaatgttgggatcagccacacgtaagtctagggtatcgacctagtcgccgccggccggaacgagaagaccgagcgcactgcatacctcaagctcctcctcaagctgtaccgcttcaacgccgtgatcctcaagcggtacttcattagcaagaccaaccgcctgtcacaacccagggacggtggaacgcaagccaccgtcgtgagctgttgccaggcggaagaacaacttccagatgcgtttcaacaggaaacgtgactgacgacaagagggtctacgaagtatctgcagtgaaggtggctgcgtgggcacggattctgagcgcgggtgacgagtgcctcgcctttgaccattgtccattgtccattgtcagaatgctagggaaaccgtgaaggactttggctctgcgtttggtgtgccacataaccacacgggcgcaagggaaggaagcttgagaaggcaagggggaggaggaaaacctctgcttccacctcggaagagaagcaacgaaacaacgaagagatgaaagagaatagcatcaaagaggggtgactgggctgtggcaccgaggtaacacggctcggcgtcatagatcttggcgttgaggtgcgtccttcgctggcaacaacagactgacgtggcgtcgacgtggccgagctcaagtcatgattcatggcactgaggtccagtcaaaatcggcacctgggcatgcatgttacgacgttacgtatgtagcgagcatgcatttggacttttggagcctcgtcgttttcgtactctagccatgcacctactaatgttgtctttgttgcttcaaccccaaccggtatggatgatggatcgcttcctcagctccctctttttttttcctttttttacagcagctagctagcaaggccctttttgaagcaccatgatcattcagccggggacgccgcagatgctcacttgtaacctacacatggcgcc

SEQ ID NO: 81048 - DNA, 1595 bp, Zea Mays
gacagtgtagtgcctggcagttttcattacgacgacggcctccggccatttggtacaatcagtgccaaaaggtaggcctagattcttaataactaggttctcagaacgatgggtcgaggaacgagaatatggtatgcagtactgtactttaaaaagattctaacactacaagaatgagaatgttcatgtgctttcggaacagaatgatcgtttctaaaacgaggaacacgaagacgttccacgtttccagtttttaatcccaggtttgatggccctgcccctggcataggtgcacatgaaatggtgcgatgggcccctagccctgtgggctgtggctaggataaggaacaaggatctcctgccgaaaaattgcagtgctgatcaccgaccaccacgcccgccggggccgggaagtagatgaagtcatggatttaatctgatcagacactgatcgattgattagtcgcgctacttcaggatgctccccccaaaaccttgatgatcgatgtttacctcaacggatgacgacactgatacgacttgtttttggaggccccgctctatccataggaatcgagacaaggatctagttgtagtagaagaagtgaagggtttgtgcaagagaagacaaatggatgatacgattgaatgttgggatcagccacacggtatcgacctagtcgccgccggccggaacgagaagaccgagcgcactgcatacctcaagctcctcctcaagctgtaccgcttcaacgccgtgatcctcaagcggtacttcattagcaagaccaaccgcctgtcacaacccagggacggtggaacgcaagccaccgtcgtgagctgttgccaggcggaagaacaacttccagatgcgtttcaacaggaaacgtgactgacgacaagagggtctacgaagtatctgcagtgaaggtggctgcgtgggcacggattctgagcgcgggtgacgagtgcctcgcctttgaccattgtccattgtccattgtcagggaaaccgtgaaggactttggctctgcgtttggtgtgccacataaccacacgggcgcaagggaaggaagcttgagaaggcaagggggaggaggaaaacctctgcttccacctcggaagagaagcaacgaaacaacgaagagatgaaagagaatagcatcaaagaggggtgactgggctgtggcaccgaggtaacacggctcggcgtcatagatcttggcgttgaggtgcgtccttcgctggcaacaacagactgacgtggcgtcgacgtggccgagctcaagtcatgattcatggcactgaggtccagtcaaaatcggcacctgggcatgcatgttacgacgttacgtatgtagcgagcatgcatttggacttttggagcctcgtcgttttcgtactctagccatgcacctactaatgttgtctttgttgcttcaaccccaaccggtatggatgatggatcgcttcctcagctccctctttttttttcctttttttacagcagctagctagcaaggccctttttgaagcaccatgatcattcagccggggacgccgcagatgctcacttgtaacctacacatggcgcc

SEQ ID NO: 81049 - DNA, 1605 bp, Zea Mays
gacagtgtagtgcctggcagttttcattacgacgacggcctccggccatttggtacaatcagtgccaaaaggtaggcctagattcttaataactaggttctcagaacgatgggtcgaggaacgagaatatggtatgcagtactgtactttaaaaagattctaacactacaagaatgagaatgttcatgtgctttcggaacagaatgatcgtttctaaaacgaggaacacgaagacgttccacgtttccagtttttaatcccaggtttgatggccctgcccctggcataggtgcacatgaaatggtgcgatgggcccctagccctgtgggctgtggctaggataaggaacaaggatctcctgccgaaaaattgcagtgctgatcaccgaccaccacgcccgccggggccgggaagtagatgaagtcatggatttaatctgatcagacactgatcgattgattagtcgcgctacttcaggatgctccccccaaaaccttgatgatcgatgtttacctcaacggatgacgacactgatacgacttgtttttggaggccccgctctatccataggaatcgagacaaggatctagttgtagtagaagaagtgaagggtttgtgcaagagaagacaaatggatgatacgattgaatgttgggatcagccacacgtaagtctagggtatcgacctagtcgccgccggccggaacgagaagaccgagcgcactgcatacctcaagctcctcctcaagctgtaccgcttcaacgccgtgatcctcaagcggtacttcattagcaagaccaaccgcctgtcacaacccagggacggtggaacgcaagccaccgtcgtgagctgttgccaggcggaagaacaacttccagatgcgtttcaacaggaaacgtgactgacgacaagagggtctacgaagtatctgcagtgaaggtggctgcgtgggcacggattctgagcgcgggtgacgagtgcctcgcctttgaccattgtccattgtccattgtcagggaaaccgtgaaggactttggctctgcgtttggtgtgccacataaccacacgggcgcaagggaaggaagcttgagaaggcaagggggaggaggaaaacctctgcttccacctcggaagagaagcaacgaaacaacgaagagatgaaagagaatagcatcaaagaggggtgactgggctgtggcaccgaggtaacacggctcggcgtcatagatcttggcgttgaggtgcgtccttcgctggcaacaacagactgacgtggcgtcgacgtggccgagctcaagtcatgattcatggcactgaggtccagtcaaaatcggcacctgggcatgcatgttacgacgttacgtatgtagcgagcatgcatttggacttttggagcctcgtcgttttcgtactctagccatgcacctactaatgttgtctttgttgcttcaaccccaaccggtatggatgatggatcgcttcctcagctccctctttttttttcctttttttacagcagctagctagcaaggccctttttgaagcaccatgatcattcagccggggacgccgcagatgctcacttgtaacctacacatggcgcc

SEQ ID NO: 81050 - DNA, 5210 bp, Zea Mays
gacagtgtagtgcctggcagttttcattacgacgacggcctccggccatttggtacaatcagtgccaaaaggtaggcctagattcttaataactaggttctcagaacgatgggtcgaggaacgagaatatggtatgcagtactgtactttaaaaagattctaacactacaagaatgagaatgttcatgtgctttcggaacagaatgatcgtttctaaaacgaggaacacgaagacgttccacgtttccagtttttaatcccaggtttgatggccctgcccctggcataggtgcacatgaaatggtgcgatgggcccctagccctgtgggctgtggctaggataaggaacaaggatctcctgccgaaaaattgcagtgctgatcaccgaccaccacgcccgccggggccgggaagtagatgaagtcatggatttaatctgatcagacactgatcgattgattagtcgcgctacttcaggatgctccccccaaaaccttgatgatcgatgtttacctcaacggatgacgacactgatacgacttgtttttggaggccccgctctatccataggaatcgagacaaggatctagttgtagtagaagaagtgaagggtttgtgcaagagaagacaaatggatgatacgattgaatgttgggatcagccacacgtaagtctaggtagacatctctgctcttcatttgtgcgctatatatttttaccattcgtgtcgactcgccttcgaaaaccaaaccctagaacccgggccgccgccgccgcaggtcctcactggcactgctcgccgcgcgttgtagtggagacgtctaacctcctcgcaagcttctcgtctccggtaaccatggaccgttgtccgtatttgatacatagcccactttcctcgtgccaagcagggtatcgacctagtcgccgccggccggaacgagaagaccgagcgcactgcatacctcaagctcctcctcaagctgtaccgcttcaacgccgtgatcctcaagcggtacttcattagcaagaccaaccgcctgtcacaacccagggacggtggaacgcaagccaccgtcgtgagctgttgccaggcggaagaacaacttccagatgcgtttcaacaggaaacgtgactgacgacaagagggtctacgaagtatctgcagtgaaggtggctgcgtgggcacggattctgagcgcgggtgacgagtgcctcgcctttgaccattgtccattgtccattgtcaggttgatggtcatctattgatgtacgctctattttttgtatctgaatgtgcagaattaatagttttatgaaaaaggcaaacatctttcgtatcaaaatgaactcttgagacattcacattttccttgttctctctcaatgatgagatcaaagcagacgggcggtcagaacctgatgttgtgttgagtgtctgcatttttatgcaatccacttatgggatgcatcagagagtgagaacaaggcatttcacttgcatccatatttgcctattaatatggtgtttatcttgcatgggtaacattgtagtttgcttgagcaaacaatcactcgtcatgttgtgcatatatccttgtaagtgctgtctctttctcatgatcgttgatttgcttacttttgagcatgcacctgcattgattattttcttcttggagatttctgaaggccaaggaggtataactggtgcatagatttatatggttgtcttaccagcccattgcattactacatggttgctttggtgccaaatggtctaaccgaaactttttttgtcatctttctatttgtttgctttcttttgatggttgattttatcatgttatcatatcagtttttttttttgctgatgtgataatttaatacattcttcaagcattgtttactgtactctttctttctttctttcttttgtttcactgctatgtgataatagaatggcagatgatggataatcttatcctacacactgaatctaatgtgttgaccaatactccgcttattgtctgatgccatcaattaacaagatctctgttcattgcttcttgggcatttgaaggaactttgtggactaaaagggagcaaattgaggtttgattgttctgcatttttttcttgtaacatttattaaatcatcagggtgtttactgttaaaatacttgcatacattcccatctgtttgctacatgaatatcattatggtataatgggttgtaaaagtttagggtgggaagcggtgtttgggtggctactctcttgtttattctttcggttatttggatgagaaatagattttgttgtcccattaacttatgtaacatctgaatctcactactaagaatgctagggaaaccgtgaaggactttggctctgcgtttggtgtgccacataaccacacgggcgcaagggaaggaagcttgagaaggcaagggggaggaggaaaacctctgcttccacctcggaagagaagcaacgaaacaacgaagagatgaaagagaatagcatcaaagaggggtgactgggctgtggcaccgaggtaacacggctcggcgtcatagatcttggcgttgaggtgcgtccttcgctggcaacaacagactgacgtggcgtcgacgtggccgagctcaagtcatgattcatggcactgaggtccagtcaaaatcggcacctgggcatgcatgttacgacgttacgtatgtagcgagcatgcatttggacttttggagcctcgtcgttttcgtactctagccatgcacctactaatgttgtctttgttgcttcaaccccaaccggtatggatgatggatcgcttcctcagctccctctttttttttcctttttttacagcagctagctagcaaggccctttttgaagcaccatgatcattcagccggggacgccgcagatgctcacttgtaacctacacatggcgccaatgcaaggtagcagcaagtaaaaaaaggcccgagagtaggagcgagtggtggtagtaaaaagctagctggaccgagccgaggagacgtacgaaaactgaccgcccaaatcatgaggctagccgcactcgctactggacacgcgaacgctatcctttagcgtaggaatttttgccgcagcgggcgactggatgagccaccctatacactgtagcgtaagagtgaacgctatatctggcgtaactctatctcgctctcctctcctcggcgcaaactaccgcacgcgcacgcgccttccgtccgagcgccggcgttctgctccctcgcccgcgccggcgttctgctccctcgcccgcgccggcgttctgctccctcgcccgcgccgttctgctccctcgcccgctgcgagtggtcgcccgggaagcacgccggacgaggcggaggcgggcgcggcgagcctggatccggaggcggaggcgggcgcggcgagtggatccggaggcggaggcgggcgcggcgagcctggatccggaggcggaggcggtaccggaccccgacgcggcaacctggagcaagcaaagccgtaccccagatccggaggcttggaggttgggggaggagaggaagaagtcggatctgctcagggaagcgcaaaggggaaccgcaagcgacgacgttcgaaggaggtagaggcatcatcggaggagagttccaccgcgcggtctgctcgtccatttcgtcgatttaggatggatggcacacacaacagcaagggtgatagctcacagccgcaaggtcaagctggttggaacccataccagccccctcctccacctgcctggaacccatacatgtttccaatgcaacctcagcctggtggctggtatccacagccaacccatcaccccccacataatgttagcatctttcctcctccttctggacctaacatagtatcagttgaccacactgaagcgaatgtggttctgggggctgatgaggtagatgtacttcatccagaggattcagtaccttcaatcctgaaacgaggaaggactaagttagggaacttcagcccacaagaagatgtaaacctggtgaaagcatggttggaagttagctgtgatcctgtcataggtaacggccaaaaaggagacaggttctggaagagggtggtggaacgatataattttcggaggggggcaaactcagaaagaagcctcaggtctctgcagagccgctggaccaataatatcaagcctgaggttggaaaatttgcaggctactatgcagaagccctgcgacaaaatcccagtggaatgtcagatgctgacaaaacatcacttgcagctaccaactttgcggaggttgaagggcatgcgtttggattcatgcactgttgggaccgtatgaaggacgagcccaaatggggtaacccaacacaacttgggactgaagctcatctagaaggcgacgacttggaagaggactccaacagggtgcacggtgatgcagacaagtcagctggaaaaaggccggttggtagggacagagctaaagcagcgaacaagaaatctaaatcggtgtcaggtgatacatcttcttcagagtacgctagtaggatgcaggacctgtccattcaaaaaataaatatcatgcaagaagaaagcgtgcgcaaaggcgagcgattccagcagcttgctacaattgatgagaaaaggtaccaggaaatgcgtagtcacaaccaatcggtattagatattgagcaagagaaagttagaatcatgcgtgagaagcatgacagggaggagaagaaggaggatgagaggattctgagtattaatttggactcctgcacaccttccctgagaatgtattatgaagctttgcaggaggacataatggcgaagcttgctgctagacgccaagggaggcatgccccataaggctctcatgtgttgctgttagaataattttcccatatgctattatgtagtaattgttagaacaattgcattattcaatcctgttgtactggtgaggacaattttccacaattcagtcatgttgtaactgtgtgtattaatttgtgaggacaatttgcattggacaattttccacaattgagtcatgttgtaactttgtgtattaattcagtcatgtaaccgaaatgggatatagtggtcgtctggccactgtcactgcccgaaatgggattcttctatgatatgtgcactgtccattttttatgattgca

SEQ ID NO: 81051 - DNA, 1457 bp, Zea Mays
cttctctgtttcctccatcttttggcccatctgcaccctctcggtcgccgcgcgctccgccatcgaagcagccaactccgaccgaaccatcaactgttgttgggcgcgttccacttccttgagccgagcgcaaaccgcctccagagtctccatcatccgcccccaactctcctgcgttcctcgatcgtgatccgccatggcgttcaggatgaagcgggtctggacggatggctttgcagcgggcgccgtgatgaagcagtccgaacgccgggaagacgactccgccctgcgctcaccggaagccgcgcttgccgttgaagaccccaccgccgaggaccttgaatccgataccactgtcacaacccagggacggtggaacgcaagccaccgtcgtgagctgttgccaggcggaagaacaacttccagatgcgtttcaacaggtatggtggaatactttctatatttcttttctgtccattctctagtatttgtccagtatttatagtgcaacactaggctaatacagcccactagaaatatggccacaataggcccaattcacagattacatcttcattacagttgattacccagtaatcaagtagcactcctgacaccgccctgcctctctcgctccaccgtctcatcagcttcatggaaggggggaggtctcgcttcgatttccattcagattttgtttgttgaatgtgttttccagttatgtgtcaaattgctgtgatcgtaggaaacgtgactgacgacaagagggtctacgaagtatctgcagtgaaggtggctgcgtgggcacggattctgagcgcgggtgacgagtgcctcgcctttgaccattgtccattgtccattgtcagggaaaccgtgaaggactttggctctgcgtttggtgtgccacataaccacacgggcgcaagggaaggaagcttgagaaggcaagggggaggaggaaaacctctgcttccacctcggaagagaagcaacgaaacaacgaagagatgaaagagaatagcatcaaagaggggtgactgggctgtggcaccgaggtaacacggctcggcgtcatagatcttggcgttgaggtgcgtccttcgctggcaacaacagactgacgtggcgtcgacgtggccgagctcaagtcatgattcatggcactgaggtccagtcaaaatcggcacctgggcatgcatgttacgacgttacgtatgtagcgagcatgcatttggacttttggagcctcgtcgttttcgtactctagccatgcacctactaatgttgtctttgttgcttcaaccccaaccggtatggatgatggatcgcttcctcagctccctctttttttttcctttttttacagcagctagctagcaaggccctttttgaagcaccatgatcattcagccggggacgccgcagatgctcacttgtaacctacacatggcgcc

SEQ ID NO: 81052 - DNA, 1028 bp, Zea Mays
cttctctgtttcctccatcttttggcccatctgcaccctctcggtcgccgcgcgctccgccatcgaagcagccaactccgaccgaaccatcaactgttgttgggcgcgttccacttccttgagccgagcgcaaaccgcctccagagtctccatcatccgcccccaactctcctgcgttcctcgatcgtgatccgccatggcgttcaggatgaagcgggtctggacggatggctttgcagcgggcgccgtgatgaagcagtccgaacgccgggaagacgactccgccctgcgctcaccggaagccgcgcttgccgttgaagaccccaccgccgaggaccttgaatccgataccactgtcacaacccagggacggtggaacgcaagccaccgtcgtgagctgttgccaggcggaagaacaacttccagatgcgtttcaacagggaaaccgtgaaggactttggctctgcgtttggtgtgccacataaccacacgggcgcaagggaaggaagcttgagaaggcaagggggaggaggaaaacctctgcttccacctcggaagagaagcaacgaaacaacgaagagatgaaagagaatagcatcaaagaggggtgactgggctgtggcaccgaggtaacacggctcggcgtcatagatcttggcgttgaggtgcgtccttcgctggcaacaacagactgacgtggcgtcgacgtggccgagctcaagtcatgattcatggcactgaggtccagtcaaaatcggcacctgggcatgcatgttacgacgttacgtatgtagcgagcatgcatttggacttttggagcctcgtcgttttcgtactctagccatgcacctactaatgttgtctttgttgcttcaaccccaaccggtatggatgatggatcgcttcctcagctccctctttttttttcctttttttacagcagctagctagcaaggccctttttgaagcaccatgatcattcagccggggacgccgcagatgctcacttgtaacctacacatggcgcc

SEQ ID NO: 81053 - DNA, 4847 bp, Zea Mays
cttctctgtttcctccatcttttggcccatctgcaccctctcggtcgccgcgcgctccgccatcgaagcagccaactccgaccgaaccatcaactgttgttgggcgcgttccacttccttgagccgagcgcaaaccgcctccagagtctccatcatccgcccccaactctcctgcgttcctcgatcgtgatccgccatggcgttcaggatgaagcgggtctggacggatggctttgcagcgggcgccgtgatgaagcagtccgaacgccgggaagacgactccgccctgcgctcaccggaagccgcgcttgccgttgaagaccccaccgccgaggaccttgaatccgataccactgtcacaacccagggacggtggaacgcaagccaccgtcgtgagctgttgccaggcggaagaacaacttccagatgcgtttcaacaggtatggtggaatactttctatatttcttttctgtccattctctagtatttgtccagtatttatagtgcaacactaggctaatacagcccactagaaatatggccacaataggcccaattcacagattacatcttcattacagttgattacccagtaatcaagtagcactcctgacaccgccctgcctctctcgctccaccgtctcatcagcttcatggaaggggggaggtctcgcttcgatttccattcagattttgtttgttgaatgtgttttccagttatgtgtcaaattgctgtgatcgtaggaaacgtgactgacgacaagagggtctacgaagtatctgcagtgaaggtggctgcgtgggcacggattctgagcgcgggtgacgagtgcctcgcctttgaccattgtccattgtccattgtcaggttgatggtcatctattgatgtacgctctattttttgtatctgaatgtgcagaattaatagttttatgaaaaaggcaaacatctttcgtatcaaaatgaactcttgagacattcacattttccttgttctctctcaatgatgagatcaaagcagacgggcggtcagaacctgatgttgtgttgagtgtctgcatttttatgcaatccacttatgggatgcatcagagagtgagaacaaggcatttcacttgcatccatatttgcctattaatatggtgtttatcttgcatgggtaacattgtagtttgcttgagcaaacaatcactcgtcatgttgtgcatatatccttgtaagtgctgtctctttctcatgatcgttgatttgcttacttttgagcatgcacctgcattgattattttcttcttggagatttctgaaggccaaggaggtataactggtgcatagatttatatggttgtcttaccagcccattgcattactacatggttgctttggtgccaaatggtctaaccgaaactttttttgtcatctttctatttgtttgctttcttttgatggttgattttatcatgttatcatatcagtttttttttttgctgatgtgataatttaatacattcttcaagcattgtttactgtactctttctttctttctttcttttgtttcactgctatgtgataatagaatggcagatgatggataatcttatcctacacactgaatctaatgtgttgaccaatactccgcttattgtctgatgccatcaattaacaagatctctgttcattgcttcttgggcatttgaaggaactttgtggactaaaagggagcaaattgagaatgctagggaaaccgtgaaggactttggctctgcgtttggtgtgccacataaccacacgggcgcaagggaaggaagcttgagaaggcaagggggaggaggaaaacctctgcttccacctcggaagagaagcaacgaaacaacgaagagatgaaagagaatagcatcaaagaggggtgactgggctgtggcaccgaggtaacacggctcggcgtcatagatcttggcgttgaggtgcgtccttcgctggcaacaacagactgacgtggcgtcgacgtggccgagctcaagtcatgattcatggcactgaggtccagtcaaaatcggcacctgggcatgcatgttacgacgttacgtatgtagcgagcatgcatttggacttttggagcctcgtcgttttcgtactctagccatgcacctactaatgttgtctttgttgcttcaaccccaaccggtatggatgatggatcgcttcctcagctccctctttttttttcctttttttacagcagctagctagcaaggccctttttgaagcaccatgatcattcagccggggacgccgcagatgctcacttgtaacctacacatggcgccaatgcaaggtagcagcaagtaaaaaaaggcccgagagtaggagcgagtggtggtagtaaaaagctagctggaccgagccgaggagacgtacgaaaactgaccgcccaaatcatgaggctagccgcactcgctactggacacgcgaacgctatcctttagcgtaggaatttttgccgcagcgggcgactggatgagccaccctatacactgtagcgtaagagtgaacgctatatctggcgtaactctatctcgctctcctctcctcggcgcaaactaccgcacgcgcacgcgccttccgtccgagcgccggcgttctgctccctcgcccgcgccggcgttctgctccctcgcccgcgccggcgttctgctccctcgcccgcgccgttctgctccctcgcccgctgcgagtggtcgcccgggaagcacgccggacgaggcggaggcgggcgcggcgagcctggatccggaggcggaggcgggcgcggcgagtggatccggaggcggaggcgggcgcggcgagcctggatccggaggcggaggcggtaccggaccccgacgcggcaacctggagcaagcaaagccgtaccccagatccggaggcttggaggttgggggaggagaggaagaagtcggatctgctcagggaagcgcaaaggggaaccgcaagcgacgacgttcgaaggagttagtggatttgctcggccaaagctttgcatcaaaaagttgtagcttcatggatcaggtagaccaagcagggatgctaaaacaatctggccgtgtgcttcctgcattgagcgatgccattgacagtgtgctttcctcagttgatcatttttcaaatgactctgagaagctcaggcaggctttaggttttgattatctcaatgaagccaatgctagcagcaagagtattgcacctttcggggttgcacttactggcagccatgcctttttaaatggcaatttctctgcttctaggcccacaaatggtcctttcaagatgaatataaagatggatggcacacacaacagcaagggtgatagctcacagccgcaaggtcaagctggttggaacccataccagccccctcctccacctgcctggaacccatacatgtttccaatgcaacctcagcctggtggctggtatccacagccaacccatcaccccccacataatgttagcatctttcctcctccttctggacctaacatagtatcagttgaccacactgaagcgaatgtggttctgggggctgatgaggtagatgtacttcatccagaggattcagtaccttcaatcctgaaacgaggaaggactaagttagggaacttcagcccacaagaagatgtaaacctggtgaaagcatggttggaagttagctgtgatcctgtcataggtaacggccaaaaaggagacaggttctggaagagggtggtggaacgatataattttcggaggggggcaaactcagaaagaagcctcaggtctctgcagagccgctggaccaataatatcaagcctgaggttggaaaatttgcaggctactatgcagaagccctgcgacaaaatcccagtggaatgtcagatgctgacaaaacatcacttgcagctaccaactttgcggaggttgaagggcatgcgtttggattcatgcactgttgggaccgtatgaaggacgagcccaaatggggtaacccaacacaacttgggactgaagctcatctagaaggcgacgacttggaagaggactccaacagggtgcacggtgatgcagacaagtcagctggaaaaaggccggttggtagggacagagctaaagcagcgaacaagaaatctaaatcggtgtcaggtgatacatcttcttcagagtacgctagtaggatgcaggacctgtccattcaaaaaataaatatcatgcaagaagaaagcgtgcgcaaaggcgagcgattccagcagcttgctacaattgatgagaaaaggtaccaggaaatgcgtagtcacaaccaatcggtattagatattgagcaagagaaagttagaatcatgcgtgagaagcatgacagggaggagaagaaggaggatgagaggattctgagtattaatttggactcctgcacaccttccctgagaatgtattatgaagctttgcaggaggacataatggcgaagcttgctgctagacgccaagggaggcatgccccataaggctctcatgtgttgctgttagaataattttcccatatgctattatgtagtaattgttagaacaattgcattattcaatcctgttgtactggtgaggacaattttccacaattcagtcatgttgtaactgtgtgtattaatttgtgaggacaatttgcattggacaattttccacaattgagtcatgttgtaactttgtgtattaattcagtcatgtaaccgaaatgggatatagtggtcgtctggccactgtcactgcccgaaatgggattcttctatgatatgtgcactgtccattttttatgattgca

SEQ ID NO: 81054 - DNA, 843 bp, Zea Mays
tatcatatcagtttttttttttgctgatgtgataatttaatacattcttcaagcattgtttactgtactctttctttctttctttcttttgtttcactgctatgtgataatagaatggcagatgatggataatcttatcctacacactgaatctaatgtgttgaccaatactccgcttattgtctgatgccatcaattaacaagatctctgttcattgcttcttgggcatttgaaggaactttgtggactaaaagggagcaaattgaggactttggctctgcgtttggtgtgccacataaccacacgggcgcaagggaaggaagcttgagaaggcaagggggaggaggaaaacctctgcttccacctcggaagagaagcaacgaaacaacgaagagatgaaagagaatagcatcaaagaggggtgactgggctgtggcaccgaggtaacacggctcggcgtcatagatcttggcgttgaggtgcgtccttcgctggcaacaacagactgacgtggcgtcgacgtggccgagctcaagtcatgattcatggcactgaggtccagtcaaaatcggcacctgggcatgcatgttacgacgttacgtatgtagcgagcatgcatttggacttttggagcctcgtcgttttcgtactctagccatgcacctactaatgttgtctttgttgcttcaaccccaaccggtatggatgatggatcgcttcctcagctccctctttttttttcctttttttacagcagctagctagcaaggccctttttgaagcaccatgatcattcagccggggacgccgcagatgctcacttgtaacctacacatggcgcc

SEQ ID NO: 81055 - DNA, 2848 bp, Zea Mays
ctgaaaaaatatgaaaactaaaataattttagtgtttaccgatcttttccatcgttttcaacactagccgaaagtacggacccgctaatcatccaacggcctaattaatcatcacaatccagcttaatttacgggaaaacactgaggaatgaataaagaatggcggcgcactcgtgctgacctcgttcggcttcggtcctaccgccgccgcgtcgtgggaggataatcgaactgcttcccttctcgtcttccctaacctttccgtccttcccggattatttccatcaccagagcgtatcgcgtcgtctcctctctatccgattccgcccgcggacccaggctcccgcatggacgctgccggcggggtggaggccgccgccaacggcgggatcgagggctccgccgacccctgcagctcaggcggtgccggcgggtacaggcgctccgtccaccagatcgccggcggcgggaaagctgctgatatcatcttatggaggcgagcgcgtgttacatttggtgttatatttggtgctactctggcatgttctgcagttcataagggttaaaatagctggactgctagataggcagcctaggccactacctgagttagttttatcagaggagatggttagcaatgctgcggcttcattccgtgtgaaagtgaacagcatgctgatgatagcgcatgacattactcttggcaaggacttcaggctatttttccaggtcgtgattgtcttgtggctgttatctgtcattggaaatttctgctcgtctatcactcttgcttacataggaaccgttgctttggtcacaatgcctgcattgtacaacaagtaccagaggcctgttgataggtatgctgggatggtctaccggaacatttcgaggcattacaagatagttgatgagaatgtgatcagtagactaccgagaaggtttatcagagataaagaggactgatactctgaaaaatgaactcgctaagctagtcaggtaatcttttacctacattgtcagaccttacatggtgtgaaactatagagctacgaaaacagagaacggcatggaacctacagtagataccgttgcagtgtactcttgggcaaaggtttgagacgaaattaaaatgtatagctttctgtgttagctctttgcaacgaactggctaaatgttgttaaaaataacaaaagcaattgtcatgggaagttgaaaatgaagtggttgtaacttgtgaaagcgagtgctgtagcaggtaccagcaatggcaacagactgaatctactgcagggtactttggttgcggcttgcagtcagatgcatggctacgtctcactccgaagtcagctccgaacatgttacccccctggtgcaagtgctcgctgctcagtatcgctaaaccttactccttcagcattatgccacaagtgcaatacatggttcaaaataaaggcgctgtttggactttggacccattagctaacagtaattagctaatagctagttattagctatctgatttggtccagtttgaatctagctagctgttagccaatagtaattagatatccaatttggtccagtttgagtctagctagctgttagccaatagtaattagctatctaatttcgtccagatagttactgtctacagaacaagctaacaattagctggtctattattagcaaataactattatgtattatccatatggattctcgtttctgctaaatctgactggtactagttcttcccttcttcatgatcaactaaggcgactgacggttgcaaatgtccggaattgccaaaccttgctcattcagcattaaaatgctatttgatactctcactttgttatatcaggcaaactctctatagcgttcacatctcgacactacacaacaacatatagactattttttttttcaaactgtcatagcaactccgggtcagtctcacgccgaatacagtgaaaggtcttccgaaaacagaacagtcgcacctgcaacaataatttatacccggtgatctctatatttaatcaagataattgtcaaacactttacagaatcaagcatgattatttttctccaacaatggagtttcatgattatttttctgtaacaatggagtttcgagaattgagctccaaagaactatagaattatcatacttgaccagttgaccgtgaaaagtttaggagcagaactaaacccaacctctttgataacctctgaaaattgttgcatggtagaaacaacaattttttatgcttccttggcaggatagctgcataagatccaagtcaagttacactataaattaaaactcgaaattggaaaatcagttgagtgcagcaaaggtacgtaaatgagcgaaaactaaaacctgcacataccgagaaacaccacaagatatagcagggaatgcgatgtactgtctttagcaagcttgaaccagcacataatttcttttaaaatttgaatagagcttactcattggcgttctttaatgacacttcaggatgcttgtccatatcatatataggcccaacagtgtgaatcactcgagaaacaggaagctcgatgtgacagctggtattgaggagcgcgaagggattactgagtcgatgtctgaagaggctgcatcagcaaggatgagtctggtcatctggtgccggacggtgaccaggagtaggaaagaggaaagggccgtgtgggtggtgtttatggccatgttggccgtttgtggtgtggggcatctgtggcagtgagccgacccattcacgagtatattccgaaccctacagtaagcaatgagaataacgtgaaccaatttccaac

SEQ ID NO: 81056 - DNA, 2577 bp, Zea Mays
aaagaatggcggcgcactcgtgctgacctcgttcggcttcggtcctaccgccgccgcgtcgtgggaggataatcgaactgcttcccttctcgtcttccctaacctttccgtccttcccggattatttccatcaccagagcgtatcgcgtcgtctcctctctatccgattccgcccgcggacccaggctcccgcatggacgctgccggcggggtggaggccgccgccaacggcgggatcgagggctccgccgacccctgcagctcaggcggtgccggcgggtacaggcgctccgtccaccagatcgccggcggcgggaaagctgctgatatcatcttatggaggcgagcgcgtgttacatttggtgttatatttggtgctactctggcatggtggttgtttgagaagtctggactatcattattaactatctgctctgatatacttctcatcttgatagttctgcagttcataagggttaaaatagctggactgctagataggcagcctaggccactacctgagttagttttatcagaggagatggttagcaatgctgcggcttcattccgtgtgaaagtgaacagcatgctgatgatagcgcatgacattactcttggcaaggacttcaggctatttttccaggttcactgttatgcatgtactttgtgttgatttttttggtattcctgtcattgctgagacattttctcttcacaggtcgtgattgtcttgtggctgttatctgtcattggaaatttctgctcgtctatcactcttgcttacataggaaccgttgctttggtcacaatgcctgcattgtacaacaagtaccagaggcctgttgataggtatgctgggatggtctaccggaacatttcgaggcattacaagatagttgatgagaatgtgatcagtagactaccgagaaggtttatcagagataaagaggactgatactctgaaaaatgaactcgctaagctagtcaggtaccagcaatggcaacagactgaatctactgcagggtactttggttgcggcttgcagtcagatgcatggctacgtctcactccgaagtcagctccgaacatgttacccccctggtgcaagtgctcgctgctcagtatcgctaaaccttactccttcagcattatgccacaagtgcaatacatggttcaaaataaaggcgctgtttggactttggacccattagctaacagtaattagctaatagctagttattagctatctgatttggtccagtttgaatctagctagctgttagccaatagtaattagatatccaatttggtccagtttgagtctagctagctgttagccaatagtaattagctatctaatttcgtccagatagttactgtctacagaacaagctaacaattagctggtctattattagcaaataactattatgtattatccatatggattctcgtttctgctaaatctgactggtactagttcttcccttcttcatgatcaactaaggcgactgacggttgcaaatgtccggaattgccaaaccttgctcattcagcattaaaatgctatttgatactctcactttgttatatcaggcaaactctctatagcgttcacatctcgacactacacaacaacatatagactattttttttttcaaactgtcatagcaactccgggtcagtctcacgccgaatacagtgaaaggtcttccgaaaacagaacagtcgcacctgcaacaataatttatacccggtgatctctatatttaatcaagataattgtcaaacactttacagaatcaagcatgattatttttctccaacaatggagtttcatgattatttttctgtaacaatggagtttcgagaattgagctccaaagaactatagaattatcatacttgaccagttgaccgtgaaaagtttaggagcagaactaaacccaacctctttgataacctctgaaaattgttgcatggtagaaacaacaattttttatgcttccttggcaggatagctgcataagatccaagtcaagttacactataaattaaaactcgaaattggaaaatcagttgagtgcagcaaaggtacgtaaatgagcgaaaactaaaacctgcacataccgagaaacaccacaagatatagcagggaatgcgatgtactgtctttagcaagcttgaaccagcacataatttcttttaaaatttgaatagagcttactcattggcgttctttaatgacacttcaggatgcttgtccatatcatatataggcccaacagtgtgaatcactcgagaaacaggaagctcgatgtgacagctggtattgaggagcgcgaagggattactgagtcgatgtctgaagaggctgcatcagcaaggatgagtctggtcatctggtgccggacggtgaccaggagtaggaaagaggaaagggccgtgtgggtggtgtttatggccatgttggccgtttgtggtgtggggcatctgtggcagtgagccgacccattcacgagtatattccgaaccctacagtaagcaatgagaataacgtgaaccaatttccaac

SEQ ID NO: 81057 - DNA, 1605 bp, Zea Mays
agaatggcggcgcactcgtgctgacctcgttcggcttcggtcctaccgccgccgcgtcgtgggaggataatcgaactgcttcccttctcgtcttccctaacctttccgtccttcccggattatttccatcaccagagcgtatcgcgtcgtctcctctctatccgattccgcccgcggacccaggctcccgcatggacgctgccggcggggtggaggccgccgccaacggcgggatcgagggctccgccgacccctgcagctcaggcggtgccggcgggtacaggcgctccgtccaccagatcgccggcggcgggaaagctgctgatatcatcttatggaggcgagcgcgtgttacatttggtgttatatttggtgctactctggcatggtggttgtttgagaagtctggactatcattattaactatctgctctgatatacttctcatcttgatagttctgcagttcataagggttaaaatagctggactgctagataggcagcctaggccactacctgagttagttttatcagaggagatggttagcaatgctgcggcttcattccgtgtgaaagtgaacagcatgctgatgatagcgcatgacattactcttggcaaggacttcaggctatttttccaggtcgtgattgtcttgtggctgttatctgtcattggaaatttctgctcgtctatcactcttgcttacataggaaccgttgctttggtcacaatgcctgcattgtacaacaagtaccagaggcctgttgataggtatgctgggatggtctaccggaacatttcgaggcattacaagatagttgatgagaatgtgatcagtagactaccgagaaggtttatcagagataaagaggactgatactctgaaaaatgaactcgctaagctagtcaggtaatcttttacctacattgtcagaccttacatggtgtgaaactatagagctacgaaaacagagaacggcatggaacctacagtagataccgttgcagtgtactcttgggcaaaggtttgagacgaaattaaaatgtatagctttctgtgttagctctttgcaacgaactggctaaatgttgttaaaaataacaaaagcaattgtcatgggaagttgaaaatgaagtggttgtaacttgtgaaagcgagtgctgtagcaggtaccagcaatggcaacagactgaatctactgcagggtactttggttgcggcttgcagtcagatgcatggctacgtctcactccgaagtcagctccgaacatgttacccccctggatgcttgtccatatcatatataggcccaacagtgtgaatcactcgagaaacaggaagctcgatgtgacagctggtattgaggagcgcgaagggattactgagtcgatgtctgaagaggctgcatcagcaaggatgagtctggtcatctggtgccggacggtgaccaggagtaggaaagaggaaagggccgtgtgggtggtgtttatggccatgttggccgtttgtggtgtggggcatctgtggcagtgagccgacccattcacgagtatattccgaaccctacagtaagcaatgagaataacgtgaaccaatttccaac

SEQ ID NO: 81058 - DNA, 664 bp, Zea Mays
ttttactctgcagtatccaaaagtggaattagagaaccatccttagcaggtaaattttactctaagaactccaatggaagactatgctctaaaaaagaagcggtttttgataaatatgtgaagtcctaaaccagtatgcggaacaaatgttatacggtaccaggatggcgatgtacagagtggaacggacacaactgtcaacgacataacttttttaggtcccaactcgggcaattactatggtgttggatcaaagatgctttgaagtttgaagcgcatccaaaacaaatacagtgagacgaattttctagggcctgcgagtgccaagagaaaagatgggaccctttgggtaccatgcctgacaagaaatgattggttttcttcgtaatctgattagtctctctggcagttgacgattttttacagcaacaaaggttgattgtgcaaagggagaggtcatcagggtggaaaattttctactgtgattgcaaggaggccagaggcaactccgattgaataatcttcaaatcattgtatcctctgtaatagtggtacttagtttgtgatgtgcactgttactgtatttggatttgctcatggtttctgtggagctggttgagctgaaccttgtgttttgctatctgtgtcccttggatttcctaaa

SEQ ID NO: 81059 - DNA, 539 bp, Zea Mays
caaccgtcacttccccttccatttcccagccgtaagcctcttcctcacgcacgcccttctatcttcaacctccagcagcttcgttgtccctggtggccggcgcacctacatggattccccctccctgtaccctctcggcgccccatgccatttccccacctccggcggctgatgtatacacggctgaccggcagcagggacactggctagggacaccaacagccgacaggaagctctccagcagggcgtcccttcccagccaaccccagcagcgcagcttgcctggcacggctggagtggccctcgcgctcgcgtctggcgtggcccgcgtgtgtgccccggcgtggcctgcgtagccccagctcgaattttgcgcggccctagcacaacagcagtctcgctgttctcgtgccttgccgcgagctcatctggttgtccgccgtcgttgcgagactatgatccgtttctgagctttgagggatcaaagatcaagcattgtgaccaagtgatctggctcttcgagttctacaaggttgaag

SEQ ID NO: 81060 - DNA, 4476 bp, Zea Mays
cttttagtgacttttggatgaaacagtgaaaacatatatcgaaaaatcttttaacggttagccactggccttgagtcaaaatcgaaaacaccactttcccacaaccaaacaaaccaatttagacaaagtgtgacacagttacccaccaatcaaacagccctaaaacagccctgagtctcatatatgtcacggctcccttccttccgtgcatgaatgcaccacgctgacaagatctgtccgtgacgccgctggcctgctccttctccgcgacgccgtcgtcgcgcgcgcctttctcagcgacaccgtcttcttgctcctctttctccacgacgccgtcgaccgtcgtgctggtcctccttctccatggtgccactacgctcgtccgcctcaacggcggcggctcactgctgcctgcctgctttttgggcttcgtagcctctcaaccagcaatggcgtggccgaggctttgaagtagataaggagctgactgtttatatcagttccagtgttgaaagtggcaactattaacgtgtgcataagcaaaatggatagggaacttgctagcgacatggagcttgattctgttgtcttccaagtatcctcgcctgacaacaggtatgaagcaattgcttgcagtaagggaaaaacagaactgatagcttctggtccttttgaccagttagttctgcacctggaagatgccaaaacattccaatcttgttcatcaagtggtacttttaaactgttattggctggggatggaaaagactcttcctggtttaccaaatccaccttgcagagatttttgcatatcataagttcatttgatacatcaaaatcggtcaatggagttttagacgagatgtcacagctggaggaaacaagaaagtttcatcaatcactttatgttaaggagcaacagaatgttattagtggcgctttaacaggaggtttatttggtactggtgccatagcacagcagggaaatgatgggccaaattcatcggatacgacaaagaatgaattgcttcgagcactggatttgagattaactgcactgaaggaagagatcttggtcgtattgaaccgagcagttggatccaatttatcggcaagagaaatatctgatttatctgcttttgttcagcgatttggaacatcagagttttgttggttgatgcggtgtacgttgttgatatcggattgtaagccctctgagctcccactacagcagaattctacaactgagaaagttgacaaggatgagaatgcacataaaccttgcatcagtcctcagactaatcttcagatgcccattgccaataatgtatctccagcaaagcttgcacaaattgagcgtgagagctcaacagaaagtgatgattcctctgaatccagtgatgaaggtgaggccattgttgaaaggagccgtcctcttgtaagatctgcttcacctagaagatctgcttctccaatgcggagggttcaaattgggagatcaggatcacgtcgttcaacagcaattgctatcaagagcctcagttacttccctcctagtcagaggattcctatggataaagatgatgaaagtagtaccttcaatggtgaaactgatcagccaccaaagaaatctgacactaacgttagaaggatgagtgttcaggatgcaattaacctttttgagagcaagcagaaggatcagaatccagattcacaaaataagaaagctggcttgtttgccactaagtctgtcttgagaaggtggagtgcaggaatgggtgattctttgaatgaaaactcagaaggaaaagtctcagattccacatctgaaagtaaatcaaacaacatagcttctgaaactgagaaggttgaagctgaaatgaaggctgaactagaacaagcaaagcctggtctggaggaaagcagtgatcgggcaatggcctccgctgagtggaatcgccagaaggaagccgagcttaatcagatgttattgaaaatgatggaagtcatgcctgggaaatttgcgggtgctaatgccaccgctacaggtctcagttccaccaatcagcaaaaagctgtatctcatggccagcatacagagaagcgagacacaaaagtcagaactgagaaaggcacaaggcgaccagcaaaggaaccaagcaccaagcccttgaaggaaacagctgggaagaataaaccagcaatgacctcgaaatctggctcttcaacagagagacgtatttcaccagttccacaaagggcgcggcgaaattcatcacctccagtcctaccgaaagaagtagcatcaaagacaccaccagtcaggaaaagctcaccgaaaccatcacctgcacctgcatctgtgcctactacacgtagttcatggtcaggtggttctttgactaaagcaactacaacacaaaaaactaaaaggtctcctgggatggcttcaacgtccacacaaactagccgaaggactccaacaacgccctcgtcgtctcagccagcttcaaaagcggaaagggccattcaatcagtgaagaacaagaaggaaaccattactgctaccaagccagctataaagggacaagaagagaagaagaccaaaacagcaacaaagacaagcagaataactaaagtttcaccttcagaagaaaaatcaggtgtaaaaacgaagcaaagcttgcaaaaggtttcaaataaaagcagtgttgtacctcttgagtccaaaaccttgaagaaaaccactggaattagtcagagcattaggtctggtatggtgaagaataaggtaccccaacctaatgacttctcaaaagataccggaagtgttaaccaagctgaagataaggagcaatctcctgtgacaaccgagccaactactaaggtactggaggctgatcttgctcaaccagcacatgatgttgatgaaaatttagaaatttcgctcgataatgacttgaatattgaaaaaacagagaaaccggcctcgagtttaactgcaacagaaatgggctccagtatccaagttgaaccctctacggatgagttagatgaggccatacaacctcctgacgatgacatgggcatctcatcatctgcgtgggtagaagtagagcgtcaagaactagaagtcactgtttcgagtgaaaatgtagttgttgaggatgtaacttctccaggaattgcaccattgccgtcatcaagcccaagagtgcgtcattcgttgtcacaaatgctgcaagcagatagcaatgaaccagaaattattgagtggggaaatgctgaaaacccacccgcaatagtttttcataaggattctccaaaaggattcaagaggcttctaaagtttgctcgaaaaaacaagggagacaacaatgctaacggctgggcaagcccctcggtagtttcagaaggagaagatgaactagaagaaccaagaggcactagtgatggtacaaattcaagcaggagaacttttgatggttcaaagactaatagcatcttatcagctcaatcaactaccggcagcttcaactctttgaactcggataagctacgggagagatcaggtgctgccacatcaacaagagcatcaaggtcgttcttctcactctcaaacttccggagcagcaggtcaaatgagtcgaagcttcgatagtgtctgccttgtttgtccagcagatacatgggtagttcatctccgctcccattcaggacgtctagacttaaaaatggtttgagatttgattgttcggacggagccagcttgctgtgtttcgctctagtcacctgacatttgatatatagatagcttctgcctatgagatgccatacttcgcttctgccgtcctgtacatttctatattttactgcattgggtgcgagctgattgagacgaccgatatgtttgcatggcttgcaagagatttgcttcgaccaaaagccctttgctgtcaatagtttgtaccgaaaattgtcatgagcaacaacattaggaatgatgtaagttgtcacatttttttttgacgagaggaggaccccatttctattattgtcataacagaaatacaaagcggttcagatagtttccacactacaacgcaaaataacaggaagaacccgcaaacagaagcgctgacgagccaatccgcttcggatggctcagaacagccgagtcccctaccaggcaacatgccaaccgacgagtttagagttttacatcacacaagtaccagaccatacggcggaggatggcaagggcataacagacgacagcaaaatagagcgagtttctgacaaagctaacaccagacgagcagtcacgtcatgactcaacgcccgtgtggctgcagcatcccttctatctcatcgcccgacccgaggatccgatttcctctagcacttgcaccacgaaccagcatcttggcgccctcttgcagaaggtcctggagctctttcttgctaagccctata

SEQ ID NO: 81061 - DNA, 4736 bp, Zea Mays
tacgctgcctcgggaggcatatgcgccaacgttgattgagcttggcgttaatgaagcgtgacgcagaaggagaaaggagacgttgggagggagtagatgccttttctcatcggggttgattttaaagcactgatggaaatgttcaccaggttagtgtaaaccaaacagtccatgtgccgcacggaacgcctccccgccgaccgacgggaccccaggcagcacggagcacgggcacacggacacgaaaacgaaacaccacaccgtgtcagttcccccactacattcctccgccatttaaacgcgggttccccgtttgtcccttttcctcgcgtccaccactccacctccatccatcactggagctccccagaaaaaaaggcaccaggcaattcccgattagcatctcgaattcgcgatatgacctgcggcggcgtcagaccggatgcgggaagctagtgttccattccatctggatgctggtgtgtattggttttggttttgagttcagtacctctcccctcttctggattgcgtattccctcggttgatgtagaaaatgactggtacagatctgacacttggagcatatagggttatacgttctgggctttgaagtagataaggagctgactgtttatatcagttccagtgttgaaagtggcaactattaacgtgtgcataagcaaaatggatagggaacttgctagcgacatggagcttgattctgttgtcttccaagtatcctcgcctgacaacaggtatgaagcaattgcttgcagtaagggaaaaacagaactgatagcttctggtccttttgaccagttagttctgcacctggaagatgccaaaacattccaatcttgttcatcaagtggtacttttaaactgttattggctggggatggaaaagactcttcctggtttaccaaatccaccttgcagagatttttgcatatcataagttcatttgatacatcaaaatcggtcaatggagttttagacgagatgtcacagctggaggaaacaagaaagtttcatcaatcactttatgttaaggagcaacagaatgttattagtggcgctttaacaggaggtttatttggtactggtgccatagcacagcagggaaatgatgggccaaattcatcggatacgacaaagaatgaattgcttcgagcactggatttgagattaactgcactgaaggaagagatcttggtcgtattgaaccgagcagttggatccaatttatcggcaagagaaatatctgatttatctgcttttgttcagcgatttggaacatcagagttttgttggttgatgcggtgtacgttgttgatatcggattgtaagccctctgagctcccactacagcagaattctacaactgagaaagttgacaaggatgagaatgcacataaaccttgcatcagtcctcagactaatcttcagatgcccattgccaataatgtatctccagcaaagcttgcacaaattgagcgtgagagctcaacagaaagtgatgattcctctgaatccagtgatgaaggtgaggccattgttgaaaggagccgtcctcttgtaagatctgcttcacctagaagatctgcttctccaatgcggagggttcaaattgggagatcaggatcacgtcgttcaacagcaattgctatcaagagcctcagttacttccctcctagtcagaggattcctatggataaagatgatgaaagtagtaccttcaatggtgaaactgatcagccaccaaagaaatctgacactaacgttagaaggatgagtgttcaggatgcaattaacctttttgagagcaagcagaaggatcagaatccagattcacaaaataagaaagctggcttgtttgccactaagtctgtcttgagaaggtggagtgcaggaatgggtgattctttgaatgaaaactcagaaggaaaagtctcagattccacatctgaaagtaaatcaaacaacatagcttctgaaactgagaaggttgaagctgaaatgaaggctgaactaggtaacataccaaatttttttgttacacctgaggctgaagatttaactttccatgctaattctcatgagattagagtgtcagaaacggagagtgctgtttgtagtaatgtttgtgcagaacaagcaaagcctggtctggaggaaagcagtgatcgggcaatggcctccgctgagtggaatcgccagaaggaagccgagcttaatcagatgttattgaaaatgatggaagtcatgcctgggaaatttgcgggtgctaatgccaccgctacaggtctcagttccaccaatcagcaaaaagctgtatctcatggccagcatacagagaagcgagacacaaaagtcagaactgagaaaggcacaaggcgaccagcaaaggaaccaagcaccaagcccttgaaggaaacagctgggaagaataaaccagcaatgacctcgaaatctggctcttcaacagagagacgtatttcaccagttccacaaagggcgcggcgaaattcatcacctccagtcctaccgaaagaagtagcatcaaagacaccaccagtcaggaaaagctcaccgaaaccatcacctgcacctgcatctgtgcctactacacgtagttcatggtcaggtggttctttgactaaagcaactacaacacaaaaaactaaaaggtctcctgggatggcttcaacgtccacacaaactagccgaaggactccaacaacgccctcgtcgtctcagccagcttcaaaagcggaaagggccattcaatcagtgaagaacaagaaggaaaccattactgctaccaagccagctataaagggacaagaagagaagaagaccaaaacagcaacaaagacaagcagaataactaaagtttcaccttcagaagaaaaatcaggtgtaaaaacgaagcaaagcttgcaaaaggtttcaaataaaagcagtgttgtacctcttgagtccaaaaccttgaagaaaaccactggaattagtcagagcattaggtctggtatggtgaagaataaggtaccccaacctaatgacttctcaaaagataccggaagtgttaaccaagctgaagataaggagcaatctcctgtgacaaccgagccaactactaaggtactggaggctgatcttgctcaaccagcacatgatgttgatgaaaatttagaaatttcgctcgataatgacttgaatattgaaaaaacagagaaaccggcctcgagtttaactgcaacagaaatgggctccagtatccaagttgaaccctctacggatgagttagatgaggccatacaacctcctgacgatgacatgggcatctcatcatctgcgtgggtagaagtagagcgtcaagaactagaagtcactgtttcgagtgaaaatgtagttgttgaggatgtaacttctccaggaattgcaccattgccgtcatcaagcccaagagtgcgtcattcgttgtcacaaatgctgcaagcagatagcaatgaaccagaaattattgagtggggaaatgctgaaaacccacccgcaatagtttttcataaggattctccaaaaggattcaagaggcttctaaagtttgctcgaaaaaacaagggagacaacaatgctaacggctgggcaagcccctcggtagtttcagaaggagaagatgaactagaagaaccaagaggcactagtgatggtacaaattcaagcaggagaacttttgatggttcaaagactaatagcatcttatcagctcaatcaactaccggcagcttcaactctttgaactcggataagctacgggagagatcaggtgctgccacatcaacaagagcatcaaggtcgttcttctcactctcaaacttccggagcagcaggtcaaatgagtcgaagcttcgatagtgtctgccttgtttgtccagcagatacatgggtagttcatctccgctcccattcaggacgtctagacttaaaaatggtttgagatttgattgttcggacggagccagcttgctgtgtttcgctctagtcacctgacatttgatatatagatagcttctgcctatgagatgccatacttcgcttctgccgtcctgtacatttctatattttactgcattgggtgcgagctgattgagacgaccgatatgtttgcatggcttgcaagagatttgcttcgaccaaaagccctttgctgtcaatagtttgtaccgaaaattgtcatgagcaacaacattaggaatgatgtaagttgtcacatttttttttgacgagaggaggaccccatttctattattgtcataacagaaatacaaagcggttcagatagtttccacactacaacgcaaaataacaggaagaacccgcaaacagaagcgctgacgagccaatccgcttcggatggctcagaacagccgagtcccctaccaggcaacatgccaaccgacgagtttagagttttacatcacacaagtaccagaccatacggcggaggatggcaagggcataacagacgacagcaaaatagagcgagtttctgacaaagctaacaccagacgagcagtcacgtcatgactcaacgcccgtgtggctgcagcatcccttctatctcatcgcccgacccgaggatccgatttcctctagcacttgcaccacgaaccagcatcttggcgccctcttgcagaaggtcctggagctctttcttgctaagccctata

SEQ ID NO: 81062 - DNA, 4540 bp, Zea Mays
cttttctcatcggggttgattttaaagcactgatggaaatgttcaccaggttagtgtaaaccaaacagtccatgtgccgcacggaacgcctccccgccgaccgacgggaccccaggcagcacggagcacgggcacacggacacgaaaacgaaacaccacaccgtgtcagttcccccactacattcctccgccatttaaacgcgggttccccgtttgtcccttttcctcgcgtccaccactccacctccatccatcactggagctccccagaaaaaaaggcaccaggcaattcccgattagcatctcgaattcgcgatatgacctgcggcggcgtcagaccggatgcgggaagctagtgttccattccatctggttcctgaggtttatctgttcttcgtattgtttgcagggctttgaagtagataaggagctgactgtttatatcagttccagtgttgaaagtggcaactattaacgtgtgcataagcaaaatggatagggaacttgctagcgacatggagcttgattctgttgtcttccaagtatcctcgcctgacaacaggtatgaagcaattgcttgcagtaagggaaaaacagaactgatagcttctggtccttttgaccagttagttctgcacctggaagatgccaaaacattccaatcttgttcatcaagtggtacttttaaactgttattggctggggatggaaaagactcttcctggtttaccaaatccaccttgcagagatttttgcatatcataagttcatttgatacatcaaaatcggtcaatggagttttagacgagatgtcacagctggaggaaacaagaaagtttcatcaatcactttatgttaaggagcaacagaatgttattagtggcgctttaacaggaggtttatttggtactggtgccatagcacagcagggaaatgatgggccaaattcatcggatacgacaaagaatgaattgcttcgagcactggatttgagattaactgcactgaaggaagagatcttggtcgtattgaaccgagcagttggatccaatttatcggcaagagaaatatctgatttatctgcttttgttcagcgatttggaacatcagagttttgttggttgatgcggtgtacgttgttgatatcggattgtaagccctctgagctcccactacagcagaattctacaactgagaaagttgacaaggatgagaatgcacataaaccttgcatcagtcctcagactaatcttcagatgcccattgccaataatgtatctccagcaaagcttgcacaaattgagcgtgagagctcaacagaaagtgatgattcctctgaatccagtgatgaaggtgaggccattgttgaaaggagccgtcctcttgtaagatctgcttcacctagaagatctgcttctccaatgcggagggttcaaattgggagatcaggatcacgtcgttcaacagcaattgctatcaagagcctcagttacttccctcctagtcagaggattcctatggataaagatgatgaaagtagtaccttcaatggtgaaactgatcagccaccaaagaaatctgacactaacgttagaaggatgagtgttcaggatgcaattaacctttttgagagcaagcagaaggatcagaatccagattcacaaaataagaaagctggcttgtttgccactaagtctgtcttgagaaggtggagtgcaggaatgggtgattctttgaatgaaaactcagaaggaaaagtctcagattccacatctgaaagtaaatcaaacaacatagcttctgaaactgagaaggttgaagctgaaatgaaggctgaactaggtaacataccaaatttttttgttacacctgaggctgaagatttaactttccatgctaattctcatgagattagagtgtcagaaacggagagtgctgtttgtagtaatgtttgtgcagaacaagcaaagcctggtctggaggaaagcagtgatcgggcaatggcctccgctgagtggaatcgccagaaggaagccgagcttaatcagatgttattgaaaatgatggaagtcatgcctgggaaatttgcgggtgctaatgccaccgctacaggtctcagttccaccaatcagcaaaaagctgtatctcatggccagcatacagagaagcgagacacaaaagtcagaactgagaaaggcacaaggcgaccagcaaaggaaccaagcaccaagcccttgaaggaaacagctgggaagaataaaccagcaatgacctcgaaatctggctcttcaacagagagacgtatttcaccagttccacaaagggcgcggcgaaattcatcacctccagtcctaccgaaagaagtagcatcaaagacaccaccagtcaggaaaagctcaccgaaaccatcacctgcacctgcatctgtgcctactacacgtagttcatggtcaggtggttctttgactaaagcaactacaacacaaaaaactaaaaggtctcctgggatggcttcaacgtccacacaaactagccgaaggactccaacaacgccctcgtcgtctcagccagcttcaaaagcggaaagggccattcaatcagtgaagaacaagaaggaaaccattactgctaccaagccagctataaagggacaagaagagaagaagaccaaaacagcaacaaagacaagcagaataactaaagtttcaccttcagaagaaaaatcaggtgtaaaaacgaagcaaagcttgcaaaaggtttcaaataaaagcagtgttgtacctcttgagtccaaaaccttgaagaaaaccactggaattagtcagagcattaggtctggtatggtgaagaataaggtaccccaacctaatgacttctcaaaagataccggaagtgttaaccaagctgaagataaggagcaatctcctgtgacaaccgagccaactactaaggtactggaggctgatcttgctcaaccagcacatgatgttgatgaaaatttagaaatttcgctcgataatgacttgaatattgaaaaaacagagaaaccggcctcgagtttaactgcaacagaaatgggctccagtatccaagttgaaccctctacggatgagttagatgaggccatacaacctcctgacgatgacatgggcatctcatcatctgcgtgggtagaagtagagcgtcaagaactagaagtcactgtttcgagtgaaaatgtagttgttgaggatgtaacttctccaggaattgcaccattgccgtcatcaagcccaagagtgcgtcattcgttgtcacaaatgctgcaagcagatagcaatgaaccagaaattattgagtggggaaatgctgaaaacccacccgcaatagtttttcataaggattctccaaaaggattcaagaggcttctaaagtttgctcgaaaaaacaagggagacaacaatgctaacggctgggcaagcccctcggtagtttcagaaggagaagatgaactagaagaaccaagaggcactagtgatggtacaaattcaagcaggagaacttttgatggttcaaagactaatagcatcttatcagctcaatcaactaccggcagcttcaactctttgaactcggataagctacgggagagatcaggtgctgccacatcaacaagagcatcaaggtcgttcttctcactctcaaacttccggagcagcaggtcaaatgagtcgaagcttcgatagtgtctgccttgtttgtccagcagatacatgggtagttcatctccgctcccattcaggacgtctagacttaaaaatggtttgagatttgattgttcggacggagccagcttgctgtgtttcgctctagtcacctgacatttgatatatagatagcttctgcctatgagatgccatacttcgcttctgccgtcctgtacatttctatattttactgcattgggtgcgagctgattgagacgaccgatatgtttgcatggcttgcaagagatttgcttcgaccaaaagccctttgctgtcaatagtttgtaccgaaaattgtcatgagcaacaacattaggaatgatgtaagttgtcacatttttttttgacgagaggaggaccccatttctattattgtcataacagaaatacaaagcggttcagatagtttccacactacaacgcaaaataacaggaagaacccgcaaacagaagcgctgacgagccaatccgcttcggatggctcagaacagccgagtcccctaccaggcaacatgccaaccgacgagtttagagttttacatcacacaagtaccagaccatacggcggaggatggcaagggcataacagacgacagcaaaatagagcgagtttctgacaaagctaacaccagacgagcagtcacgtcatgactcaacgcccgtgtggctgcagcatcccttctatctcatcgcccgacccgaggatccgatttcctctagcacttgcaccacgaaccagcatcttggcgccctcttgcagaaggtcctggagctctttcttgctaagccctata

SEQ ID NO: 81063 - DNA, 4145 bp, Zea Mays
cgaaaacgaaacaccacaccgtgtcagttcccccactacattcctccgccatttaaacgcgggttccccgtttgtcccttttcctcgcgtccaccactccacctccatccatcactggagctccccagaaaaaaaggcaccaggcaattcccgattagcatctcgaattcgcgatatgacctgcggcggcgtcagaccggatgcgggaagctagtgttccattccatctgggctttgaagtagataaggagctgactgtttatatcagttccagtgttgaaagtggcaactattaacgtgtgcataagcaaaatggatagggaacttgctagcgacatggagcttgattctgttgtcttccaagtatcctcgcctgacaacaggtatgaagcaattgcttgcagtaagggaaaaacagaactgatagcttctggtccttttgaccagttagttctgcacctggaagatgccaaaacattccaatcttgttcatcaagtggtacttttaaactgttattggctggggatggaaaagactcttcctggtttaccaaatccaccttgcagaggaatgaattgcttcgagcactggatttgagattaactgcactgaaggaagagatcttggtcgtattgaaccgagcagttggatccaatttatcggcaagagaaatatctgatttatctgcttttgttcagcgatttggaacatcagagttttgttggttgatgcggtgtacgttgttgatatcggattgtaagccctctgagctcccactacagcagaattctacaactgagaaagttgacaaggatgagaatgcacataaaccttgcatcagtcctcagactaatcttcagatgcccattgccaataatgtatctccagcaaagcttgcacaaattgagcgtgagagctcaacagaaagtgatgattcctctgaatccagtgatgaaggtgaggccattgttgaaaggagccgtcctcttgtaagatctgcttcacctagaagatctgcttctccaatgcggagggttcaaattgggagatcaggatcacgtcgttcaacagcaattgctatcaagagcctcagttacttccctcctagtcagaggattcctatggataaagatgatgaaagtagtaccttcaatggtgaaactgatcagccaccaaagaaatctgacactaacgttagaaggatgagtgttcaggatgcaattaacctttttgagagcaagcagaaggatcagaatccagattcacaaaataagaaagctggcttgtttgccactaagtctgtcttgagaaggtggagtgcaggaatgggtgattctttgaatgaaaactcagaaggaaaagtctcagattccacatctgaaagtaaatcaaacaacatagcttctgaaactgagaaggttgaagctgaaatgaaggctgaactaggtaacataccaaatttttttgttacacctgaggctgaagatttaactttccatgctaattctcatgagattagagtgtcagaaacggagagtgctgtttgtagtaatgtttgtgcagaacaagcaaagcctggtctggaggaaagcagtgatcgggcaatggcctccgctgagtggaatcgccagaaggaagccgagcttaatcagatgttattgaaaatgatggaagtcatgcctgggaaatttgcgggtgctaatgccaccgctacaggtctcagttccaccaatcagcaaaaagctgtatctcatggccagcatacagagaagcgagacacaaaagtcagaactgagaaaggcacaaggcgaccagcaaaggaaccaagcaccaagcccttgaaggaaacagctgggaagaataaaccagcaatgacctcgaaatctggctcttcaacagagagacgtatttcaccagttccacaaagggcgcggcgaaattcatcacctccagtcctaccgaaagaagtagcatcaaagacaccaccagtcaggaaaagctcaccgaaaccatcacctgcacctgcatctgtgcctactacacgtagttcatggtcaggtggttctttgactaaagcaactacaacacaaaaaactaaaaggtctcctgggatggcttcaacgtccacacaaactagccgaaggactccaacaacgccctcgtcgtctcagccagcttcaaaagcggaaagggccattcaatcagtgaagaacaagaaggaaaccattactgctaccaagccagctataaagggacaagaagagaagaagaccaaaacagcaacaaagacaagcagaataactaaagtttcaccttcagaagaaaaatcaggtgtaaaaacgaagcaaagcttgcaaaaggtttcaaataaaagcagtgttgtacctcttgagtccaaaaccttgaagaaaaccactggaattagtcagagcattaggtctggtatggtgaagaataaggtaccccaacctaatgacttctcaaaagataccggaagtgttaaccaagctgaagataaggagcaatctcctgtgacaaccgagccaactactaaggtactggaggctgatcttgctcaaccagcacatgatgttgatgaaaatttagaaatttcgctcgataatgacttgaatattgaaaaaacagagaaaccggcctcgagtttaactgcaacagaaatgggctccagtatccaagttgaaccctctacggatgagttagatgaggccatacaacctcctgacgatgacatgggcatctcatcatctgcgtgggtagaagtagagcgtcaagaactagaagtcactgtttcgagtgaaaatgtagttgttgaggatgtaacttctccaggaattgcaccattgccgtcatcaagcccaagagtgcgtcattcgttgtcacaaatgctgcaagcagatagcaatgaaccagaaattattgagtggggaaatgctgaaaacccacccgcaatagtttttcataaggattctccaaaaggattcaagaggcttctaaagtttgctcgaaaaaacaagggagacaacaatgctaacggctgggcaagcccctcggtagtttcagaaggagaagatgaactagaagaaccaagaggcactagtgatggtacaaattcaagcaggagaacttttgatggttcaaagactaatagcatcttatcagctcaatcaactaccggcagcttcaactctttgaactcggataagctacgggagagatcaggtgctgccacatcaacaagagcatcaaggtcgttcttctcactctcaaacttccggagcagcaggtcaaatgagtcgaagcttcgatagtgtctgccttgtttgtccagcagatacatgggtagttcatctccgctcccattcaggacgtctagacttaaaaatggtttgagatttgattgttcggacggagccagcttgctgtgtttcgctctagtcacctgacatttgatatatagatagcttctgcctatgagatgccatacttcgcttctgccgtcctgtacatttctatattttactgcattgggtgcgagctgattgagacgaccgatatgtttgcatggcttgcaagagatttgcttcgaccaaaagccctttgctgtcaatagtttgtaccgaaaattgtcatgagcaacaacattaggaatgatgtaagttgtcacatttttttttgacgagaggaggaccccatttctattattgtcataacagaaatacaaagcggttcagatagtttccacactacaacgcaaaataacaggaagaacccgcaaacagaagcgctgacgagccaatccgcttcggatggctcagaacagccgagtcccctaccaggcaacatgccaaccgacgagtttagagttttacatcacacaagtaccagaccatacggcggaggatggcaagggcataacagacgacagcaaaatagagcgagtttctgacaaagctaacaccagacgagcagtcacgtcatgactcaacgcccgtgtggctgcagcatcccttctatctcatcgcccgacccgaggatccgatttcctctagcacttgcaccacgaaccagcatcttggcgccctcttgcagaaggtcctggagctctttcttgctaagccctata

SEQ ID NO: 81064 - DNA, 3771 bp, Zea Mays
ctacattcctccgccatttaaacgcgggttccccgtttgtcccttttcctcgcgtccaccactccacctccatccatcactggagctccccagaaaaaaaggcaccaggcaattcccgattagcatctcgaattcgcgatatgacctgcggcggcgtcagaccggatgcgggaagctagtgttccattccatctgggctttgaagtagataaggagctgactgtttatatcagttccagtgttgaaagtggcaactattaacgtgtgcataagcaaaatggatagggaacttgctagcgacatggagcttgattctgttgtcttccaagtatcctcgcctgacaacagttggttgatgcggtgtacgttgttgatatcggattgtaagccctctgagctcccactacagcagaattctacaactgagaaagttgacaaggatgagaatgcacataaaccttgcatcagtcctcagactaatcttcagatgcccattgccaataatgtatctccagcaaagcttgcacaaattgagcgtgagagctcaacagaaagtgatgattcctctgaatccagtgatgaaggtgaggccattgttgaaaggagccgtcctcttgtaagatctgcttcacctagaagatctgcttctccaatgcggagggttcaaattgggagatcaggatcacgtcgttcaacagcaattgctatcaagagcctcagttacttccctcctagtcagaggattcctatggataaagatgatgaaagtagtaccttcaatggtgaaactgatcagccaccaaagaaatctgacactaacgttagaaggatgagtgttcaggatgcaattaacctttttgagagcaagcagaaggatcagaatccagattcacaaaataagaaagctggcttgtttgccactaagtctgtcttgagaaggtggagtgcaggaatgggtgattctttgaatgaaaactcagaaggaaaagtctcagattccacatctgaaagtaaatcaaacaacatagcttctgaaactgagaaggttgaagctgaaatgaaggctgaactaggtaacataccaaatttttttgttacacctgaggctgaagatttaactttccatgctaattctcatgagattagagtgtcagaaacggagagtgctgtttgtagtaatgtttgtgcagaacaagcaaagcctggtctggaggaaagcagtgatcgggcaatggcctccgctgagtggaatcgccagaaggaagccgagcttaatcagatgttattgaaaatgatggaagtcatgcctgggaaatttgcgggtgctaatgccaccgctacaggtctcagttccaccaatcagcaaaaagctgtatctcatggccagcatacagagaagcgagacacaaaagtcagaactgagaaaggcacaaggcgaccagcaaaggaaccaagcaccaagcccttgaaggaaacagctgggaagaataaaccagcaatgacctcgaaatctggctcttcaacagagagacgtatttcaccagttccacaaagggcgcggcgaaattcatcacctccagtcctaccgaaagaagtagcatcaaagacaccaccagtcaggaaaagctcaccgaaaccatcacctgcacctgcatctgtgcctactacacgtagttcatggtcaggtggttctttgactaaagcaactacaacacaaaaaactaaaaggtctcctgggatggcttcaacgtccacacaaactagccgaaggactccaacaacgccctcgtcgtctcagccagcttcaaaagcggaaagggccattcaatcagtgaagaacaagaaggaaaccattactgctaccaagccagctataaagggacaagaagagaagaagaccaaaacagcaacaaagacaagcagaataactaaagtttcaccttcagaagaaaaatcaggtgtaaaaacgaagcaaagcttgcaaaaggtttcaaataaaagcagtgttgtacctcttgagtccaaaaccttgaagaaaaccactggaattagtcagagcattaggtctggtatggtgaagaataaggtaccccaacctaatgacttctcaaaagataccggaagtgttaaccaagctgaagataaggagcaatctcctgtgacaaccgagccaactactaaggtactggaggctgatcttgctcaaccagcacatgatgttgatgaaaatttagaaatttcgctcgataatgacttgaatattgaaaaaacagagaaaccggcctcgagtttaactgcaacagaaatgggctccagtatccaagttgaaccctctacggatgagttagatgaggccatacaacctcctgacgatgacatgggcatctcatcatctgcgtgggtagaagtagagcgtcaagaactagaagtcactgtttcgagtgaaaatgtagttgttgaggatgtaacttctccaggaattgcaccattgccgtcatcaagcccaagagtgcgtcattcgttgtcacaaatgctgcaagcagatagcaatgaaccagaaattattgagtggggaaatgctgaaaacccacccgcaatagtttttcataaggattctccaaaaggattcaagaggcttctaaagtttgctcgaaaaaacaagggagacaacaatgctaacggctgggcaagcccctcggtagtttcagaaggagaagatgaactagaagaaccaagaggcactagtgatggtacaaattcaagcaggagaacttttgatggttcaaagactaatagcatcttatcagctcaatcaactaccggcagcttcaactctttgaactcggataagctacgggagagatcaggtgctgccacatcaacaagagcatcaaggtcgttcttctcactctcaaacttccggagcagcaggtcaaatgagtcgaagcttcgatagtgtctgccttgtttgtccagcagatacatgggtagttcatctccgctcccattcaggacgtctagacttaaaaatggtttgagatttgattgttcggacggagccagcttgctgtgtttcgctctagtcacctgacatttgatatatagatagcttctgcctatgagatgccatacttcgcttctgccgtcctgtacatttctatattttactgcattgggtgcgagctgattgagacgaccgatatgtttgcatggcttgcaagagatttgcttcgaccaaaagccctttgctgtcaatagtttgtaccgaaaattgtcatgagcaacaacattaggaatgatgtaagttgtcacatttttttttgacgagaggaggaccccatttctattattgtcataacagaaatacaaagcggttcagatagtttccacactacaacgcaaaataacaggaagaacccgcaaacagaagcgctgacgagccaatccgcttcggatggctcagaacagccgagtcccctaccaggcaacatgccaaccgacgagtttagagttttacatcacacaagtaccagaccatacggcggaggatggcaagggcataacagacgacagcaaaatagagcgagtttctgacaaagctaacaccagacgagcagtcacgtcatgactcaacgcccgtgtggctgcagcatcccttctatctcatcgcccgacccgaggatccgatttcctctagcacttgcaccacgaaccagcatcttggcgccctcttgcagaaggtcctggagctctttcttgctaagccctata

SEQ ID NO: 81065 - DNA, 4452 bp, Zea Mays
ccttttcctcgcgtccaccactccacctccatccatcactggagctccccagaaaaaaaggcaccaggcaattcccgattagcatctcgaattcgcgatatgacctgcggcggcgtcagaccggatgcgggaagctagtgttccattccatctggttcctgaggtttatctgttcttcgtattgtttgcagggctttgaagtagataaggagctgactgtttatatcagttccagtgttgaaagtggcaactattaacgtgtgcataagcaaaatggatagggaacttgctagcgacatggagcttgattctgttgtcttccaagtatcctcgcctgacaacaggcccctgtttggaatgtagtgcttagattttttgaaacggaccggtcccaaccccaagaagaggttccacacatcttaaaagtttgaaggaactttgcctcggttttttcactgcatctagtcgagcacagtatgaagcaattgcttgcagtaagggaaaaacagaactgatagcttctggtccttttgaccagttagttctgcacctggaagatgccaaaacattccaatcttgttcatcaagtggtacttttaaactgttattggctggggatggaaaagactcttcctggtttaccaaatccaccttgcagagatttttgcatatcataagttcatttgatacatcaaaatcggtcaatggagttttagacgagatgtcacagctggaggaaacaagaaagtttcatcaatcactttatgttaaggagcaacagaatgttattagtggcgctttaacaggaggtttatttggtactggtgccatagcacagcagggaaatgatgggccaaattcatcggatacgacaaagaatgaattgcttcgagcactggatttgagattaactgcactgaaggaagagatcttggtcgtattgaaccgagcagttggatccaatttatcggcaagagaaatatctgatttatctgcttttgttcagcgatttggaacatcagagttttgttggttgatgcggtgtacgttgttgatatcggattgtaagccctctgagctcccactacagcagaattctacaactgagaaagttgacaaggatgagaatgcacataaaccttgcatcagtcctcagactaatcttcagatgcccattgccaataatgtatctccagcaaagcttgcacaaattgagcgtgagagctcaacagaaagtgatgattcctctgaatccagtgatgaaggtgaggccattgttgaaaggagccgtcctcttgtaagatctgcttcacctagaagatctgcttctccaatgcggagggttcaaattgggagatcaggatcacgtcgttcaacagcaattgctatcaagagcctcagttacttccctcctagtcagaggattcctatggataaagatgatgaaagtagtaccttcaatggtgaaactgatcagccaccaaagaaatctgacactaacgttagaaggatgagtgttcaggatgcaattaacctttttgagagcaagcagaaggatcagaatccagattcacaaaataagaaagctggcttgtttgccactaagtctgtcttgagaaggtggagtgcaggaatgggtgattctttgaatgaaaactcagaaggaaaagtctcagattccacatctgaaagtaaatcaaacaacatagcttctgaaactgagaaggttgaagctgaaatgaaggctgaactaggtaacataccaaatttttttgttacacctgaggctgaagatttaactttccatgctaattctcatgagattagagtgtcagaaacggagagtgctgtttgtagtaatgtttgtgcagaacaagcaaagcctggtctggaggaaagcagtgatcgggcaatggcctccgctgagtggaatcgccagaaggaagccgagcttaatcagatgttattgaaaatgatggaagtcatgcctgggaaatttgcgggtgctaatgccaccgctacaggtctcagttccaccaatcagcaaaaagctgtatctcatggccagcatacagagaagcgagacacaaaagtcagaactgagaaaggcacaaggcgaccagcaaaggaaccaagcaccaagcccttgaaggaaacagctgggaagaataaaccagcaatgacctcgaaatctggctcttcaacagagagacgtatttcaccagttccacaaagggcgcggcgaaattcatcacctccagtcctaccgaaagaagtagcatcaaagacaccaccagtcaggaaaagctcaccgaaaccatcacctgcacctgcatctgtgcctactacacgtagttcatggtcaggtggttctttgactaaagcaactacaacacaaaaaactaaaaggtctcctgggatggcttcaacgtccacacaaactagccgaaggactccaacaacgccctcgtcgtctcagccagcttcaaaagcggaaagggccattcaatcagtgaagaacaagaaggaaaccattactgctaccaagccagctataaagggacaagaagagaagaagaccaaaacagcaacaaagacaagcagaataactaaagtttcaccttcagaagaaaaatcaggtgtaaaaacgaagcaaagcttgcaaaaggtttcaaataaaagcagtgttgtacctcttgagtccaaaaccttgaagaaaaccactggaattagtcagagcattaggtctggtatggtgaagaataaggtaccccaacctaatgacttctcaaaagataccggaagtgttaaccaagctgaagataaggagcaatctcctgtgacaaccgagccaactactaaggtactggaggctgatcttgctcaaccagcacatgatgttgatgaaaatttagaaatttcgctcgataatgacttgaatattgaaaaaacagagaaaccggcctcgagtttaactgcaacagaaatgggctccagtatccaagttgaaccctctacggatgagttagatgaggccatacaacctcctgacgatgacatgggcatctcatcatctgcgtgggtagaagtagagcgtcaagaactagaagtcactgtttcgagtgaaaatgtagttgttgaggatgtaacttctccaggaattgcaccattgccgtcatcaagcccaagagtgcgtcattcgttgtcacaaatgctgcaagcagatagcaatgaaccagaaattattgagtggggaaatgctgaaaacccacccgcaatagtttttcataaggattctccaaaaggattcaagaggcttctaaagtttgctcgaaaaaacaagggagacaacaatgctaacggctgggcaagcccctcggtagtttcagaaggagaagatgaactagaagaaccaagaggcactagtgatggtacaaattcaagcaggagaacttttgatggttcaaagactaatagcatcttatcagctcaatcaactaccggcagcttcaactctttgaactcggataagctacgggagagatcaggtgctgccacatcaacaagagcatcaaggtcgttcttctcactctcaaacttccggagcagcaggtcaaatgagtcgaagcttcgatagtgtctgccttgtttgtccagcagatacatgggtagttcatctccgctcccattcaggacgtctagacttaaaaatggtttgagatttgattgttcggacggagccagcttgctgtgtttcgctctagtcacctgacatttgatatatagatagcttctgcctatgagatgccatacttcgcttctgccgtcctgtacatttctatattttactgcattgggtgcgagctgattgagacgaccgatatgtttgcatggcttgcaagagatttgcttcgaccaaaagccctttgctgtcaatagtttgtaccgaaaattgtcatgagcaacaacattaggaatgatgtaagttgtcacatttttttttgacgagaggaggaccccatttctattattgtcataacagaaatacaaagcggttcagatagtttccacactacaacgcaaaataacaggaagaacccgcaaacagaagcgctgacgagccaatccgcttcggatggctcagaacagccgagtcccctaccaggcaacatgccaaccgacgagtttagagttttacatcacacaagtaccagaccatacggcggaggatggcaagggcataacagacgacagcaaaatagagcgagtttctgacaaagctaacaccagacgagcagtcacgtcatgactcaacgcccgtgtggctgcagcatcccttctatctcatcgcccgacccgaggatccgatttcctctagcacttgcaccacgaaccagcatcttggcgccctcttgcagaaggtcctggagctctttcttgctaagccctata

SEQ ID NO: 81066 - DNA, 4182 bp, Zea Mays
tctcccctcttctggattgcgtattccctcggttgatgtagaaaatgactgggctttgaagtagataaggagctgactgtttatatcagttccagtgttgaaagtggcaactattaacgtgtgcataagcaaaatggatagggaacttgctagcgacatggagcttgattctgttgtcttccaagtatcctcgcctgacaacaggtatgaagcaattgcttgcagtaagggaaaaacagaactgatagcttctggtccttttgaccagttagttctgcacctggaagatgccaaaacattccaatcttgttcatcaagtggtacttttaaactgttattggctggggatggaaaagactcttcctggtttaccaaatccaccttgcagagatttttgcatatcataagttcatttgatacatcaaaatcggtcaatggagttttagacgagatgtcacagctggaggaaacaagaaagtttcatcaatcactttatgttaaggagcaacagaatgttattagtggcgctttaacaggaggtttatttggtactggtgccatagcacagcagggaaatgatgggccaaattcatcggatacgacaaagaatgaattgcttcgagcactggatttgagattaactgcactgaaggaagagatcttggtcgtattgaaccgagcagttggatccaatttatcggcaagagaaatatctgatttatctgcttttgttcagcgatttggaacatcagagttttgttggttgatgcggtgtacgttgttgatatcggattgtaagccctctgagctcccactacagcagaattctacaactgagaaagttgacaaggatgagaatgcacataaaccttgcatcagtcctcagactaatcttcagatgcccattgccaataatgtatctccagcaaagcttgcacaaattgagcgtgagagctcaacagaaagtgatgattcctctgaatccagtgatgaaggtgaggccattgttgaaaggagccgtcctcttgtaagatctgcttcacctagaagatctgcttctccaatgcggagggttcaaattgggagatcaggatcacgtcgttcaacagcaattgctatcaagagcctcagttacttccctcctagtcagaggattcctatggataaagatgatgaaagtagtaccttcaatggtgaaactgatcagccaccaaagaaatctgacactaacgttagaaggatgagtgttcaggatgcaattaacctttttgagagcaagcagaaggatcagaatccagattcacaaaataagaaagctggcttgtttgccactaagtctgtcttgagaaggtggagtgcaggaatgggtgattctttgaatgaaaactcagaaggaaaagtctcagattccacatctgaaagtaaatcaaacaacatagcttctgaaactgagaaggttgaagctgaaatgaaggctgaactaggtaacataccaaatttttttgttacacctgaggctgaagatttaactttccatgctaattctcatgagattagagtgtcagaaacggagagtgctgtttgtagtaatgtttgtgcagaacaagcaaagcctggtctggaggaaagcagtgatcgggcaatggcctccgctgagtggaatcgccagaaggaagccgagcttaatcagatgttattgaaaatgatggaagtcatgcctgggaaatttgcgggtgctaatgccaccgctacaggtctcagttccaccaatcagcaaaaagctgtatctcatggccagcatacagagaagcgagacacaaaagtcagaactgagaaaggcacaaggcgaccagcaaaggaaccaagcaccaagcccttgaaggaaacagctgggaagaataaaccagcaatgacctcgaaatctggctcttcaacagagagacgtatttcaccagttccacaaagggcgcggcgaaattcatcacctccagtcctaccgaaagaagtagcatcaaagacaccaccagtcaggaaaagctcaccgaaaccatcacctgcacctgcatctgtgcctactacacgtagttcatggtcaggtggttctttgactaaagcaactacaacacaaaaaactaaaaggtctcctgggatggcttcaacgtccacacaaactagccgaaggactccaacaacgccctcgtcgtctcagccagcttcaaaagcggaaagggccattcaatcagtgaagaacaagaaggaaaccattactgctaccaagccagctataaagggacaagaagagaagaagaccaaaacagcaacaaagacaagcagaataactaaagtttcaccttcagaagaaaaatcaggtgtaaaaacgaagcaaagcttgcaaaaggtttcaaataaaagcagtgttgtacctcttgagtccaaaaccttgaagaaaaccactggaattagtcagagcattaggtctggtatggtgaagaataaggtaccccaacctaatgacttctcaaaagataccggaagtgttaaccaagctgaagataaggagcaatctcctgtgacaaccgagccaactactaaggtactggaggctgatcttgctcaaccagcacatgatgttgatgaaaatttagaaatttcgctcgataatgacttgaatattgaaaaaacagagaaaccggcctcgagtttaactgcaacagaaatgggctccagtatccaagttgaaccctctacggatgagttagatgaggccatacaacctcctgacgatgacatgggcatctcatcatctgcgtgggtagaagtagagcgtcaagaactagaagtcactgtttcgagtgaaaatgtagttgttgaggatgtaacttctccaggaattgcaccattgccgtcatcaagcccaagagtgcgtcattcgttgtcacaaatgctgcaagcagatagcaatgaaccagaaattattgagtggggaaatgctgaaaacccacccgcaatagtttttcataaggattctccaaaaggattcaagaggcttctaaagtttgctcgaaaaaacaagggagacaacaatgctaacggctgggcaagcccctcggtagtttcagaaggagaagatgaactagaagaaccaagaggcactagtgatggtacaaattcaagcaggagaacttttgatggttcaaagactaatagcatcttatcagctcaatcaactaccggcagcttcaactctttgaactcggataagctacgggagagatcaggtgctgccacatcaacaagagcatcaaggtcgttcttctcactctcaaacttccggagcagcaggtcaaatgagtcgaagcttcgatagtgtctgccttgtttgtccagcagatacatgggtagttcatctccgctcccattcaggacgtctagacttaaaaatggtttgagatttgattgttcggacggagccagcttgctgtgtttcgctctagtcacctgacatttgatatatagatagcttctgcctatgagatgccatacttcgcttctgccgtcctgtacatttctatattttactgcattgggtgcgagctgattgagacgaccgatatgtttgcatggcttgcaagagatttgcttcgaccaaaagccctttgctgtcaatagtttgtaccgaaaattgtcatgagcaacaacattaggaatgatgtaagttgtcacatttttttttgacgagaggaggaccccatttctattattgtcataacagaaatacaaagcggttcagatagtttccacactacaacgcaaaataacaggaagaacccgcaaacagaagcgctgacgagccaatccgcttcggatggctcagaacagccgagtcccctaccaggcaacatgccaaccgacgagtttagagttttacatcacacaagtaccagaccatacggcggaggatggcaagggcataacagacgacagcaaaatagagcgagtttctgacaaagctaacaccagacgagcagtcacgtcatgactcaacgcccgtgtggctgcagcatcccttctatctcatcgcccgacccgaggatccgatttcctctagcacttgcaccacgaaccagcatcttggcgccctcttgcagaaggtcctggagctctttcttgctaagccctata

SEQ ID NO: 81067 - DNA, 3864 bp, Zea Mays
aaacgtttgattccttcacacacccgcacacatacacacactcgtcccttccctccccctccatctccattctccaatctccccttcgacgctctcccctcgcttctcgcgcacactaaccaatccgagcgcccgacgctgccccccgatcgaatccaccggagccgcccacctagggctcgcccgcgccattgtcgaaccaggagggttcgtccgcccgcgcctgctgccccgcactcccgcgccgtggcggtggcgttggcggtatgtatgatcgctagagggagaggaggaggtggcagcaccggtggggattagggtggcggcagtgctggtgccgggaggaggaggaggaggaggaggaggaggaggcgtagcccatgaaggcgacggcgccgccggcaaagcggcggaggggcccgcggctggcggtgctggcgctcgtgttctgttcgctgctcgtgccgatcgccttcctcttcaaccgcttccccgccgtgtatgtgacggatgagcgccctcagcaggagattgacttgccttcattcgatcgcgtggcatttgaaagtggtggatctgtaaatgaattctcccgcctccaaaaattgaactagtcctcccccctccaaaagttgaacccaaaccagaagtgaagccagtaccagtatcagttccagttcatcataacaaaaaaattaacgttgacaagattaggcctcctagagttcaaagtgctgatgaggtggaaaaggctaaggcttgtcaacttgagtttgggagttactgtctctggtccatagagcacaaagaagttatgatagataccattgtgaaaaggctgaaagatcagctgtttgtagcccgatcttactacccaagcattgcgaaacttaaaggaaaggagacattgactcgtgaactgaagcaaaatattcaagagcacgagagggtccttagtgaatccatcgttgatgctgatctaccatcctttataaaaacgaaggtcgagaggatggaccaatcaatagcaagagccaaatcatgcactgtggattgcaacaatgttgacagaaagcttcgtcaaattcttcatatgacagaggatgaagctcattttcatatgaagcagagcgcatacctgtacaaccttggtgttcacaccatgcctaaaagtcatcattgtcttaatatgagattgacagtagagtacttcaaatccatgccattggatccaaatgactcttctgcccatacgtttaacattccagacaataggcactatgttatattgtctaaaaatgtccttgctgcttctgttgtcatcaactcaactgttagtagctctgaggatactgaaaatatagtctttcatgtactaactgatgctcaaaatttttatgccatgaagcactggtttgcaagaaactcctacagggaatcagctgtgaatgtcataaattatgaacaaattattttcgagaatttccctgagtttggaacccagcagttatatttgcctgaggaatttcgtgttttcatcagtagccttgagcggcctactgagaagagtagaatggagtatttatcagtgttcagtcactcacatttctttcttgccgaaatattcaaagatttaaagaaggtaattgtgttggatgatgatttggtcgttcaacatgatctctctttcttgtggaatcttgatatgggagataaggtccatggtgctgtcagattttgtggtttgaaacttggccaactgaggaaccttctgggtaggacaatgtacgatcaacagtcatgtgcatggatgtcgggggttaatgtgattgatttggaaaaatggagagatcataatgttacagagaattacctgcaactcctgagaaagtttgggaacaatggtgatgaggcctcattgcgatcttcagctttgcctataagtttgttgttgttccagcatcttctttatccccttgatgagagattgactttatctggacttggatatgactatggaattaaagaaaaacttgttcagagttctgcatcattgcattacaatggaaatatgaaaccttggcttgagttgggcataccagattataggaagtactggaagaggtttcttacacgagacgagagattcatggatgagtgcaatgtaagtccatagtgcacttgagcttgagagccggatcatttttgacagtagatttcagtctacactgctgtaatatatactaagaggaccaacacttccattgagaaaagacttgggaagcagtcactagccatcaattttgacagagtagatccagcgccatctgttgagtgaacttgtgagctcgatggatggttttttctgcagttagaggactttagtgttaagtttgaaggataatgcagtagacaacgttggtggtgtgtggtggtgaggctccacgtaagagggagcatcacactacgtaacaggaatgatctttggtggattggggcgtcttaattcaaattggtgccttccatctcatcgattcaggttaattcttttctttgttgattgatttgttgacccctcttgctttgtccttctgtcaataaggacatacacaggttaaaattcaatttctttgctcgtagttgttgcacattgattgttctatcattattatgttgatgcaaagtatattatgatgtcagactcatctgttacaaaaatgagattaacaactgttctatttggatgtcttctgagcactcaaactttatctcatgatccagtaaatttgaatctccatatatggtcgtgactgggtttaactgccgacataggtttcctctgtgtgctccactgtggcctagaaagaattaaaaagtgcagtgcggttcatagcaatacatatacttgacattgcagaagtaaaaacgtgttccgggcacttggtgaatggagaaccttgtcactgtaaattggttcttaaaccttgttgcgatgtaataatcatgtaaacactgtaaaacatgcgaattttccaaggcagcaataagcttcagagttgaagaaaccgttaacctggatgaacatgcgaggacgcttcttatctttgagtaaaaggtggcttagggtttgtttggatgacgtgtggattttgaaaaagtgaaaaaaccgttgtaaggtatagaccatgagaattcaaataattctacgtctcctttgatgacttcacaaagaatcagatctctttcgatccttttctcaagcgatcaccaagatcgagcttcagttctcttatcaaatcaaatggtgagtgcaatctctcccacaaggtactccacaaaaagtcggaagctcttgtttgctttacaatttggagcagcaactctatacaagaatgatagtaaatcttctctcttttctcggagtcaaaactcaacacaagtgttctagccactcttttgctaccttaggctcttgcaagatgctatgctaagcacacgatggttttgtaagcacttaagatggtttggatgctatggagatgatcctctaacttgtatatgatgtttgtttgttaatggattgagttgtttttggttggaggggtatatataggttgtccatctcaaaatagctgttggaaccccactttagcttctgcgtacccattagacatgtccaatgcctctcataggtttttttttaaaaaagttgtcaaccttcatcagtctatcagaacttacctgatatatccggtgtgggcactgaacatgtcaagttagctagctattggagtctttatgttgttgacccttgtgcattatgtattcggtgcaccatccggtgttacaccagacaaatatgat

SEQ ID NO: 81068 - DNA, 3605 bp, Zea Mays
ccttcacacacccgcacacatacacacactcgtcccttccctccccctccatctccattctccaatctccccttcgacgctctcccctcgcttctcgcgcacactaaccaatccgagcgcccgacgctgccccccgatcgaatccaccggagccgcccacctagggctcgcccgcgccattgtcgaaccaggagggttcgtccgcccgcgcctgctgccccgcactcccgcgccgtggcggtggcgttggcggtatgtatgatcgctagagggagaggaggaggtggcagcaccggtggggattagggtggcggcagtgctggtgccgggaggaggaggaggaggaggaggaggaggaggcgtagcccatgaaggcgacggcgccgccggcaaagcggcggaggggcccgcggctggcggtgctggcgctcgtgttctgttcgctgctcgtgccgatcgccttcctcttcaaccgcttccccgccgtgtatgtgacggatgagcgccctcagcaggagattgacttgccttcattcgatcgcgtggcatttgaaagtggtggatctgtaaatgaagatgtgttcaagaagacttctgggagcagtagtgtgtcgcaccatgttctcccgcctccaaaaattgaactagtcctcccccctccaaaagttgaacccaaaccagaagtgaagccagtaccagtatcagttccagttcatcataacaaaaaaattaacgttgacaagattaggcctcctagagttcaaagtgctgatgaggtggaaaaggctaaggcttgtcaacttgagtttgggagttactgtctctggtccatagagcacaaagaagttatgatagataccattgtgaaaaggctgaaagatcagctgtttgtagcccgatcttactacccaagcattgcgaaacttaaaggaaaggagacattgactcgtgaactgaagcaaaatattcaagagcacgagagggtccttagtgaatccatcgttgatgctgatctaccatcctttataaaaacgaaggtcgagaggatggaccaatcaatagcaagagccaaatcatgcactgtggattgcaacaatgttgacagaaagcttcgtcaaattcttcatatgacagaggatgaagctcattttcatatgaagcagagcgcatacctgtacaaccttggtgttcacaccatgcctaaaagtcatcattgtcttaatatgagattgacagtagagtacttcaaatccatgccattggatccaaatgactcttctgcccatacgtttaacattccagacaataggcactatgttatattgtctaaaaatgtccttgctgcttctgttgtcatcaactcaactgttagtagctctgaggatactgaaaatatagtctttcatgtactaactgatgctcaaaatttttatgccatgaagcactggtttgcaagaaactcctacagggaatcagctgtgaatgtcataaattatgaacaaattattttcgagaatttccctgagtttggaacccagcagttatatttgcctgaggaatttcgtgttttcatcagtagccttgagcggcctactgagaagagtagaatggagtatttatcagtgttcagtcactcacatttctttcttgccgaaatattcaaagatttaaagaaggtaattgtgttggatgatgatttggtcgttcaacatgatctctctttcttgtggaatcttgatatgggagataaggtccatggtgctgtcagattttgtggtttgaaacttggccaactgaggaaccttctgggtaggacaatgtacgatcaacagtcatgtgcatggatgtcgggggttaatgtgattgatttggaaaaatggagagatcataatgttacagagaattacctgcaactcctgagaaagtttgggaacaatggtgatgaggcctcattgcgatcttcagctttgcctataagtttgttgttgttccagcatcttctttatccccttgatgagagattgactttatctggacttggatatgactatggaattaaagaaaaacttgttcagagttctgcatcattgcattacaatggaaatatgaaaccttggcttgagttgggcataccagattataggaagtactggaagaggtttcttacacgagacgagagattcatggatgagtgcaatgtaagtccatagtgcacttgagcttgagagccggatcatttttgacagtagatttcagtctacactgctgtaatatatactaagaggaccaacacttccattgagaaaagacttgggaagcagtcactagccatcaattttgacagagtagatccagcgccatctgttgagtgaacttgtgagctcgatggatggttttttctgcagttagaggactttagtgttaagtttgaaggataatgcagtagacaacgttggtggtgtgtggtggtgaggctccacgtaagagggagcatcacactacgtaacaggaatgatctttggtggattggggcgtcttaattcaaattggtgccttccatctcatcgattcaggtttcctctgtgtgctccactgtggcctagaaagaattaaaaagtgcagtgcggttcatagcaatacatatacttgacattgcagaagtaaaaacgtgttccgggcacttggtgaatggagaaccttgtcactgtaaattggttcttaaaccttgttgcgatgtaataatcatgtaaacactgtaaaacatgcgaattttccaaggcagcaataagcttcagagttgaagaaaccgttaacctggatgaacatgcgaggacgcttcttatctttgagtaaaaggtggcttagggtttgtttggatgacgtgtggattttgaaaaagtgaaaaaaccgttgtaaggtatagaccatgagaattcaaataattctacgtctcctttgatgacttcacaaagaatcagatctctttcgatccttttctcaagcgatcaccaagatcgagcttcagttctcttatcaaatcaaatggtgagtgcaatctctcccacaaggtactccacaaaaagtcggaagctcttgtttgctttacaatttggagcagcaactctatacaagaatgatagtaaatcttctctcttttctcggagtcaaaactcaacacaagtgttctagccactcttttgctaccttaggctcttgcaagatgctatgctaagcacacgatggttttgtaagcacttaagatggtttggatgctatggagatgatcctctaacttgtatatgatgtttgtttgttaatggattgagttgtttttggttggaggggtatatataggttgtccatctcaaaatagctgttggaaccccactttagcttctgcgtacccattagacatgtccaatgcctctcataggtttttttttaaaaaagttgtcaaccttcatcagtctatcagaacttacctgatatatccggtgtgggcactgaacatgtcaagttagctagctattggagtctttatgttgttgacccttgtgcattatgtattcggtgcaccatccggtgttacaccagacaaatatgat

SEQ ID NO: 81069 - DNA, 3946 bp, Zea Mays
ccttcacacacccgcacacatacacacactcgtcccttccctccccctccatctccattctccaatctccccttcgacgctctcccctcgcttctcgcgcacactaaccaatccgagcgcccgacgctgccccccgatcgaatccaccggagccgcccacctagggctcgcccgcgccattgtcgaaccaggagggttcgtccgcccgcgcctgctgccccgcactcccgcgccgtggcggtggcgttggcggtatgtatgatcgctagagggagaggaggaggtggcagcaccggtggggattagggtggcggcagtgctggtgccgggaggaggaggaggaggaggaggaggaggaggcgtagcccatgaaggcgacggcgccgccggcaaagcggcggaggggcccgcggctggcggtgctggcgctcgtgttctgttcgctgctcgtgccgatcgccttcctcttcaaccgcttccccgccgtgtatgtgacggatgagcgccctcagcaggagattgacttgccttcattcgatcgcgtggcatttgaaagtggtggatctgtaaatgaagatgtgttcaagaagacttctgggagcagtagtgtgtcgcaccatggtattgatactggcccttccatagttaggactgaaccaaaagttatagttctcccgcctccaaaaattgaactagtcctcccccctccaaaagttgaacccaaaccagaagtgaagccagtaccagtatcagttccagttcatcataacaaaaaaattaacgttgacaagattaggcctcctagagttcaaagtgctgatgaggtggaaaaggctaaggcttgtcaacttgagtttgggagttactgtctctggtccatagagcacaaagaagttatgatagataccattgtgaaaaggctgaaagatcagctgtttgtagcccgatcttactacccaagcattgcgaaacttaaaggaaaggagacattgactcgtgaactgaagcaaaatattcaagagcacgagagggtccttagtgaatccatcgttgatgctgatctaccatcctttataaaaacgaaggtcgagaggatggaccaatcaatagcaagagccaaatcatgcactgtggattgcaacaatgttgacagaaagcttcgtcaaattcttcatatgacagaggatgaagctcattttcatatgaagcagagcgcatacctgtacaaccttggtgttcacaccatgcctaaaagtcatcattgtcttaatatgagattgacagtagagtacttcaaatccatgccattggatccaaatgactcttctgcccatacgtttaacattccagacaataggcactatgttatattgtctaaaaatgtccttgctgcttctgttgtcatcaactcaactgttagtagctctgaggatactgaaaatatagtctttcatgtactaactgatgctcaaaatttttatgccatgaagcactggtttgcaagaaactcctacagggaatcagctgtgaatgtcataaattatgaacaaattattttcgagaatttccctgagtttggaacccagcagttatatttgcctgaggaatttcgtgttttcatcagtagccttgagcggcctactgagaagagtagaatggagtatttatcagtgttcagtcactcacatttctttcttgccgaaatattcaaagatttaaagaaggtaattgtgttggatgatgatttggtcgttcaacatgatctctctttcttgtggaatcttgatatgggagataaggtccatggtgctgtcagattttgtggtttgaaacttggccaactgaggaaccttctgggtaggacaatgtacgatcaacagtcatgtgcatggatgtcgggggttaatgtgattgatttggaaaaatggagagatcataatgttacagagaattacctgcaactcctgagaaagtttgggaacaatggtgatgaggcctcattgcgatcttcagctttgcctataagtttgttgttgttccagcatcttctttatccccttgatgagagattgactttatctggacttggatatgactatggaattaaagaaaaacttgttcagagttctgcatcattgcattacaatggaaatatgaaaccttggcttgagttgggcataccagattataggaagtactggaagaggtttcttacacgagacgagagattcatggatgagtgcaatgtaagtccatagtgcacttgagcttgagagccggatcatttttgacagtagatttcagtctacactgctgtaatatatactaagaggaccaacacttccattgagaaaagacttgggaagcagtcactagccatcaattttgacagagtagatccagcgccatctgttgagtgaacttgtgagctcgatggatggttttttctgcagttagaggactttagtgttaagtttgaaggataatgcagtagacaacgttggtggtgtgtggtggtgaggctccacgtaagagggagcatcacactacgtaacaggaatgatctttggtggattggggcgtcttaattcaaattggtgccttccatctcatcgattcaggttaattcttttctttgttgattgatttgttgacccctcttgctttgtccttctgtcaataaggacatacacaggttaaaattcaatttctttgctcgtagttgttgcacattgattgttctatcattattatgttgatgcaaagtatattatgatgtcagactcatctgttacaaaaatgagattaacaactgttctatttggatgtcttctgagcactcaaactttatctcatgatccagtaaatttgaatctccatatatggtcgtgactgggtttaactgccgacataggtttcctctgtgtgctccactgtggcctagaaagaattaaaaagtgcagtgcggttcatagcaatacatatacttgacattgcagaagtaaaaacgtgttccgggcacttggtgaatggagaaccttgtcactgtaaattggttcttaaaccttgttgcgatgtaataatcatgtaaacactgtaaaacatgcgaattttccaaggcagcaataagcttcagagttgaagaaaccgttaacctggatgaacatgcgaggacgcttcttatctttgagtaaaaggtggcttagggtttgtttggatgacgtgtggattttgaaaaagtgaaaaaaccgttgtaaggtatagaccatgagaattcaaataattctacgtctcctttgatgacttcacaaagaatcagatctctttcgatccttttctcaagcgatcaccaagatcgagcttcagttctcttatcaaatcaaatggtgagtgcaatctctcccacaaggtactccacaaaaagtcggaagctcttgtttgctttacaatttggagcagcaactctatacaagaatgatagtaaatcttctctcttttctcggagtcaaaactcaacacaagtgttctagccactcttttgctaccttaggctcttgcaagatgctatgctaagcacacgatggttttgtaagcacttaagatggtttggatgctatggagatgatcctctaacttgtatatgatgtttgtttgttaatggattgagttgtttttggttggaggggtatatataggttgtccatctcaaaatagctgttggaaccccactttagcttctgcgtacccattagacatgtccaatgcctctcataggtttttttttaaaaaagttgtcaaccttcatcagtctatcagaacttacctgatatatccggtgtgggcactgaacatgtcaagttagctagctattggagtctttatgttgttgacccttgtgcattatgtattcggtgcaccatccggtgttacaccagacaaatatgat

SEQ ID NO: 81070 - DNA, 3811 bp, Zea Mays
cacactcgtcccttccctccccctccatctccattctccaatctccccttcgacgctctcccctcgcttctcgcgcacactaaccaatccgagcgcccgacgctgccccccgatcgaatccaccggagccgcccacctagggctcgcccgcgccattgtcgaaccaggagggttcgtccgcccgcgcctgctgccccgcactcccgcgccgtggcggtggcgttggcggtatgtatgatcgctagagggagaggaggaggtggcagcaccggtggggattagggtggcggcagtgctggtgccgggaggaggaggaggaggaggaggaggaggaggcgtagcccatgaaggcgacggcgccgccggcaaagcggcggaggggcccgcggctggcggtgctggcgctcgtgttctgttcgctgctcgtgccgatcgccttcctcttcaaccgcttccccgccgtgtatgtgacggatgagcgccctcagcaggagattgacttgccttcattcgatcgcgtggcatttgaaagtggtggatctgtaaatgaaattaacgttgacaagattaggcctcctagagttcaaagtgctgatgaggtggaaaaggctaaggcttgtcaacttgagtttgggagttactgtctctggtccatagagcacaaagaagttatgatagataccattgtgaaaaggctgaaagatcagctgtttgtagcccgatcttactacccaagcattgcgaaacttaaaggaaaggagacattgactcgtgaactgaagcaaaatattcaagagcacgagagggtccttagtgaatccatcgttgatgctgatctaccatcctttataaaaacgaaggtcgagaggatggaccaatcaatagcaagagccaaatcatgcactgtggattgcaacaatgttgacagaaagcttcgtcaaattcttcatatgacagaggatgaagctcattttcatatgaagcagagcgcatacctgtacaaccttggtgttcacaccatgcctaaaagtcatcattgtcttaatatgagattgacagtagagtacttcaaatccatgccattggatccaaatgactcttctgcccatacgtttaacattccagacaataggcactatgttatattgtctaaaaatgtccttgctgcttctgttgtcatcaactcaactgttagtagctctgaggtatgcagaaagttttttatttctcctttaaagctgttatagtgcatcttgtgggctcagcattgctaacatccccttttcctattgcaggatactgaaaatatagtctttcatgtactaactgatgctcaaaatttttatgccatgaagcactggtttgcaagaaactcctacagggaatcagctgtgaatgtcataaattatgaacaaattattttcgagaatttccctgagtttggaacccagcagttatatttgcctgaggaatttcgtgttttcatcagtagccttgagcggcctactgagaagagtagaatggagtatttatcagtgttcagtcactcacatttctttcttgccgaaatattcaaagatttaaagaaggtaattgtgttggatgatgatttggtcgttcaacatgatctctctttcttgtggaatcttgatatgggagataaggtccatggtgctgtcagattttgtggtttgaaacttggccaactgaggaaccttctgggtaggacaatgtacgatcaacagtcatgtgcatggatgtcgggggttaatgtgattgatttggaaaaatggagagatcataatgttacagagaattacctgcaactcctgagaaagtttgggaacaatggtgatgaggcctcattgcgatcttcagctttgcctataagtttgttgttgttccagcatcttctttatccccttgatgagagattgactttatctggacttggatatgactatggaattaaagaaaaacttgttcagagttctgcatcattgcattacaatggaaatatgaaaccttggcttgagttgggcataccagattataggaagtactggaagaggtttcttacacgagacgagagattcatggatgagtgcaatgtaagtccatagtgcacttgagcttgagagccggatcatttttgacagtagatttcagtctacactgctgtaatatatactaagaggaccaacacttccattgagaaaagacttgggaagcagtcactagccatcaattttgacagagtagatccagcgccatctgttgagtgaacttgtgagctcgatggatggttttttctgcagttagaggactttagtgttaagtttgaaggataatgcagtagacaacgttggtggtgtgtggtggtgaggctccacgtaagagggagcatcacactacgtaacaggaatgatctttggtggattggggcgtcttaattcaaattggtgccttccatctcatcgattcaggttaattcttttctttgttgattgatttgttgacccctcttgctttgtccttctgtcaataaggacatacacaggttaaaattcaatttctttgctcgtagttgttgcacattgattgttctatcattattatgttgatgcaaagtatattatgatgtcagactcatctgttacaaaaatgagattaacaactgttctatttggatgtcttctgagcactcaaactttatctcatgatccagtaaatttgaatctccatatatggtcgtgactgggtttaactgccgacataggtttcctctgtgtgctccactgtggcctagaaagaattaaaaagtgcagtgcggttcatagcaatacatatacttgacattgcagaagtaaaaacgtgttccgggcacttggtgaatggagaaccttgtcactgtaaattggttcttaaaccttgttgcgatgtaataatcatgtaaacactgtaaaacatgcgaattttccaaggcagcaataagcttcagagttgaagaaaccgttaacctggatgaacatgcgaggacgcttcttatctttgagtaaaaggtggcttagggtttgtttggatgacgtgtggattttgaaaaagtgaaaaaaccgttgtaaggtatagaccatgagaattcaaataattctacgtctcctttgatgacttcacaaagaatcagatctctttcgatccttttctcaagcgatcaccaagatcgagcttcagttctcttatcaaatcaaatggtgagtgcaatctctcccacaaggtactccacaaaaagtcggaagctcttgtttgctttacaatttggagcagcaactctatacaagaatgatagtaaatcttctctcttttctcggagtcaaaactcaacacaagtgttctagccactcttttgctaccttaggctcttgcaagatgctatgctaagcacacgatggttttgtaagcacttaagatggtttggatgctatggagatgatcctctaacttgtatatgatgtttgtttgttaatggattgagttgtttttggttggaggggtatatataggttgtccatctcaaaatagctgttggaaccccactttagcttctgcgtacccattagacatgtccaatgcctctcataggtttttttttaaaaaagttgtcaaccttcatcagtctatcagaacttacctgatatatccggtgtgggcactgaacatgtcaagttagctagctattggagtctttatgttgttgacccttgtgcattatgtattcggtgcaccatccggtgttacaccagacaaatatgat

SEQ ID NO: 81071 - DNA, 3637 bp, Zea Mays
cacactcgtcccttccctccccctccatctccattctccaatctccccttcgacgctctcccctcgcttctcgcgcacactaaccaatccgagcgcccgacgctgccccccgatcgaatccaccggagccgcccacctagggctcgcccgcgccattgtcgaaccaggagggttcgtccgcccgcgcctgctgccccgcactcccgcgccgtggcggtggcgttggcggtatgtatgatcgctagagggagaggaggaggtggcagcaccggtggggattagggtggcggcagtgctggtgccgggaggaggaggaggaggaggaggaggaggaggcgtagcccatgaaggcgacggcgccgccggcaaagcggcggaggggcccgcggctggcggtgctggcgctcgtgttctgttcgctgctcgtgccgatcgccttcctcttcaaccgcttccccgccgtgtatgtgacggatgagcgccctcagcaggagattgacttgccttcattcgatcgcgtggcatttgaaagtggtggatctgtaaatgaagatgtgttcaagaagacttctgggagcagtagtgtgtcgcaccatgttctcccgcctccaaaaattgaactagtcctcccccctccaaaagttgaacccaaaccagaagtgaagccagtaccagtatcagttccagttcatcataacaaaaaaattaacgttgacaagattaggcctcctagagttcaaagtgctgatgaggtggaaaaggctaaggcttgtcaacttgagtttgggagttactgtctctggtccatagagcacaaagaagttatgatagataccattgtgaaaaggctgaaagatcagctgtttgtagcccgatcttactacccaagcattgcgaaacttaaaggaaaggagacattgactcgtgaactgaagcaaaatattcaagagcacgagagggtccttagtgaatccatcgttgatgctgatctaccatcctttataaaaacgaaggtcgagaggatggaccaatcaatagcaagagccaaatcatgcactgtggattgcaacaatgttgacagaaagcttcgtcaaattcttcatatgacagaggatgaagctcattttcatatgaagcagagcgcatacctgtacaaccttggtgttcacaccatgcctaaaagtcatcattgtcttaatatgagattgacagtagagtacttcaaatccatgccattggatccaaatgactcttctgcccatacgtttaacattccagacaataggcactatgttatattgtctaaaaatgtccttgctgcttctgttgtcatcaactcaactgttagtagctctgaggatactgaaaatatagtctttcatgtactaactgatgctcaaaatttttatgccatgaagcactggtttgcaagaaactcctacagggaatcagctgtgaatgtcataaattatgaacaaattattttcgagaatttccctgagtttggaacccagcagttatatttgcctgaggaatttcgtgttttcatcagtagccttgagcggcctactgagaagagtagaatggagtatttatcagtgttcagtcactcacatttctttcttgccgaaatattcaaagatttaaagaaggtaattgtgttggatgatgatttggtcgttcaacatgatctctctttcttgtggaatcttgatatgggagataaggtccatggtgctgtcagattttgtggtttgaaacttggccaactgaggaaccttctgggtaggacaatgtacgatcaacagtcatgtgcatggatgtcgggggttaatgtgattgatttggaaaaatggagagatcataatgttacagagaattacctgcaactcctgagaaagtttgggaacaatggtgatgaggcctcattgcgatcttcagctttgcctataagtttgttgttgttccagcatcttctttatccccttgatgagagattgactttatctggacttggatatgactatggaattaaagaaaaacttgttcagagttctgcatcattgcattacaatggaaatatgaaaccttggcttgagttgggcataccagattataggaagtactggaagaggtttcttacacgagacgagagattcatggatgagtgcaatgtaagtccatagtgcacttgagcttgagagccggatcatttttgacagtagatttcagtctacactgctgtaatatatactaagaggaccaacacttccattgagaaaagacttgggaagcagtcactagccatcaattttgacagagtagatccagcgccatctgttgagtgaacttgtgagctcgatggatggttttttctgcagttagaggactttagtgttaagtttgaaggataatgcagtagacaacgttggtggtgtgtggtggtgaggctccacgtaagagggagcatcacactacgtaacaggaatgatctttggtggattggggcgtcttaattcaaattggtgccttccatctcatcgattcagtccagtaaatttgaatctccatatatggtcgtgactgggtttaactgccgacataggtttcctctgtgtgctccactgtggcctagaaagaattaaaaagtgcagtgcggttcatagcaatacatatacttgacattgcagaagtaaaaacgtgttccgggcacttggtgaatggagaaccttgtcactgtaaattggttcttaaaccttgttgcgatgtaataatcatgtaaacactgtaaaacatgcgaattttccaaggcagcaataagcttcagagttgaagaaaccgttaacctggatgaacatgcgaggacgcttcttatctttgagtaaaaggtggcttagggtttgtttggatgacgtgtggattttgaaaaagtgaaaaaaccgttgtaaggtatagaccatgagaattcaaataattctacgtctcctttgatgacttcacaaagaatcagatctctttcgatccttttctcaagcgatcaccaagatcgagcttcagttctcttatcaaatcaaatggtgagtgcaatctctcccacaaggtactccacaaaaagtcggaagctcttgtttgctttacaatttggagcagcaactctatacaagaatgatagtaaatcttctctcttttctcggagtcaaaactcaacacaagtgttctagccactcttttgctaccttaggctcttgcaagatgctatgctaagcacacgatggttttgtaagcacttaagatggtttggatgctatggagatgatcctctaacttgtatatgatgtttgtttgttaatggattgagttgtttttggttggaggggtatatataggttgtccatctcaaaatagctgttggaaccccactttagcttctgcgtacccattagacatgtccaatgcctctcataggtttttttttaaaaaagttgtcaaccttcatcagtctatcagaacttacctgatatatccggtgtgggcactgaacatgtcaagttagctagctattggagtctttatgttgttgacccttgtgcattatgtattcggtgcaccatccggtgttacaccagacaaatatgat

SEQ ID NO: 81072 - DNA, 2498 bp, Zea Mays
aacaagccggcagccaagtacagtacagtacagcagacatgcgtccccatccgtgatatcccgtcccgtcccactactactgggacccttccttcccaccgccaccgctcactactccggccgcctctcttccagcaaatccctcccacctcctccccgccgtctcacgaggagctagaggaaggggaggctctgtaccagcctgttggaagggggcgagatgagcatgtacgggagggatccctggggcggcccgctggagatatgccacgactcggccacggacgacgaccgcagccgcaacctggacatcgaccgggccgcgctgtcgcggacgctcgacgagacgcagcagagctggctgctggcggggaccgccgaccagccccgcaagaagaacaagtacgtcgacatcggctgcctcctcgtcagccgcaagctcttcgtctggacgctcggcgtgctcctcgccgccgccgtgttcgcgggggccgtggccgggatcgccaaggccatccccaggcggcaccgcccgctgccaccgcccgacgactacaccgtcgcgctgcacaaggcgctcatgttcttccatgcccagagatctgggaagcttccgaagcacaacaatatacattggcgcggtaactcttgcatgaaggacgggctttctgaccctgcagtcaggcgaagcctggttggcgggtattatgatgccggcgacgccgtcaagttcaatttcccagctgccttctccatgaccctcctcagctggagcgtcattgagtacagtgccaagtacgacgctgttggggaacttggccatgtccgtgacattatcaagtgggggtcagactacttcttgaagacctttaattccacagccgatagcattgatcgtgtcattgcgcaggtgggaggtggtgcgacgtcgcctggttcgacacagcccaatgatcggtattgttggatgaggccagaggacattgactacccacgtccagtggttgagtgccacacttgttcagatcttgctgctgaaatggctgcagcattagctgcagcgtcgattgtattcaaggacaacaaggcttactcacagaagcttgtacatggtgctaccactctcttccagttcgcaagggaccggcgtgggaggtatagcgcaggtggatcgtatgctgcaaagttctacaattcaactagttactgggatgagtttctgtggggtagctcatggatgtaccttgcaactggcaattcatcatacttgactctagccacaaaccctaaacttgcgaagcatgctggcgctttctggggtggaccggattatggtgtgttcagctgggataataagctcactggtgcacaggaccaatgctttgaacttcaatactatatttaacaccttgatgttctagagttcattcagaatgccaaccctgatgtggttcttctaagtcggttgaggcttttcttaagtcctggatatccatacgaagagatcttgaggacgttccacaatcaaactagcattatcatgtgttcctaccttccagtctttaaatccttcaacagaacaagaggtggtctgatccagctaaatcacgggaaaccacggcccctccagtatgtggtcaacgctgcattccttgcttctgtgttcagtgactatcttgaggctgcggatactcctgggtggtattgtggcccccatttctactctgttgaggttcttcgcagttttgcaaggactcagatcgattacatcttaggaaagaatcctttgaagatgagctacgtggttgggttcggaaagcgttaccccaggcatgttcaccaccggggcgcctcgatccctaagaacggtgttcactatggctgcaaaggagggtggaagtggagggacgccaagaagccaaaccctaataccatagcaggtgccatggttgctggccccgaccgccatgacgggttcaaagatgcccgcaggaactacaactacactgaagcaacgctggcgggcaacgctggtctagtcgccgcattggtagctttgtcgggtgacggccacggcggggtggacaagaacaccatgttctctgcagtaccgcccatgttcccttcgcctccgccgccgccggctccatggaaaccgtgacggcctgtgggggtatggtatggtatggtatctgattcttttgtatactgctttatttatttagatttagattagtgttccctctcgccgtactgctaccatcacaatcatggagatctaacagtatgtagctccggtcttttttttcattgtttttatattttgccgtgcaatgtaaaggactagtactacgttttgcatggatctcggggtcagtaactgatatcctggggatttgtggtaactaaagcccatctctgtgcttccgtgaatgagtggaattcgaaaatttcagccgcgctgtattgactgtatataggaatgtttggttgcaggt

SEQ ID NO: 81073 - DNA, 2380 bp, Zea Mays
acatgcgtccccatccgtgatatcccgtcccgtcccactactactgggacccttccttcccaccgccaccgctcactactccggccgcctctcttccagcaaatccctcccacctcctccccgccgtctcacgaggagctagaggaaggggaggctctgtaccagcctgttggaagggggcgagatgagcatgtacgggagggatccctggggcggcccgctggagatatgccacgactcggccacggacgacgaccgcagccgcaacctggacatcgaccgggccgcgctgtcgcggacgctcgacgagacgcagcagagctggctgctggcggggaccgccgaccagccccgcaagaagaacaagtacgtcgacatcggctgcctcctcgtcagccgcaagctcttcgtctggacgctcggcgtgctcctcgccgccgccgtgttcgcgggggccgtggccgggatcgccaaggccatccccaggcggcaccgcccgctgccaccgcccgacgactacaccgtcgcgctgcacaaggcgctcatgttcttccatgcccagagatctgggaagcttccgaagcacaacaatatacattggcgcggtaactcttgcatgaaggacgggctttctgaccctgcagtcaggcgaagcctggttggcgggtattatgatgccggcgacgccgtcaagttcaatttcccagctgccttctccatgaccctcctcagctggagcgtcattgagtacagtgccaagtacgacgctgttggggaacttggccatgtccgtgacattatcaagtgggggtcagactacttcttgaagacctttaattccacagccgatagcattgatcgtgtcattgcgtgggaggtggtgcgacgtcgcctggttcgacacagcccaatgatcggtattgttggatgaggccagaggacattgactacccacgtccagtggttgagtgccacacttgttcagatcttgctgctgaaatggctgcagcattagctgcagcgtcgattgtattcaaggacaacaaggcttactcacagaagcttgtacatggtgctaccactctcttccagttcgcaagggaccggcgtgggaggtatagcgcaggtggatcgtatgctgcaaagttctacaattcaactagttactgggatgagtttctgtggggtagctcatggatgtaccttgcaactggcaattcatcatacttgactctagccacaaaccctaaacttgcgaagcatgctggcgctttctggggtggaccggattatggtgtgttcagctgggataataagctcactggtgcacaggttcttctaagtcggttgaggcttttcttaagtcctggatatccatacgaagagatcttgaggacgttccacaatcaaactagcattatcatgtgttcctaccttccagtctttaaatccttcaacagaacaagaggtggtctgatccagctaaatcacgggaaaccacggcccctccagtatgtggtcaacgctgcattccttgcttctgtgttcagtgactatcttgaggctgcggatactcctgggtggtattgtggcccccatttctactctgttgaggttcttcgcagttttgcaaggactcagatcgattacatcttaggaaagaatcctttgaagatgagctacgtggttgggttcggaaagcgttaccccaggcatgttcaccaccggggcgcctcgatccctaagaacggtgttcactatggctgcaaaggagggtggaagtggagggacgccaagaagccaaaccctaataccatagcaggtgccatggttgctggccccgaccgccatgacgggttcaaagatgcccgcaggaactacaactacactgaagcaacgctggcgggcaacgctggtctagtcgccgcattggtagctttgtcgggtgacggccacggcggggtggacaagaacaccatgttctctgcagtaccgcccatgttcccttcgcctccgccgccgccggctccatggaaaccgtgacggcctgtgggggtatggtatggtatggtatctgattcttttgtatactgctttatttatttagatttagattagtgttccctctcgccgtactgctaccatcacaatcatggagatctaacagtatgtagctccggtcttttttttcattgtttttatattttgccgtgcaatgtaaaggactagtactacgttttgcatggatctcggggtcagtaactgatatcctggggatttgtggtaactaaagcccatctctgtgcttccgtgaatgagtggaattcgaaaatttcagccgcgctgtattgactgtatataggaatgtttggttgcaggt

SEQ ID NO: 81074 - DNA, 196 bp, Zea Mays
cacaacgccccatcgtcgcataacccctcgtctccctccccagatccaaatcgcgcaggaccaggcatcccatccaggcggttattggtcttcttgcgtgcgcagattgcgatctgttcctgagcttcgaggaatcgacggtcaagcttcggcgaccaagtgatctagcttttcgagttccacgaagttgaagacc

SEQ ID NO: 81075 - DNA, 1858 bp, Zea Mays
gcacgcgccccttccctgtccatgatccagccgtgccacagcatcggtcgtgcgacgaggcgtacgagccgcagcgtcggtcatgcgacgtgcgcgggcggagcactctctggagagaaccgctcgccgacccacccaccgcactgctctcccacccaaatcgccgaccgataggagagaacccgagctgagaagagagagggcagcaggcggcggcgcggagtaacacgcggaggggaatgcacagcccgtgtgagcctctcgcccccgcgaaaccccaccgattctgattccgccggcgaaatcgggcgcctccaactgcgcgcctgacgccgtctcggtctcccggatgtctgccaacctcacggcggtggcggagaagcaactgcccccttccgccgtggctgggtccacgtcgacaacgctgcagcatgaagttttcggcatcgcggcgtcgtcgcggttatgggacaagcgtaaggagtacatcaaagtgtggtggcgctcgcgcggcgccatgcggggctacgtgtggctggaccgcgaggtgcgcgagtccaacatgtccacggcgcgcacgaggctcccagccatcaggatctcgtctgacacgtccgccttcccctacacacaccgccgtggccaccgctccgccatccgcatctcccgcatcgtctccgagatgttctgcctcggcctccccggcgtgcgctggttcgtcatgggcgacgacgacaccgtcttcttcccggacaacctcctcaccgtgctcaacaagttcgaccaccgccagccctactacatcggctccctctccgagagccacctgcagaacatctaattttcctacgggatggcgtacggcggcggcggcttcgccatcagccggccgctggctgaggcgctcgcgcagatgcaggatggctgcctccgccggtacccggcgctgtacgacagcgacgaccggatccaggcgtgcatggcggagctgggcgtgccgctcaccaagcacctggggttccaccagtacgacatgtacggcgacctcctctgcctcctcgcgtcccacccggtggcgccgattgtgacgcttcaccacctcgacgtagtgaagccgctgttcccggatgcgaggtcgtgcccctcggtggtgcgacggctgttcgacgggccggtgaagctggacacggcggggctgatgcaacagtccatctgctacgacagcacgaaccgctggacggtgtccgtggcgtgggggttcacggtgctggtggtgaggggcataatgtcgcctcgggagatggagatgctggcgcgcacgttcctcaactggtatcgccgcgccgactacacgacgtacgccttcaacacgaggccgctggcgcgcagcccatgccagaagccggcggtgtactacctatcgtcggcgcgacacgaggccttgcgcggcggggagacgacggtgacgcgatacgagcggtggcgccatccgaatgagacgcggcccgcgtgccggtgggacataaccgacccggacgcgcatctcgatcacatcatcgtgctcaagaagcctgaccccgggctctgggaaaggtctccgaggcgaaattgctgcagagtggtgtcttcgcccaaggatgggaagagctgggagaagacgatgaccatcgatgtaggcatatgcagggaaggcgagttcagccaagtagcaggagcattagcttttattagagatagatgaagataggaagatttcaaattcttttcttcttcctttttcttgtacgaattcgttcctcttggagagtatgaacttgtatcgtttcaaatccctctttttgcatggtgctttgcacct

SEQ ID NO: 81076 - DNA, 1994 bp, Zea Mays
cgaccgcatagttgccgcgtgtgagctgtgaacgggcgagtgaatattccgccgcaggccatcaggattaggacaggtaatttggagttgcttacggagccagtcactcacagctcctggtcctggcggtaagaagtgaacctgcccggcgccccccgccggacggggtccgtcgcctacaagccgcctccccacggctctccgctcccggcccgtcacaccggccgccaatcctatataaagccgctccaggccctccgctcctccagtccaaagccccttgccttctatccctttcacacacgcctctccttccctctctctctctctatcttcctgcctgaggcagcagccatttccgcttccgatcgtggaggcttggtgtggaaggaggaaaggaggccagctgctggttttcggtgcggcggagatgtctgaggtgtcggtgataaaccaggcggaggtggaggatgcgggtgccgggcagctggacctgccgccggggttccgcttccaccccaccgacgaggagatcatctcgcactacctcgcccataaggccctcaaccaccgcttcgtctccggtgtcatcggcgaggtcgacctcaacaagtgcgagccatgggacctgccagggccaagatgggggagaaggagtggtacttcttctgccacaaggatcgcaagtacccgacgggcacgcggaccaaccgcgccacggagaccggctactggaaggccaccggcaaggacaaggagatcttcaggggccgcggcgtcctcgtgggcatgaagaagacgctcgtcttctaccgcggccgcgcgccgcgcggggagaagaccggctgggtcatgcacgagttccgcctcgagggcaagcttcccgagcggctcccgcgctccgccaaggacgagtgggccgtgtgcaaggtgttcaacaaggagctggcggcgaggaccgagccaataatggcggcggccggcgcgggcgagctcgagcgcgtcggctcgctgggcttcctcagcgagctcctcgactccgccgagctgccggccctcatcggcgccgacgtcgacgaggtgatcgacttcaacggccccgcgtccacctccggcgcgccgggcacgagccacagccacctcccggtcaagatggaggagcacgcgctgctgcacatgcagtaccagccgccgccgcccccgacgtcctactactcgagccagtacttctctctgccggcgatgaactccggcgacgtccttcccccggcgatccggaggtactgcaaggcggagcagcaggtggtgtcggggcagacggcggcgtcggaggtcagcccgtcccgcgagaccgggctgagcgccgaccccaacgcggagatctcgtcggcggtgaccccgtcgtcgtcgcaccagttcctgcccgagttcgacgacccggtcctgaacctcgcggacctctggaagtactgaagccttcccctggacggctggacgacgatcgatcggtggatcggggcgcccgcccacccgcctcgatcccatggtttggttggttaattgcttgatgattcgattgattatcttggcctgttgtgggatttggggttagtgacggaccgtgacgcgtcctccgcctctactgacctcggggtctgactagattattgcccgtgcagaccggcaggggattagggcccccctccttgttaatgaatccgcccccatcctaggttccttgtcttggtcactgtacatagcgccctactctgattgtgtcagtagcagtagcatgattattgataggattaatgaaatggggggtagattagcgtcagcagtgcgttattacagggcaaagtctacggattgattagtgaatttgggcgcttgatgagccagctagcgccagcttcatatgcacatgtactactattgattgctggtcgagctcgacatagcattatgtgaaaatttgatgcttcagttaacct

SEQ ID NO: 81077 - DNA, 1798 bp, Zea Mays
ctcacagctcctggtcctggcggtaagaagtgaacctgcccggcgccccccgccggacggggtccgtcgcctacaagccgcctccccacggctctccgctcccggcccgtcacaccggccgccaatcctatataaagccgctccaggccctccgctcctccagtccaaagccccttgccttctatccctttcacacacgcctctccttccctctctctctctctatcttcctgcctgaggtgtcggtgataaaccaggcggaggtggaggatgcgggtgccgggcagctggacctgccgccggggttccgcttccaccccaccgacgaggagatcatctcgcactacctcgcccataaggccctcaaccaccgcttcgtctccggtgtcatcggcgaggtcgacctcaacaagtgcgagccatgggacctgccaggcagggccaagatgggggagaaggagtggtacttcttctgccacaaggatcgcaagtacccgacgggcacgcggaccaaccgcgccacggagaccggctactggaaggccaccggcaaggacaaggagatcttcaggggccgcggcgtcctcgtgggcatgaagaagacgctcgtcttctaccgcggccgcgcgccgcgcggggagaagaccggctgggtcatgcacgagttccgcctcgagggcaagcttcccgagcggctcccgcgctccgccaaggacgagtgggccgtgtgcaaggtgttcaacaaggagctggcggcgaggaccgagccaataatggcggcggccggcgcgggcgagctcgagcgcgtcggctcgctgggcttcctcagcgagctcctcgactccgccgagctgccggccctcatcggcgccgacgtcgacgaggtgatcgacttcaacggccccgcgtccacctccggcgcgccgggcacgagccacagccacctcccggtcaagatggaggagcacgcgctgctgcacatgcagtaccagccgccgccgcccccgacgtcctactactcgagccagtacttctctctgccggcgatgaactccggcgacgtccttcccccggcgatccggaggtactgcaaggcggagcagcaggtggtgtcggggcagacggcggcgtcggaggtcagcccgtcccgcgagaccgggctgagcgccgaccccaacgcggagatctcgtcggcggtgaccccgtcgtcgtcgcaccagttcctgcccgagttcgacgacccggtcctgaacctcgcggacctctggaagtactgaagccttcccctggacggctggacgacgatcgatcggtggatcggggcgcccgcccacccgcctcgatcccatggtttggttggttaattgcttgatgattcgattgattatcttggcctgttgtgggatttggggttagtgacggaccgtgacgcgtcctccgcctctactgacctcggggtctgactagattattgcccgtgcagaccggcaggggattagggcccccctccttgttaatgaatccgcccccatcctaggttccttgtcttggtcactgtacatagcgccctactctgattgtgtcagtagcagtagcatgattattgataggattaatgaaatggggggtagattagcgtcagcagtgcgttattacagggcaaagtctacggattgattagtgaatttgggcgcttgatgagccagctagcgccagcttcatatgcacatgtactactattgattgctggtcgagctcgacatagcattatgtgaaaatttgatgcttcagttaacct

SEQ ID NO: 81078 - DNA, 1712 bp, Zea Mays
aaagattacacttctgccacgagtcctcgcggctgagcgcaccacgcgcgcctcccgatccccacgcctgcgtgacatagtttgaagcccacgtggcgagcaaaggaagactgtgaggtgcatcggacgaccttcagtagttcttggagagataattagcggggaaaaaagacgcggcgatttttcactccggtaatccggtttaccttatccgtgtgggcctccttttttaaaaggagctacttttcttcgccgcttccgcaatcttccattcctcttcttctctctggcgccgtgatccctcttgtgtctcctggcgagctcttcataccatcttcgagcgcgatttggcgatggcggcggcgcaggtggtcgcgaaggggagcgtggtgtcgccgtgcggcaatcgagcggtgccgggcctcttgggcaggcggagggatgccgtggcggcgcagatgacgccgtcggcggtgcggatcgggggctcctggaggaagaacgcgtttcctggcgtgaggctagccttggggacgaggagatccaggcccgcgtcccggagtttctccgcctcgccggtgcagatgaacatgaaccttgcgattgggaaatcaatgaggtggtgggagaaggggttgcagcccaacatgcgtgagatcgagtccgcccaagaccttgtagattccttaaccaacgccggcgagaggctcgtcgtcgtcgacttcttctcccctggctgcggcggctgccgtgctcttcacccgaagatttgccaatttgcggagcggaaccctgatgtgctgttcttgcaagtgaactacgaggagcacaagtctatgtgctacagccttcgtgtccatgtgctacccttcttcagattctacagaggagcacagggacgactctgcagcttcagctgtacaaacgcaactattaagaagttcaaggatgcacttgcgaagcacaagccagatagatgtacctttggcccaaccagggggctagacgaatcggagttattagccttggcagcaaacaaggaactccagttcacctacaccagggagccagaactgactcccatgggagatacccccggggaggtcattgctcccgagcccgcaaagcttcctgccgctacgaagcctttggtcaagctggggtcggaggaaaggtcattggtctctccaggaagatgagacggtccgatgcttccgttctgtatagttccatggttcttgatgtgtacaggttgtagcttctcatggtagcagagtgcaggctaaggttttttacatgtgaagcctgcccacctgtcgtcccgtagtttggctcggttgtactagcaggtagcaataagtggtgctgtggagctatgtcttagggaaatcgtatggtagttgcatcgatgattggtctgcatgctcttgtttcatttttccttaagcctcaggatatgggcatgggtgcctgtcgcaaaactgaataatcaatcgtgctttatgttgtgctaggcattgtggtgcttggagatcattgttgtgttaatatttgagtttgtgactagttttctgccttggccttcggggcatggaacgggaggaactggtggagatatgcttaattgctagcaagagtttggggctcgaactctaacttgtggtttctctttcaaaggatcgcggtgtctacgaccagagtgaatgggtttg

SEQ ID NO: 81079 - DNA, 2447 bp, Zea Mays
cgatccccacgcctgcgtgacatagtttgaagcccacgtggcgagcaaaggaagactgtgaggtgcatcggacgaccttcagtagttcttggagagataattagcggggaaaaaagacgcggcgatttttcactccggtaatccggtttaccttatccgtgtgggcctccttttttaaaaggagctacttttcttcgccgcttccgcaatcttccattcctcttcttctctctggcgccgtgatccctcttgtgtctcctggcgagctcttcataccatcttcgagcgcgatttggcgatggcggcggcgcaggtggtcgcgaaggggagcgtggtgtcgccgtgcggcaatcgagcggtgccgggcctcttgggcaggcggagggatgccgtggcggcgcagatgacgccgtcggcggtgcggatcgggggctcctggaggaagaacgcgtttcctggcgtgaggctagccttggggacgaggagatccaggcccgcgtcccggagtttctccgcctcgccggtgcagatgaacatgaaccttgcgattgggaaatcaatgaggtggtgggagaaggggttgcagcccaacatgcgtgagatcgagtccgcccaagaccttgtagattccttaaccaacgccggcgagaggctcgtcgtcgtcgacttcttctcccctggctgcggcggctgccgtgctcttcacccgaagatttgccaatttgcggagcggaaccctgatgtgctgttcttgcaagtgaactacgaggagcacaagtctatgtgctacagccttcgtgtccatgtgctacccttcttcagattctacagaggagcacagggacgactctgcagcttcagctgtacaaacgcaactgtaagatcatgtccatgtttcttctgttcgtatgattattggtatgtcctcaataacatgcaacatatccaaaatgacctttattgaacactagtacataattatagtcaccctctcagatctaaaatgtatggagtcagaaagttgtgaattcgggtagagcttgttgacgactcaacttcagttttggactctgtttagtttgtaaaaaaaactcggctggcggggagggtaacaccaccctcgcggtattttcttaatagaaggtctgtggcaagggtcccaaccagaaaaccctgaaccatgtcctcccgtcactaacgagccgggtcaagctacctactctgcaaagactcacctaggcgccgagagtggcgcacggccgagtcataacccgagagtaggcgaggaacagcgaggagatttttagtgcaggtctaagggtcgaacccctggttaaaagggacctgaccaccttctccaccggggttaataccccgtatgctcgaatgttatgtttgttcggtacttgcaggatataagaagcaaagaatggccttttaagttgaatttgactggcaaagccacaaagggttgccattttaagtttcccctagcagttcatgcaatatggtgacctttgctgaccggttagaaacaatttccctcatggacccaactggatgttatgtgattgatttttcagctattatacaattttagctatacttggggttgctgttggctgtggtcacccatcagtactgatgggtgtcatttctgtatgcagattaagaagttcaaggatgcacttgcgaagcacaagccagatagatgtacctttggcccaaccagggggctagacgaatcggagttattagccttggcagcaaacaaggaactccagttcacctacaccagggagccagaactgactcccatgggagatacccccggggaggtcattgctcccgagcccgcaaagcttcctgccgctacgaagcctttggtcaagctggggtcggaggaaaggtcattggtctctccaggaagatgagacggtccgatgcttccgttctgtatagttccatggttcttgatgtgtacaggttgtagcttctcatggtagcagagtgcaggctaaggttttttacatgtgaagcctgcccacctgtcgtcccgtagtttggctcggttgtactagcaggtagcaataagtggtgctgtggagctatgtcttagggaaatcgtatggtagttgcatcgatgattggtctgcatgctcttgtttcatttttccttaagcctcaggatatgggcatgggtgcctgtcgcaaaactgaataatcaatcgtgctttatgttgtgctaggcattgtggtgcttggagatcattgttgtgttaatatttgagtttgtgactagttttctgccttggccttcggggcatggaacgggaggaactggtggagatatgcttaattgctagcaagagtttggggctcgaactctaacttgtggtttctctttcaaaggatcgcggtgtctacgaccagagtgaatgggtttg

SEQ ID NO: 81080 - DNA, 1163 bp, Zea Mays
agcggggaaaaaagacgcggcgatttttcactccgatgaacatgaaccttgcgattgggaaatcaatgaggtggtgggagaaggggttgcagcccaacatgcgtgagatcgagtccgcccaagaccttgtagattccttaaccaacgccggcgagaggctcgtcgtcgtcgacttcttctcccctggctgcggcggctgccgtgctcttcacccgaagatttgccaatttgcggagcggaaccctgatgtgctgttcttgcaagtgaactacgaggagcacaagtctatgtgctacagccttcgtgtccatgtgctacccttcttcagattctacagaggagcacagggacgactctgcagcttcagctgtacaaacgcaactattaagaagttcaaggatgcacttgcgaagcacaagccagatagatgtacctttggcccaaccagggggctagacgaatcggagttattagccttggcagcaaacaaggaactccagttcacctacaccagggagccagaactgactcccatgggagatacccccggggaggtcattgctcccgagcccgcaaagcttcctgccgctacgaagcctttggtcaagctggggtcggaggaaaggtcattggtctctccaggaagatgagacggtccgatgcttccgttctgtatagttccatggttcttgatgtgtacaggttgtagcttctcatggtagcagagtgcaggctaaggttttttacatgtgaagcctgcccacctgtcgtcccgtagtttggctcggttgtactagcaggtagcaataagtggtgctgtggagctatgtcttagggaaatcgtatggtagttgcatcgatgattggtctgcatgctcttgtttcatttttccttaagcctcaggatatgggcatgggtgcctgtcgcaaaactgaataatcaatcgtgctttatgttgtgctaggcattgtggtgcttggagatcattgttgtgttaatatttgagtttgtgactagttttctgccttggccttcggggcatggaacgggaggaactggtggagatatgcttaattgctagcaagagtttggggctcgaactctaacttgtggtttctctttcaaaggatcgcggtgtctacgaccagagtgaatgggtttg

SEQ ID NO: 81081 - DNA, 1858 bp, Zea Mays
agtggagcttctcctcatgcaaacgcaggaggccaccgttcgacaccaccatcgcaagcgagacagaccggagccaactctgccgatcctaaagattcatgcatcgtaggaggatctgcatatccaccgttacggtgaccctattccttttcttcactcggtgtataatccccctttgctgcaatcaagcttctcaaacataataagcaaatagtctcttcacgtgattgccaaaattagtcaagacgggtgctctttgctgcgtggccgctaggccacatgggacgaagtctgaccctgcaagcagagatcgttctatggatcctactgagcctcgttggcgcataaactcgagcttctctcccccaacatcaaggagatgggactgtcgttattcatcagatggattgccccacagagttcatgatgctcctcatgatcacccaccttatgtttcatcattgtcatcccatagcaaaggaagcagaaatgcatttggcagtgatcagtacctcagtcaccatcattctgtgtctgatggagcactttcttattttgggagtccagctgacagccttcaggctccacgctggacgccctctcttcaaagatttgatcttggtgaattctctacccctgcaggaggatcaaggccagaaacttctgactatcctcagtcaagtgagaggccactgactgccacaagcagtttcagttctgcatccccattttcagaatcaagccagttagcttcatctaaatcagaagcgtgcaggatgcttgaggttggtaatgccgggcgagcgacaccaagtgatgacagccaagcttctcctctgtggcgtcgcagcttggcgagcccagatctcaagttccacaatgcaccgaatgaacttgggaagatggaaacctcacccgaaccgaacacaagctcaagaagggaagggttcagatggagcaacgccagcagttatgactttggatacgatggagatgccattgacatttcagatcatatcagcatcgagtcccagagatctcccacgagctcagcgaggttcctgaagtgtgggctgtgcgagagattcctgcaccagaaatcaccctggacctcgaacaggattgttcgaaacgccgacatgccagtggcagcagttctgccttgccgacatgtcttccacgcggattgcttggaggaaagcactgccaagacagaagtccatgaaccaccttgccccctgtgcgcgcgagccactgacgatgaagggcacgtgtcgttctcagaacctctgcatgttgccctccgatctgctcgcaggaaccttttgttgggcactggtgctggtgggaacagcggcatttctgaccctcctcgcactgatcgtggcttgaagaggaacaactctgcagtcatgcctaggcgcagcggcggcgcattgttccgcaatcgcttcaagaaacagttccccttcaaagcgaggatcgggaaggagctctttggcggtagggttctcaacaaggttggattgtctttgtcttcaggtcagcatgatgatcatcgacagcaagcgccaaagcatgaccggcccatgaagtagctagatcttagtggcacagagtataatatgttgtgtgccctcctgatattttatctatggcatctgttatcgaaacttggcatccatgcgcagcagtcgtccaagatgggggccctgtatggattatggaaggctgcttgcattgcgtgtaacagtagcaccttgccattgcatgtattttgcatgtagcacagtaagaatctatgccctgtgattgatatgttctgaatgttccgcttgatctgttcacattggctgct

SEQ ID NO: 81082 - DNA, 1032 bp, Zea Mays
gcgccggctatgtgatctaccgagctcctggtgtcgtgcatggtcacgcggtaggatgcgggggacgaggcgagggatggggactgccggactggggagtggggaggagaggaccggaggagagtaggagacccgcggagccgcgcactgccgcgacggtacaggctgcgagcggctgcgaagtgggctgtgtgttgggcttcgtctctgacgggctaagcgagctggatgcctgatcgatgcctcgcgggcgttcgacgtccctctgcccgtttgcggtagaatatgtatcgttccgttgcgttcactctgctctcctttttccctttctcccgttcacctttctctatcgcttttctttcccccatccccctttctttcctcgtggtgacgactgggctagtgctatcgtccttcgccaggtcttcgccggcgacgagcacctaccaggtgaccctattccttttcttcactcggtgtataatccccctttgctgcaatcaagcttctcaaacataataagcaaatagtctcttcacgtgattgccaaaattagtcaagacgggtgctctttgctgcgtggccgctaggccacatgggacgaagtctgaccctgcaagcagagatcgttctatggatcctactgagcctcgttggcgcataaactcgagcttctctcccccaacatcaaggagatgggactgtcgttattcatcagatggattgccccacagagttcatgatgctcctcatgatcacccaccttatgtttcatcattgtcatcccatagcaaaggaagcagaaatgcatttggcagtgatcagtacctcagtcaccatcattctgtgtctgatggagcactttcttattttgggagtccagctgacagccttcaggctccacgctggacgccctctcttcaaagatttgatcttggtgaattctctacccctgcaggagaactgtgacttgagcgctggactgaatttgaggtttctactggaaaggctaacacagtgtgctaacttttt

SEQ ID NO: 81083 - DNA, 2150 bp, Zea Mays
gcgccggctatgtgatctaccgagctcctggtgtcgtgcatggtcacgcggtaggatgcgggggacgaggcgagggatggggactgccggactggggagtggggaggagaggaccggaggagagtaggagacccgcggagccgcgcactgccgcgacggtacaggctgcgagcggctgcgaagtgggctgtgtgttgggcttcgtctctgacgggctaagcgagctggatgcctgatcgatgcctcgcgggcgttcgacgtccctctgcccgtttgcggtagaatatgtatcgttccgttgcgttcactctgctctcctttttccctttctcccgttcacctttctctatcgcttttctttcccccatccccctttctttcctcgtggtgacgactgggctagtgctatcgtccttcgccaggtcttcgccggcgacgagcacctaccaggtgaccctattccttttcttcactcggtgtataatccccctttgctgcaatcaagcttctcaaacataataagcaaatagtctcttcacgtgattgccaaaattagtcaagacgggtgctctttgctgcgtggccgctaggccacatgggacgaagtctgaccctgcaagcagagatcgttctatggatcctactgagcctcgttggcgcataaactcgagcttctctcccccaacatcaaggagatgggactgtcgttattcatcagatggattgccccacagagttcatgatgctcctcatgatcacccaccttatgtttcatcattgtcatcccatagcaaaggaagcagaaatgcatttggcagtgatcagtacctcagtcaccatcattctgtgtctgatggagcactttcttattttgggagtccagctgacagccttcaggctccacgctggacgccctctcttcaaagatttgatcttggatcaaggccagaaacttctgactatcctcagtcaagtgagaggccactgactgccacaagcagtttcagttctgcatccccattttcagaatcaagccagttagcttcatctaaatcagaagcgtgcaggatgcttgaggttggtaatgccgggcgagcgacaccaagtgatgacagccaagcttctcctctgtggcgtcgcagcttggcgagcccagatctcaagttccacaatgcaccgaatgaacttgggaagatggaaacctcacccgaaccgaacacaagctcaagaagggaagggttcagatggagcaacgccagcagttatgactttggatacgatggagatgccattgacatttcagatcatatcagcatcgagtcccagagatctcccacgagctcagcgaggttcctgaagtgtgggctgtgcgagagattcctgcaccagaaatcaccctggacctcgaacaggattgttcgaaacgccgacatgccagtggcagcagttctgccttgccgacatgtcttccacgcggattgcttggaggaaagcactgccaagacagaagtccatgaaccaccttgccccctgtgcgcgcgagccactgacgatgaagggcacgtgtcgttctcagaacctctgcatgttgccctccgatctgctcgcaggaaccttttgttgggcactggtgctggtgggaacagcggcatttctgaccctcctcgcactgatcgtggcttgaagaggaacaactctgcagtcatgcctaggcgcagcggcggcgcattgttccgcaatcgcttcaagaaacagttccccttcaaagcgaggatcgggaaggagctctttggcggtagggttctcaacaaggttggattgtctttgtcttcaggtcagcatgatgatcatcgacagcaagcgccaaagcatgaccggcccatgaagtagctagatcttagtggcacagagtataatatgttgtgtgccctcctgatattttatctatggcatctgttatcgaaacttggcatccatgcgcagcagtcgtccaagatgggggccctgtatggattatggaaggctgcttgcattgcgtgtaacagtagcaccttgccattgcatgtattttgcatgtagcacagtaagaatctatgccctgtgattgatatgttctgaatgttccgcttgatctgttcacattggctgct

SEQ ID NO: 81084 - DNA, 2590 bp, Zea Mays
cttcctcgtcttgcgctcccctcctataagtacaaccccacaacaaagacatgagtgtgcaagtgtggttgtctcctaaacggggtgcctctcttccagtcttcctcaagttatccacttctctctcgatcgaagtcgaagcacaaaccctactgcccgcccacctcccacgtagtgtgtgtgctactcgatcttgtgtccactctcgcccacacacaaacttccacacgaaccaaagattccaatctgaaccaacgttattctgtcgttctccgcctaaccagcaagcagtcgatcgatcgatggagggaagcagaaacagcccggacaggcagtcgtcgggcggcagccctgaggagcgcggaagcggcggtagcggaggccgtggcgccggggagccggtgcggtcgcggtggacgccgaagccggagcagatactgatcctcgagtccatcttcaacagcggcatggtcaacccgcccaaggatgaaaccgtccgcatccgcaagctgctcgagcgcttcggcgccgtcggtgacgccaacgtcttctactggttccagaaccgccgctcccgctcgcgccgccgccagcgccagatgcaggccgccgcggcggcggcggcaacagcggcggcggcctcctctgcggccaacagctctcccggagctagcgcaaccgtcggccttccttctggtgctctacaatatcccttggtcatgagcgggagcgggaccgcctgccagtatgagcagcaggcgagctcctcgtcgtcgtcgggaagcactgggggctcgtctcttgggctgttcgcgctcggagccggggtgcccagcaccggcggtgggttcttccaggagtcgtgtggcgcttcgtcgccactggcgacagggctgatgatgggggacgtggaccgcagtggcggcagcgacgatctcttcgccatctcccggcagatggggttcgcggcggcgagcccagtcgcctcggcttcggtggcgcctccgagcacaacggcacaccaccagcagtattactcatgtcaatcacctacagggacgatcacggtgttcatcaatggagttccaatggaggttcccagtggtccaatagacatgcgagccattttcggccaggacgtgctgctcgtccattccaccggggccctcctcccagtcgacgactatggaattctaacgcagagcttgcagacgggcgaaagctatttcttggtaatctcacatatcgactctctcatgtactccctccattctaaattgtcatggtcatactatgcatctagatactaaaagctaaatatctaaaaacccaaaataacttacaattcagaaccaagggaatatatatttcatccgatcactggtatttaatcctctcaaataaacactaattatatgcacatcggcgtacattacgttgtatatataggcatacaacaagcatgcatgtatataagtatatgcatctatatatgagatcatttgaaatagtgcatttatcattattggtaagtattgtttatttttccttttctttgcatgtatatacttgctccgttctaattataaatcattctgcctttttagttttgctatgtatctcttctattctaaattttatgatattttagcttttatatatatatatatataatttttactatatatacactcactatatatagatctatgatatatctaaaagagtaaaaacaaattataagttgaaacacaaagaatatatagacatactgaatatctatgtacataacaaataaaaggtatgtatttaagaagtcataagaaattatcaattaaaataaagaaagtgtttcattgctcatcatgtacgtgtatgtatatatacgcaaaccccttacataagctacaacaattgttttgctgttatttatccacacaggtagcaaggccaacttaaaactgcccgcacctagttagattgtagcgcagtctctctgccggccggtctctactggatattcagatgggacgcagttcatgatcaatcaaggtgggtccttttgcacgcaaatgatattgtccatcattcatatacagtccttcgagaagaaaagttagctaccaagaacaatatatgtatattgcacctcaagcaagtacgtacacatatgtccttgcaacataagagagcgtacagtacatgggcggttcagattggattatgagaattacagtgtatgcatgggtgttttctctcacgcatcattttctttacaaggatatgtgcatgtgaatgctgaatacatgcatggaatctccttgacagtcgagctacatatttattttagctagacagttgcacctttgaaacgatttgatttataagtatgtaatgttgtacgtctatatatgtcgactggaccgtgtttggaatgtctgtccaccaatttagaagagagagtactccttttggatgtttatatatatgtcgaccgtgttagacttcatattttgtatactttgtatttcaagaagagagagtactccttttggatgtttattaattaaatgacgacattactaattaa

SEQ ID NO: 81085 - DNA, 1889 bp, Zea Mays
gtctcggccttatattttttgaattaaccctctaaagatctctcaagagatgctatattaaataggattgtaaatgtcctaattgggtcggcacttcaccattccctgcatgtatacttctgccttacattagtatcatcagttaacaaaagttaggtgtatattacctgtagttagcaagttaaagcaaaatgaacgccgtaccgtacaacaaagctaacggtgtgttgtaatccaaacatgcatgcagctactgctgatcatattttcaagcatgctatgctagacttattagtttgactccctcactcgagaaaaaaaaacgtgaccacgagaatgaagaccgacctaacgaggacgatcacggtgttcatcaatggagttccaatggaggttcccagtggtccaatagacatgcgagccattttcggccaggacgtgctgctcgtccattccaccggggccctcctcccagtcgacgactatggaattctaacgcagagcttgcagacgggcgaaagctatttcttggtaatctcacatatcgactctctcatgtactccctccattctaaattgtcatggtcatactatgcatctagatactaaaagctaaatatctaaaaacccaaaataacttacaattcagaaccaagggaatatatatttcatccgatcactggtatttaatcctctcaaataaacactaattatatgcacatcggcgtacattacgttgtatatataggcatacaacaagcatgcatgtatataagtatatgcatctatatatgagatcatttgaaatagtgcatttatcattattggtaagtattgtttatttttccttttctttgcatgtatatacttgctccgttctaattataaatcattctgcctttttagttttgctatgtatctcttctattctaaattttatgatattttagcttttatatatatatatatataatttttactatatatacactcactatatatagatctatgatatatctaaaagagtaaaaacaaattataagttgaaacacaaagaatatatagacatactgaatatctatgtacataacaaataaaaggtatgtatttaagaagtcataagaaattatcaattaaaataaagaaagtgtttcattgctcatcatgtacgtgtatgtatatatacgcaaaccccttacataagctacaacaattgttttgctgttatttatccacacaggtagcaaggccaacttaaaactgcccgcacctagttagattgtagcgcagtctctctgccggccggtctctactggatattcagatgggacgcagttcatgatcaatcaaggtgggtccttttgcacgcaaatgatattgtccatcattcatatacagtccttcgagaagaaaagttagctaccaagaacaatatatgtatattgcacctcaagcaagtacgtacacatatgtccttgcaacataagagagcgtacagtacatgggcggttcagattggattatgagaattacagtgtatgcatgggtgttttctctcacgcatcattttctttacaaggatatgtgcatgtgaatgctgaatacatgcatggaatctccttgacagtcgagctacatatttattttagctagacagttgcacctttgaaacgatttgatttataagtatgtaatgttgtacgtctatatatgtcgactggaccgtgtttggaatgtctgtccaccaatttagaagagagagtactccttttggatgtttatatatatgtcgaccgtgttagacttcatattttgtatactttgtatttcaagaagagagagtactccttttggatgtttattaattaaatgacgacattactaattaa

SEQ ID NO: 81086 - DNA, 1584 bp, Zea Mays
atcgggtttcgggtacccattgccatctctacccgcgaagggtccagaacggttaccgaccccggtagcaagcaaagaagcacaatgcatcggcaactgagccacggtagcacgcgtcggcctccggtgcgaagcgacgcggcggtcacgtacgtgtcactggttcctgtctccctacatgaatcccacgtgtccatgcattcggatgtacgtgtcccgctctcatttctcaggagagcggtatttatctacacggcgtttcgaaaccagtaagacgatctgcgaaacaaacactagtgcgtttgcgagagaaaccgagaaagagaagctacagagtcactgaccgaccgctatggcatcgaggcagaacacgcgtgaggcgcgcgccgaggccgacgcgcggcgcgccgtggaggagctggctcgggcgcgggacgagcacctcgagaaggcggaggtgaacgcccgctcggccgcggacgagatcgcgcgctcccgcgccgaccgcggtgccgccggtggcggcggcatcctggagagcgtgcaggagggcgccaggtccttggccagcgccgtgggccgcaccttcggtggcgccaaggacgcgaccgtggacaagacctcgcagacggcgcacaccgcgggcgacaagctcggcgagtacagggactacaccgccgacaaggcccgggaggccaacgacagcgtctcgcgtaagacgggcgagacggcggaggccacccggaacaagctgggcgagtacaaggacagcgccgtggagaaggcgagggagaccaaggacgcggtggcgcagaagacgagcgagaccgcggaggcgaccaagaacaagctcggggagtacaaggacgcggcggccggcaaggcgcgggaggccgcggacaccaccgccggcaaggcgagggaggccaaggacgcgaccatgcagaaggcccaggagacgagggacgccaccgccgacaaggcgagggaggcgagagacgtgaccaggcagaaggcgggcgagtacaccgacgccagcagggaggccgcgcaggaggccagggacaggtcccgagccacagcacagaccgccgctgacaaggctagggagacggccagcactcacgacactgatagggagcagggacaaggtctgctgggggcgctggggaacgtgacgggcgcgatcaaggagaagctgacgctgggccaaggtcagcacgtcgacgtccggctgggcggcgaggacgagcgcgcggcgaaggaacgcgcggcggagaaggcggcgtcggtgtacttcgaggagaaggaccggctgatgcagcagcgtgcggcggagcgggtggaccagtgcgtcgagaagtgcgtggaggatgtgatcatgtgatgccgtggcgcgcgcccgcccctacgtgccgccccctactgtggcgtccgtgcatggtcgatgagcgataataaataaacttgttaaactagtagcctcccgttgtgtttaacttcatttccgggcccttgttttgggctgtatgttttcgctccttctgtactctggtagtggtactctatccaatacacctgccg

SEQ ID NO: 81087 - DNA, 376 bp, Zea Mays
caacttttactaattctataatattttatctttatgtattacaaatgcacctattgaaacagctttaatccaaaggaaacggcagactgcaggttcaaggcatgcagctgcaagctgcaactacaggtactgccatcgcaaatcagtacaaaacgtgactgcctgtccctggttctgtgattaacacaactctgctacctccatacctagaccaatcaagatcaccccaaatgtaatatgtgatgtgcttcttctgcgcgaacagggagaagggatccatcaggtgcatatgacgttttcattggccagcagtcaggactgagaccacctcatccttcttcccgtacatgacgttccacgagtccagccagcagcg

SEQ ID NO: 81088 - DNA, 2500 bp, Zea Mays
ccggcaaagagataaaccgaggcaaaggcttccctccgcaggtccaattagacgtgtgacatcaacaaacttgaagtacttgaacctgtcacacaataatcttcagggaactttaccgatcacatttggaagctgttcagtagttgatttgagtggaaacatgctgtatgggaacttatcagttgcccgaacatggggaaattatctccagatggttgatttgagctcaaacagattaacaggaagttggccaaatgagacaacccagtttttaaggctgacatctttgaggatttccaacaacttgctatcaggagaactgccaattgtccttggaacctatccagagctgattttcattgacctcagtattaatcagctgcatggacctttgcctggaaatctgtttacagcggttaagctgacttttcttaatctttcaggcaacagttttacagggactctcccccttcgaaattccgataccaagaactcgacttctatagacttgtccattcttcctgtgcaaacttcaaacctctcctatgttgatctttcaagcaattttttgcacggctcactgcctatgggcattggtgatttgagcgcgttgacattgctgaaccttcgtcagaacaactttactggcgaaatcccaagaacaatcaccaaacttaagaatctcttatacattgacttatcaagcaacaatttcaatggtagcatacctgatggcctccctgatgatctggtcgaatttaatgtttcctacaactacctgtctggctctgttccaagtaatttactgaaattcccagattcatctttccatccagggaacgaattgctcgttcttcctcgctctgaatcattaaatggttctgacaaatcagatgaggcaagacacggcttgaagcgtgggattctatatgcattgattatctgtgttgttgtatttgttactgggattattgcgcttttgcttgttcattggaagatcagtagctggaaaagtagggaaaaaggtactggccaaggtaaacatgtgggtcaagtccagagtgctcagagaagtgcagaaatttcaacaactgaaatgcatgatgtagcattagaatcgtcaccttctgcagagtatggagctgtttcattgcctggcaaggaaagacgacatgaagcccaagatgcgccaattgatgctgcttatttcaacgaaccagcaggtagtagctcagcccgtaaagacagcacaaagtcttcgatgccttctttatcatcgtcgcctcctgatgcacgctcccagcatcatcactctatccttagagtgcactctcctgataaactggttggggatttacatcttttcgacaattcagttgtgttcacggctgaagagctctcttgtgcccctgctgagataattggcaggagctgccatgggacatcctacaaggctacacttgataacgggtacatgctgacagtgaagtggctgaaggagggctttgctaagagtaagaaagaattttcccgtgaaataaagaagcttggcagtgtaaggcaccccaatcttgtccccttgcgtggctactactggggccccaaagagcatgagaggatcatgatatcagactatgcagatgccacatctctgtctacctacttgtctgaatttgatgagcggaatctcccacccctatcagctggacagcggctgaacattgcgattgatattgcccgctgtctagattacctgcacaacgagcgggctgatgactccaatcggcatggcggagcaggtcctaaacgccggcgcgctaggatattcccctcctgagttttcaagcaccagcaagccatgcccatctctgaagagcgacgtgtatgccttcggtgtcatcctgctggagttgctgacagggaagattgccggtgagatcatctgcatgaacgatggcgtggtcgacctgaccgactgggtgaggatgctggatctggaggagcgtgtctcggagtgctacgacaggcacatcacgggtgttgagagctcggaaggcgccccacaggcactggatggcatgctgcgcatcgccctccggtgtatccggtcagcatcggagaggccggaggtccggacggtgtttgaggatctcttgtccttatcgtcgtgaccgtagttattggtagtgtacatctcgtacttgcatcagcttgtggaaacttggagggtatactaacaattgctaggatttcggggtgatcaggtgatgtgtgtgtagtctccttgagcattcattgtttgggtcgctctttctgggaatagttgattcgtttttagttagtccacaattttagcagtagatgattgtgagaataatgtttgtgcattgtgatttcagacactagaaaggaaaataaagatagtcttattgatttgttgctctgatgccctccaacagtatgtattcctatgtaccactaatcaaatgcgcaaataact

SEQ ID NO: 81089 - DNA, 3328 bp, Zea Mays
gctcccagtcgccctccttcccaagcaacgaggcgattcctccctctggcctcgcccgcccaggggaaagcatcaatcaggtcaagcccaactggcaactggaaggagaagcggatgcggaaggtggacaccttcgcgccgcacaacgatggccaccaatggaggaagtacggcgagaagaagatcaacaacaccaacttccccaggtattactacagatgcacgtacaaggacaacatgagctgcccggccacgaagcaggtgcagcagaaggaccacagcgacccgccattgtacgcggtcactactacagcgaccactcgtgcaacagcgccttcctcccgctctccccctccgagttccagctgcggacaccgtccgggaaggccgtctccatctgcttcgactcctcgtccggggcggcggcggccgtggcgtcggtcgccaccaatgctagcggcggctcgccctcttccagcgccgcggcggcgcggcgaggcacgccgccggatatcagttacccgtccgacctgcggcggtctgacacttacccgtggggcgccggcgccgtggagcagaagctggcgtcctgcgccaccgagtgccacgacgccttctcggccggcgccgtgccggaggaggtggtagatgcaggcagatttgggtctatcaggttcttccattttttgtaaattcatcggtggaaggcaactgattttacttcgacaaactaaggccctgttccaatctcgcgagataaactttagcagctattttttagctacttttagccatttataatctaaacatgagagctaatggtgataattgaaactaaactttagcacttcaattcatatagctaaagtttagcaggaagctaaagtttagctcatgagattgaaacggggcctaatatgatacagatgtttcttttttacatgccgaagcttacccgacattcgcatgcaactttttttttcttggttcaaaatcgaaatagcattgctaatgttaatccagcggttcatttctccgtgctgtgcctgttaattaacgtatcagttagttaacgtatattctgatgttcaggataatatttatataaataaaaaatatagcaaaaataaaatgatgttcctataaaataaaatttctgggttacgtaaggttagggacgacagcaggcccgggttaggtctgctaaataataagacttcagctcgtgctgatgaggcaaagaacatggttaactgaaatgcagatgaaacactacatatataataaagccaggtcggtggcaaaggattttaaacagcgatatgatatagattataaaaattacaatgtattttttattacattctagaggagaggaggaagtctatcttagtaaccaccggagtatgagagcacttcatagcccaatcatgtgcaagctgtcaaagctgtttatggtatgaagccatctctaagagtttgatattttcaattcaatgataaatttctgtatcaagattttcatgctttaaagacagatatttttctatttttaaacaaggaaagtgtctccatattacatgtacggactcatattgtttaaccgtacaagatcttttcttagaaacagccgtacaagatgaatattctcctggaattgcgagtgtgataaactcccttatctactgggccaggtgagccagaaaataaaaaataacgtctgggatgggccagaaaacaaaactggattggatcgaggcccggcggaagggaagaagatattttgcggttttgtgagttgtgatggcttcaggcagtttggtagattgtggcgatagaaggacggccagtttagcctagccacgctcgctctacctcctcaatcctgattagcttcaaaccgccatggccatggggctccccggcctccgctgccaccgcctcctcgctcgcgggtcactccctccactcggtcccgccctctatcgcaggcccctggagcgaacctcggctctccgctactcctccctccaagctcaagctggggacagtattggggaggaggccctgcgcatgttccttgaggacaggcaactgcacggcgatttcgtcaccaaggtctctgacatggtctggaggaggaatggcgccaatgttggtgcggctgaggcgaccacgggccaagggagtgcaatagatgttgctcagcctgaagacgtgcgggaagatgctgtggacgagggaatgttgagactagcggcgattactagtgattgggtgtccggtgacagcagccctcctttaagcaagaggctttctgccgaggaaaggcagaacgagagcaacaaaaggaaggagctgaatcttttgaaatatgaagcactcaaggatgaattgctgctcttgaccgcaggaactggagcagcatgtagtttatattgtctcctggttttctctctggagactgctgtcagttatgctttgggggttggtttcagttgcttgtatcttcaacttctgtatcaacatgctgataacctatcaaaggaagatattccagaagtttttctaaagaagaaagtgaagaaaattggcattacaagtgaagatttgaagaatacaatagagaagacattgggtggtgcaggactagctctttcatctccaaggcttataattcctgccgtgatttatggattgtcagctttatcacatcacttccaaaatagctttttcagttttgaggttcttccagggatgatgggtttcctcgcgtacaaggctgcagctttggttcaagtctacagagacaacgaggacctccgcttgatacttcctgatgaagaggccgctgacagtgacagcacttgatttatacgaattagagattatgttaacctagtggttgttgacaaatacaaaacagatctgttcaccaccgagtcaagcttcacttttgaacttttttttgtctttaggagatcctgaaattcgtttgcttatcttcttggaaggggggaaacaggaagagttgaatgaaaaatcattatatgttagagacagctgaaagctcaaaggaacacacattttttttgtccttgggtaactatacaaaactgttgcaagtgcagttggaagcaagaatgcgcaacagtaccattgtagtacaatggtttgcaacagtagccaatccattctacaagttggagatttgcatagaagagtcgttcttacaaattacaggatgcccaaaacagtttacagtttcaatggtcatattatatacgtacaagtacacactaatatatatatgggacatcgaagtatg

SEQ ID NO: 81090 - DNA, 3933 bp, Zea Mays
gctcccagtcgccctccttcccaagcaacgaggcgattcctccctctggcctcgcccgcccaggggaaagcatcaatcaggtcaagcccaactggcaactggtactactacttttctttttcttttttctttattttccttctttatttattattatccttgctagctccattccggaaacaagattttttcaaccgatatggccgaagaagagagatatatgtttcgataaataaataaacgaagtacaagcgacacatggctccggctgtgttgagctgagctggggccccagaagaagccgcacagaaatttctcagggggaccccctggccttccccccgggccgtcggtgaggggggtggcacgtgacagcgatacgcccggaggccaagataatctttgcatcgtaccccgtctcggttccgggccggaggtctcgattattatggacttctctcccgtcccttctctctcttcgtgatgtgttgttatttagtaagctgttaagctaaagccagggccgctcctctgctgttaagctaaagcgcgctggcctgctcccaccgccgcccaccccccccgtcttcttcctcacccatctccgccagtccccttcctcactgcatttcttggttttctccctccaccggaaccaagcgatgtctccggcgccgagttcgcatcattcgcaaaccaattcgaggaaggagaagcggatgcggaaggtggacaccttcgcgccgcacaacgatggccaccaatggaggaagtacggcgagaagaagatcaacaacaccaacttccccaggtattactacagatgcacgtacaaggacaacatgagctgcccggccacgaagcaggtgcagcagaaggaccacagcgacccgccattgtacgcggtcactactacagcgaccactcgtgcaacagcgccttcctcccgctctccccctccgagttccagctgcggacaccgtccgggaaggccgtctccatctgcttcgactcctcgtccggggcggcggcggccgtggcgtcggtcgccaccaatgctagcggcggctcgccctcttccagcgccgcggcggcgcggcgaggcacgccgccggatatcagttacccgtccgacctgcggcggtctgacacttacccgtggggcgccggcgccgtggagcagaagctggcgtcctgcgccaccgagtgccacgacgccttctcggccggcgccgtgccggaggaggtggtagatgcaggcagatttgggtctatcaggttcttccattttttgtaaattcatcggtggaaggcaactgattttacttcgacaaactaaggccctgttccaatctcgcgagataaactttagcagctattttttagctacttttagccatttataatctaaacatgagagctaatggtgataattgaaactaaactttagcacttcaattcatatagctaaagtttagcaggaagctaaagtttagctcatgagattgaaacggggcctaatatgatacagatgtttcttttttacatgccgaagcttacccgacattcgcatgcaactttttttttcttggttcaaaatcgaaatagcattgctaatgttaatccagcggttcatttctccgtgctgtgcctgttaattaacgtatcagttagttaacgtatattctgatgttcaggataatatttatataaataaaaaatatagcaaaaataaaatgatgttcctataaaataaaatttctgggttacgtaaggttagggacgacagcaggcccgggttaggtctgctaaataataagacttcagctcgtgctgatgaggcaaagaacatggttaactgaaatgcagatgaaacactacatatataataaagccaggtcggtggcaaaggattttaaacagcgatatgatatagattataaaaattacaatgtattttttattacattctagaggagaggaggaagtctatcttagtaaccaccggagtatgagagcacttcatagcccaatcatgtgcaagctgtcaaagctgtttatggtatgaagccatctctaagagtttgatattttcaattcaatgataaatttctgtatcaagattttcatgctttaaagacagatatttttctatttttaaacaaggaaagtgtctccatattacatgtacggactcatattgtttaaccgtacaagatcttttcttagaaacagccgtacaagatgaatattctcctggaattgcgagtgtgataaactcccttatctactgggccaggtgagccagaaaataaaaaataacgtctgggatgggccagaaaacaaaactggattggatcgaggcccggcggaagggaagaagatattttgcggttttgtgagttgtgatggcttcaggcagtttggtagattgtggcgatagaaggacggccagtttagcctagccacgctcgctctacctcctcaatcctgattagcttcaaaccgccatggccatggggctccccggcctccgctgccaccgcctcctcgctcgcgggtcactccctccactcggtcccgccctctatcgcaggcccctggagcgaacctcggctctccgctactcctccctccaagctcaagctggggacagtattggggaggaggccctgcgcatgttccttgaggacaggcaactgcacggcgatttcgtcaccaaggtctctgacatggtctggaggaggaatggcgccaatgttggtgcggctgaggcgaccacgggccaagggagtgcaatagatgttgctcagcctgaagacgtgcgggaagatgctgtggacgagggaatgttgagactagcggcgattactagtgattgggtgtccggtgacagcagccctcctttaagcaagaggctttctgccgaggaaaggcagaacgagagcaacaaaaggaaggagctgaatcttttgaaatatgaagcactcaaggatgaattgctgctcttgaccgcaggaactggagcagcatgtagtttatattgtctcctggttttctctctggagactgctgtcagttatgctttgggggttggtttcagttgcttgtatcttcaacttctgtatcaacatgctgataacctatcaaaggaagatattccagaagtttttctaaagaagaaagtgaagaaaattggcattacaagtgaagatttgaagaatacaatagagaagacattgggtggtgcaggactagctctttcatctccaaggcttataattcctgccgtgatttatggattgtcagctttatcacatcacttccaaaatagctttttcagttttgaggttcttccagggatgatgggtttcctcgcgtacaaggctgcagctttggttcaagtctacagagacaacgaggacctccgcttgatacttcctgatgaagaggccgctgacagtgacagcacttgatttatacgaattagagattatgttaacctagtggttgttgacaaatacaaaacagatctgttcaccaccgagtcaagcttcacttttgaacttttttttgtctttaggagatcctgaaattcgtttgcttatcttcttggaaggggggaaacaggaagagttgaatgaaaaatcattatatgttagagacagctgaaagctcaaaggaacacacattttttttgtccttgggtaactatacaaaactgttgcaagtgcagttggaagcaagaatgcgcaacagtaccattgtagtacaatggtttgcaacagtagccaatccattctacaagttggagatttgcatagaagagtcgttcttacaaattacaggatgcccaaaacagtttacagtttcaatggtcatattatatacgtacaagtacacactaatatatatatgggacatcgaagtatg

SEQ ID NO: 81091 - DNA, 3308 bp, Zea Mays
gctcccagtcgccctccttcccaagcaacgaggcgattcctccctctggcctcgcccgcccaggggaaagcatcaatcaggtcaagcccaactggcaactggaaggagaagcggatgcggaaggtggacaccttcgcgccgcacaacgatggccaccaatggaggaagtacggcgagaagaagatcaacaacaccaacttccccaggtattactacagatgcacgtacaaggacaacatgagctgcccggccacgaagcaggtgcagcagaaggaccacagcgacccgccattgtacgcggtcactactacagcgaccactcgtgcaacagcgccttcctcccgctctccccctccgagttccagctgcggacaccgtccgggaaggccgtctccatctgcttcgactcctcgtccggggcggcggcggccgtggcgtcggtcgccaccaatgctagcggcggctcgccctcttccagcgccgcggcggcgcggcgaggcacgccgccggatatcagttacccgtccgacctgcggcggtctgacacttacccgtggggcgccggcgccgtggagcagaagctggcgtcctgcgccaccgagtgccacgacgccttctcggccggcgccgtgccggaggaggtggtagatgcaggcagatttgggtctatcaggttcttccattttttgtaaattcatcggtggaaggcaactgattttacttcgacaaactaaggccctgttccaatctcgcgagataaactttagcagctattttttagctacttttagccatttataatctaaacatgagagctaatggtgataattgaaactaaactttagcacttcaattcatatagctaaagtttagcaggaagctaaagtttagctcatgagattgaaacggggcctaatatgatacagatgtttcttttttacatgccgaagcttacccgacattcgcatgcaactttttttttcttggttcaaaatcgaaatagcattgctaatgttaatccagcggttcatttctccgtgctgtgcctgttaattaacgtatcagttagttaacgtatattctgatgttcaggataatatttatataaataaaaaatatagcaaaaataaaatgatgttcctataaaataaaatttctgggttacgtaaggttagggacgacagcaggcccgggttaggtctgctaaataataagacttcagctcgtgctgatgaggcaaagaacatggttaactgaaatgcagatgaaacactacatatataataaagccaggtcggtggcaaaggattttaaacagcgatatgatatagattataaaaattacaatgtattttttattacattctagaggagaggaggaagtctatcttagtaaccaccggagtatgagagcacttcatagcccaatcatgtgcaagctgtcaaagctgtttatggtatgaagccatctctaagagtttgatattttcaattcaatgataaatttctgtatcaagattttcatgctttaaagacagatatttttctatttttaaacaaggaaagtgtctccatattacatgtacggactcatattgtttaaccgtacaagatcttttcttagaaacagccgtacaagatgaatattctcctggaattgcgagtgtgataaactcccttatctactgggccaggtgagccagaaaataaaaaataacgtctgggatgggccagaaaacaaaactggattggatcgaggcccggcggaagggaagaagatattttgcggttttgtgagttgtgatggcttcaggcagtttggtagattgtggcgatagaaggacggccagtttagcctagccacgctcgctctacctcctcaatcctgattagcttcaaaccgccatggccatggggctccccggcctccgctgccaccgcctcctcgctcgcgggtcactccctccactcggtcccgccctctatcgcaggcccctggagcgaacctcggctctccgctactcctccctccaagctcaagctggggacagtattggggaggaggccctgcgcatgttccttgaggacaggcaactgcacggcgatttcgtcaccaaggtctctgacatggtctggaggaggaatggcgccaatgttggtgcggctgaggcgaccacgggccaagggagtgcaatagatgttgctcagcctgaagacgtgcgggaagatgctgtggacgagggaatgttgagactagcggcgattactagtgattgggtgtccggtgacagcagccctcctttaagcaagaggctttctgccgaggaaaggcagaacgagagcaacaaaaggaaggagctgaatcttttgaaatatgaagcactcaaggatgaattgctgctcttgaccgcaggaactggagcagcatgtagtttatattgtctcctggttttctctctggagactgctgtcagttatgctttgggggttggtttcagttgcttgtatcttcaacttctgtatcaacatgctgataacctatcaaaggaagatattccagaagtttttctaaagaagaaagtgaagaaatttgaagaatacaatagagaagacattgggtggtgcaggactagctctttcatctccaaggcttataattcctgccgtgatttatggattgtcagctttatcacatcacttccaaaatagctttttcagttttgaggttcttccagggatgatgggtttcctcgcgtacaaggctgcagctttggttcaagtctacagagacaacgaggacctccgcttgatacttcctgatgaagaggccgctgacagtgacagcacttgatttatacgaattagagattatgttaacctagtggttgttgacaaatacaaaacagatctgttcaccaccgagtcaagcttcacttttgaacttttttttgtctttaggagatcctgaaattcgtttgcttatcttcttggaaggggggaaacaggaagagttgaatgaaaaatcattatatgttagagacagctgaaagctcaaaggaacacacattttttttgtccttgggtaactatacaaaactgttgcaagtgcagttggaagcaagaatgcgcaacagtaccattgtagtacaatggtttgcaacagtagccaatccattctacaagttggagatttgcatagaagagtcgttcttacaaattacaggatgcccaaaacagtttacagtttcaatggtcatattatatacgtacaagtacacactaatatatatatgggacatcgaagtatg

SEQ ID NO: 81092 - DNA, 2651 bp, Zea Mays
cttctctcccgtcccttctctctcttcgtgatgtgttgttatttagtaagctgttaagctaaagccagggccgctcctctgctgttaagctaaagcgcgctggcctgctcccaccgccgcccaccccccccgtcttcttcctcacccatctccgccagtccccttcctcactgcatttcttggttttctccctccaccggaaccaagcgatgtctccggcgccgagttcgcatcattcgcaaaccaattcgaggaaggagaagcggatgcggaaggtggacaccttcgcgccgcacaacgatggccaccaatggaggaagtacggcgagaagaagatcaacaacaccaacttccccaggtattactacagatgcacgtacaaggacaacatgagctgcccggccacgaagcaggtgcagcagaaggaccacagcgacccgccattgtacgcggtcactactacagcgaccactcgtgcaacagcgccttcctcccgctctccccctccgagttccagctgcggacaccgtccgggaaggccgtctccatctgcttcgactcctcgtccggggcggcggcggccgtggcgtcggtcgccaccaatgctagcggcggctcgccctcttccagcgccgcggcggcgcggcgaggcacgccgccggatatcagttacccgtccgacctgcggcggtctgacacttacccgtggggcgccggcgccgtggagcagaagctggcgtcctgcgccaccgagtgccacgacgccttctcggccggcgccgtgccggaggaggtggtagatgcaggcagatttgggtctatcaggtgagccagaaaataaaaaataacgtctgggatgggccagaaaacaaaactggattggatcgaggcccggcggaagggaagaagatattttgcggttttgtgagttgtgatggcttcaggcagtttggtagattgtggcgatagaaggacggccagtttagcctagccacgctcgctctacctcctcaatcctgattagcttcaaaccgccatggccatggggctccccggcctccgctgccaccgcctcctcgctcgcgggtcactccctccactcggtcccgccctctatcgcaggcccctggagcgaacctcggctctccgctactcctccctccaagctcaagtattggggaggaggccctgcgcatgttccttgaggacaggcaactgcacggcgatttcgtcaccaaggtctctgacatggtctggaggaggaatggcgccaatgttggtgcggctgaggcgaccacgggccaagggagtgcaatagatgttgctcagcctgaagacgtgcgggaagatgctgtggacgagggaatgttgagactagcggcgattactagtgattgggtgtccggtgacagcagccctcctttaagcaagaggctttctgccgaggaaaggcagaacgagagcaacaaaaggaaggagctgaatcttttgaaatatgaagcactcaaggatgaattgctgctcttgaccgcaggaactggagcagcatgtagtttatattgtctcctggttttctctctggagactgctgtcagttatgctttgggggttggtttcaggtaagcaagctctcttcacagcttaggagatttttactcatgatttcagctgaagttttaacaagtgctttgagtattctgaaacttgtcgctctatattgagtagttgcttgtatcttcaacttctgtatcaacatgctgataacctatcaaaggaagatattccagaagtttttctaaagaagaaagtgaagaagtaggtttcaatattccacctgcagtctgtatcccattatttggttcctcacattttgattgtttaagtaaatatgactatttatgcaaatgctagaattggcattacaagtgaagatttgaagaatacaatagagaagacattgggtggtgcaggactagctctttcatctccaaggcttataattcctgccgtgatttatggattgtcagctttatcacatcacttccaaaatagctttttcagttttgaggttcttccagggatgatgggtttcctcgcgtacaaggctgcagctttggttcaagtctacagagacaacgaggacctccgcttgatacttcctgatgaagaggccgctgacagtgacagcacttgatttatacgaattagagattatgttaacctagtggttgttgacaaatacaaaacagatctgttcaccaccgagtcaagcttcacttttgaacttttttttgtctttaggagatcctgaaattcgtttgcttatcttcttggaaggggggaaacaggaagagttgaatgaaaaatcattatatgttagagacagctgaaagctcaaaggaacacacattttttttgtccttgggtaactatacaaaactgttgcaagtgcagttggaagcaagaatgcgcaacagtaccattgtagtacaatggtttgcaacagtagccaatccattctacaagttggagatttgcatagaagagtcgttcttacaaattacaggatgcccaaaacagtttacagtttcaatggtcatattatatacgtacaagtacacactaatatatatatgggacatcgaagtatg

SEQ ID NO: 81093 - DNA, 1391 bp, Zea Mays
ctaccacgcctcggcggactggatgcaagtcgggcttccacccttcacgcgcgcttggcccgctacgacgcttcgtcttcgtctgtccaccaaccagaccaacctccggccacgggctcacggcggcgagcggccccagctccgatggcgccaacggttgagatcagccacctcaccttcacctaccccggcatcgacggccgcccgccacccggcgcgccaccgctcatcgaggacgtctgcttctccctcgacgccggccaacgatgcctcctcctcggctccaacggcgcaggcaagacgacgatactgaagatactaggcgggaagcacatggtggatccgagcatggtgcgggtcctgggaaggtccgccttccacgacacggcactcacctcctccggcgacctctcctatctcggcggtgagtggagacgcgacgtggcctttgctggctaccaggtgaacattcagatggatatatcggcagagaagatgatttttggtattgctggtgttgatccaaagaggagagacgagcttatcaaggcagattttagacatcgacctcacctggcgcatgcacaaggcatcagatggtcagaggagacgtgtccagatttgcatgggacttcttaagtcattcaaggttcttcttcttgatgagatcacagttgatcttgatgttctggcaagatcaaatctgttatcgtatcttaaaaaggaatgtgaggaaagaggtgcaacaatcatctatgccacacatatttttgatggtcttgatgattggccaacacacattgtttacattgctcatgggaaactgcaattagcagtgcctttggaaaaggtgaaagaaatgagtcagttatctctcatgaggactgtggagagctggttgaggaaagaaagaaatgaggacaggaggaggagaaaggagcgaaaggagaaaggcctcccagaattcgacaaggttgtcgagggtagtcgggttataggtgatccagcaaagaacgcagacagagttataaacaacgggtgggcagctggacggcttacctcgacgattgcaggagaggaaaatttcgtcttcagctctaacagcgtacttaggcaatgatctagctttgttttcctttatctatacattgaaaacggtaaataatagtcttgcggatccaatagagatatcgttggagctttgtcatttatagcgaaagttctgtcaggaaaggagaattcactctatatagtttggatttgaggatttacactgtaattttattcgcagctgagtgttcgagaaaaagaaattgcactgtaacaacatatatatactgcaccaaatatttgtgtggtcatatttatttctacaggggctacgcataact

SEQ ID NO: 81094 - DNA, 945 bp, Zea Mays
ctgcattcatccatctccaagccttgctcttcatagggcttttagtttgcaagtcttgaattctgtagatgatgtgttgttggtaatttgaattgacttcattaaacattttagacatcgacctcacctggcgcatgcacaaggcatcagatggtcagaggagacgtgtccagatttgcatgggacttcttaagtcattcaaggttcttcttcttgatgagatcacagttgatcttgatgttctggcaagatcaaatctgttatcgtatcttaaaaaggaatgtgaggaaagaggtgcaacaatcatctatgccacacatatttttgatggtcttgatgattggccaacacacattgtttacattgctcatgggaaactgcaattagcagtgcctttggaaaaggtgaaagaaatgagtcagttatctctcatgaggactgtggagagctggttgaggaaagaaagaaatgaggacaggaggaggagaaaggagcgaaaggagaaaggcctcccagaattcgacaaggttgtcgagggtagtcgggttataggtgatccagcaaagaacgcagacagagttataaacaacgggtgggcagctggacggcttacctcgacgattgcaggagaggaaaatttcgtcttcagctctaacagcgtacttaggcaatgatctagctttgttttcctttatctatacattgaaaacggtaaataatagtcttgcggatccaatagagatatcgttggagctttgtcatttatagcgaaagttctgtcaggaaaggagaattcactctatatagtttggatttgaggatttacactgtaattttattcgcagctgagtgttcgagaaaaagaaattgcactgtaacaacatatatatactgcaccaaatatttgtgtggtcatatttatttctacaggggctacgcataact

SEQ ID NO: 81095 - DNA, 2027 bp, Zea Mays
cttttctgcactactactcactctactggcaatggtttctgctattctgggctttctgtgggttttcgcagcatgggcgtatgctgaggttctcttccataggaagaatactgcttctattaaaactagacattcagatgtcaatctagcagtgatggatgacagttcagtcaaagcagaagaccagacaatgttattggaggagggtggtcaagcaatggctgcaaagccagcttatacttccctcacatcacaaatactcagacttatattcatggaccagttgcttcttctggagaatcgtttaacactgagggcattatctgaatttggaggttatctactttatttttacatatgtgatcgtacaaacttgcttggagagtctgccaagaattacagccgagatctgttccttttcctctactttcttcttatcattgtagcagctatgacttcctttaaggtccatcaagacaagtcatcattcacaggaaaatctgtactgtacttgaataggcatcaaactgaagaatggaagggttggatgcaggtgctattcttgatgtaccattacttcaatgctaaagaaatctacaatgcaatccgtgtgttcatcgctgcatatgtctggatgactggatttggcaatttctcttattattatgtgaggaaggatttcagtcttggaagatttgctcagatgatgtggcgcctcaatttctttgttatattctgctgcattgtcctgaacaatgattatacactctattatatttgtcctatgcacacccttttcaccctcatggtttatggtgctcttggaattctaaacaaatacaacgagattagatcagtgatggcaatgaaatttgttgcttgcttcttggtagttgtcctggtttgggaagttccaggtgtctttgacatagtatggagcccattcacattccttctaggctataccgatccttctaaaccagatcttccccggttgcatgaatggcaatttcgatctggactggatcgctacatttggatcgtggggatgatatatgcatattaccatccaactgttgagaagtggttggagaagctggaagaaactgaaatgagaaccaaactctatattaagacctcaatagttacagtgtcaatgatggctggttatttgtggtatgaatacatttataagctggataagattacttacaacaagttgcatccatatacatcctggatccccataactgtctacatatgtctacgcaacttcactcaagaattcaggggcttctccctcacactatttgcctggcttggaaagattacactagaaacatacatatctcagttccatatctggctcagatcaagtgtgcccaatggccaaccaaaatggctattgtcaataatcccaaattatccactgctcaatttcatgctgactactgctatatatgttgcggtttcccataggctcttcgaattgactaataccttgaagatggtatttgtaccaaatcgtgacaacaagcgcctctcatacaattttgtggcaggaacagccatttctgctgccctgtactttgtatcgtttgttctaattggcattgcaggatactaggaagtctagttattgcctttttctttgttcgattagttacaacaaggcctgatctactgatcaaatttaaggcgacacagcacgcagccacgcactgctaaggaacctgcaatttcattcactggagtcaggttttatctgggtttcatggtgaagaaaaaaaattgctgtgcaaggcagaagatctcgaagagtgtaacatatgagtgaaccccaatcccaagaggggatatgataaaaatatctctgtataggcgttggaacacataccgacttaccgagtggtcacgtcgtctgtgaaaatcagattttgttccttgttttgtttaaaagcttgaaatagacagaattgttccttttttttgtttaaagcgtaaaatagacataatggtctcatgcg

SEQ ID NO: 81096 - DNA, 2029 bp, Zea Mays
gacatccggtcgtcgtcgtccgccagacgctttaaaacggtttctgctattctgggctttctgtgggttttcgcagcatgggcgtatgctgaggttctcttccataggaagaatactgcttctattaaaacacattcagatgtcaatctagcagtgatggatgacagttcagtcaaagcagaagaccagacaatgttattggaggagggtggtcaagcaatggctgcaaagccagcttatacttccctcacatcacaaatactcagacttatattcatggaccagttgcttcttctggagaatcgtttaacactgagggcattatctgaatttggaggttatctactttatttttacatatgtgatcgtacaaacttgcttggagagtctgccaagaattacagccgagatctgttccttttcctctactttcttcttatcattgtagcagctatgacttcctttaaggtccatcaagacaagtcatcattcacaggaaaatctgtactgtacttgaataggcatcaaactgaagaatggaagggttggatgcaggtgctattcttgatgtaccattacttcaatgctaaagaaatctacaatgcaatccgtgtgttcatcgctgcatatgtctggatgactggatttggcaatttctcttattattatgtgaggaaggatttcagtcttggaagatttgctcagatgatgtggcgcctcaatttctttgttatattctgctgcattgtcctgaacaatgattatacactctattatatttgtcctatgcacacccttttcaccctcatggtttatggtgctcttggaattctaaacaaatacaacgagattagatcagtgatggcaatgaaatttgttgcttgcttcttggtagttgtcctggtttgggaagttccaggtgtctttgacatagtatggagcccattcacattccttctaggctataccgatccttctaaaccagatcttccccggttgcatgaatggcaatttcgatctggactggatcgctacatttggatcgtggggatgatatatgcatattaccatccaactgttgagaagtggttggagaagctggaagaaactgaaatgagaaccaaactctatattaagacctcaatagttacagtgtcaatgatggctggttatttgtggtatgaatacatttataagctggataagattacttacaacaagttgcatccatatacatcctggatccccataactgtctacatatgtctacgcaacttcactcaagaattcaggggcttctccctcacactatttgcctggcttggaaagattacactagaaacatacatatctcagttccatatctggctcagatcaagtgtgcccaatggccaaccaaaatggctattgtcaataatcccaaattatccactgctcaatttcatgctgactactgctatatatgttgcggtttcccataggctcttcgaattgactaataccttgaagatggtatttgtaccaaatcgtgacaacaagcgcctctcatacaattttgtggcaggaacagccatttctgctgccctgtactttgtatcgtttgttctaattggcattgcaggatactaggaagtctagttattgcctttttctttgttcgattagttacaacaaggcctgatctactgatcaaatttaaggcgacacagcacgcagccacgcactgctaaggaacctgcaatttcattcactggagtcaggttttatctgggtttcatggtgaagaaaaaaaattgctgtgcaaggcagaagatctcgaagagtgtaacatatgagtgaaccccaatcccaagaggggatatgataaaaatatctctgtataggcgttggaacacataccgacttaccgagtggtcacgtcgtctgtgaaaatcagattttgttccttgttttgtttaaaagcttgaaatagacagaattgttccttttttttgtttaaagcgtaaaatagacataatggtctcatgcg

SEQ ID NO: 81097 - DNA, 2381 bp, Zea Mays
ctaataatggcataatttcgggggtgcgtagaggagatgaggaggacaaaaaagaaagggcgttggctggctccaaaggcgtcttcctcctgttcatcctcggcccacgccgctgtgcccgtggtccatgggccgcctccctcgctctccccccgcacagattggtcctctgggaggtcaccttctgacgaggcccagtgcgacgcgcacgacgagccggcgcgtgaagggtcgtctcctggtaagagtctagggtttccgcccgatttcgttggttcgcattcatttccccatttcgcgtcgcgtctctctcgtctctggtctctcccgttctcgacgcgttctagcttcagcggtggttggttttcttcttcgtttcgtccgcctaaagttgtcgaggagtggcccctcctgggtcgctcttctgctgcgtagcggatggatccgaagaatcgtaaccctaactgggaccgatggggtccaaaagatgcccctcaggggtcgcaatcttggggaaagaatcagagtcttagctggcgcttgaagccgggtaccgaaaaacccgagaacaaggatgacatccttacctcttcttctggtgatggtggtcagtcaggtattctcaaaacccccctctccccattctgaaaaaagagaatgaaatggtgtgtcgttttttctgccaaaaatgcggtacagatgggcatcatgctaggtaatgtttcaaatctttatggtgcgagatctgtcgcaaggaaactcacaacaccgcgcggtgcgttctccccaaacaaaacaagccctgcatgcctattgttgggatggcggcggatgggttagggttttactcttcccacttttccaaacctctgtcgaaaaaacctaagcgtagttttattggtttggttaaagttgttgagggcttgatctcggctgaggatcttgagaaggattttggattgcatttcccctagggtcgtacttggaaagccaccaagtgtcactctggtttcctgatgcaatttccttctcaagagaggctggacgaaatgatcaatttccctgaattgaaaatgaaattgtctggtgcaaaaatctatgtttcgtcttggagttcacaggctaagccaaaatccaaactccactctgtttggattgttgctaaaaatgtgcctgaagaacttcagaactaccaggctatctgtgagttgggctccacaaaattggggctgttgaagaagtggacatttttgtctttagattctaaagatattgtgagattcaaagtttatgtcaaaagtgttgccatgattcccccaatcattgaagttggtgtcaaaccttttctgtacgacatctactttaaaattgacaacataactgatgaagggtggaatgatgactccataaatctggacaagagggcttcgattgatagacagggttttggtgacccctcttttgagaaatctgttaaaaaagccaaaagtggtggtgaaaagtctggtatagatgataagggaaaatctcccttagaggatccctcaatacatggtaatgaagctggttttcagtctggacattcagatggtatgaagtctgggaaaatttctgaaaggtgtcaaaggatatctagacagtcaaggaaatgaggatgatgattacaatgaaagtgaggatgatctgttggattcccaagatctggaggaattcatcaaagatgaagaacttattccttcccctcctcaagagaaaggaaaaatgaatataaatgcttctcatgctgaagatgctggcaaggaagctggagttaagaaaggagggtccatggaaggggagcttgcagaaggcgttcggagaagcagcaggttggagtctaatgatgaaatgaagattgcagataaggctacaacaagagcaatggctaaagatacgttcattaacaaagagaaagagggagcaaaaaatggtggtccaaggaagcaagctaatccgaaagatagcaagtgaagcgtttggccgggcgtttgggtggtgcccgagatacaggcgaatttctgggtgatcaaaaactggaatgtggtttctggtgttggtgttagcctttcttttggttggtgatttgaatcagtgccttttgtttgcgcctatctgttgtgatctggttgtaaataaggaagtcttatgtttctagttgcaggtcgaactttatcttctatcctaggccttttacttatctagggtgatagtgtaaggtgtctagatagagatctgacctagttgctattctgtcggatcgattgatcgcgatggatgtcgttgtactaaactttcctatttcctaataaaatagggggcttcgtcccttcgttaaaaaaaat

SEQ ID NO: 81098 - DNA, 885 bp, Zea Mays
caagtttctattccttacaagtttttgtggaaatccaagttgccacagaaaatcaagattttcatatggttggtggtgagaaataaaattcttactaaagataatttgaagaaaaggaactggaatggttctcaggaatgttgtttttgtggtgttgatgaatccattgatcatttatttttcactgtcccattgcgagatatatgtggagagtaattcaagtggctttgaatttggtggagattctgaaaagtattagcaacctctgtgataactggttaagtaaaccaaaagacaagattgctaatatgattttgtttggctgtggagcggtgttctgggcaatttggcgcactagaaattattggtgctttggtaataaaactatacttgatccttctaacatcatttttctttgctgcttctggctggattcctgggctattcgacagagaaagagggagcaaaaaatggtggtccaaggaagcaagctaatccgaaagatagcaagtgaagcgtttggccgggcgtttgggtggtgcccgagatacaggcgaatttctgggtgatcaaaaactggaatgtggtttctggtgttggtgttagcctttcttttggttggtgatttgaatcagtgccttttgtttgcgcctatctgttgtgatctggttgtaaataaggaagtcttatgtttctagttgcaggtcgaactttatcttctatcctaggccttttacttatctagggtgatagtgtaaggtgtctagatagagatctgacctagttgctattctgtcggatcgattgatcgcgatggatgtcgttgtactaaactttcctatttcctaataaaatagggggcttcgtcccttcgttaaaaaaaat

SEQ ID NO: 81099 - DNA, 2177 bp, Zea Mays
tctactcaacaatttcaaaagcgtgaagttccgtccacctcgtcgtctccgcgtctgccacccactcaacaacgcggcggcaaatcgcggccggttggctggcgatcgccgcctcctacccctcgccagcggcccgctccagaagcaatggcgctggaccttgccatcgggggctcggcggcccgcagggccgagacccaaaccctagcgcccgtgttgctcatgggcccgccgcctccaccgccgatcccgccgatgacggggatgtacttcgtggggcccccgaccacaggggcgctcctgccgctcccgatccccgtggcgctcccgcacgaggtcatcatgtacatggacgagtgtcggagccgctccctcctcaagttcatttccaacgcggggattgagccttcgctagaggacgagcggaggagggagcgggtagtacgcgagctcggcaagatagtaatggattgggcaaggagggtggcctacgagcagggcaaacagcactggatcacatcagccaccgtgttaaccttcggctcttatgccttgggggcgtatggacctgaatctgatattgatgtcctctgtattggcccttatattgcatcactgcaacaccatttttttgttgtcctacgacaaatgctcgaagggaggccagaagtatcagaattgcattcaattgaaggagctaaggttccattgatgcgttttaaattcaatgggattttagttgactttccttatgttcaactcccagtgatcaatgctgcagaggctatgcatgcatttgatccccatgtgctagagaatgtggatgggccaagctggagatgtctatctggagtccgtgctaatagacaaatcattcaattagttcctaatatgaagaaatttcaatatctattgcggtgcctcaaactatgggcaagaaaaagaggacttgattgccatgataccagaagtactgattctgactggagttggctctttgcaccttttccatatggtgcaagatacaaatgctttctccgcatagttctctctgctccgatggaagacgaattgcgtgactgggttggatgggtgaaatcacgattccgcaatcttcttctcaagctggagagtctaggtgtttactgtgaccctgatccctcaaaacaagttgatcataccatcactgatccaaatgttgtattcttctggggtctcatctacagaaggagtattcaaatatgtacaaattctctcaaagaagatttcatgaaaagtgtctgcaataacatctatgggaaggaaaaatgtgcccattcagacatcacaatggccgttgttgggcctccccagctgccaaaaaagtgtctgtgatctctcagtttactcagaaaagctgccacaacatatgatggggaccaactaatgaagcagaactacaatgcagtcagttaggctcagctgtcatattgcgtgcgagcttcgattgtgaatattacaacagtaagaagccgccgcttcgattgtgaatatgacaacagtaagaagccgccgttgaagtcattttcaacatcagatcaggattttttgctgccctttttaaggggcttgttcatgacatggaatgggagattttttttttgtgaagtgtagaacaaatgcaggaggctcctagggttcaagcatccagcaaaatagggccattcaagcgacttattcctgttatgagttttgtgcaggtacatgcatattcatgtacacatcatagcaattggaggtatggtatagctgtatgtaaactgtacgtataatgtttccagcagcaaaaattgtgtagattgcttcctgttagcactgctgctgggcacagatgctgaggtcgatgtggaggagattctgaatggaagctatacattccaggctagtatggaagtgttttggatcgattcgatgcacttttgccttataagctgcaaaaaaaagtctgtgtcctagaatccaaggattctcatggtaatgagtaatgatcatgactctgatgaagataaatgtttactcatgctaagcttgatgtgactggccattattctttccgatctctgttcttacaaaaacgttgaaggtgcaaggtttgaatacagccgttttggcttgtggctgaaccaactttgtcatag

SEQ ID NO: 81100 - DNA, 1663 bp, Zea Mays
ttgcaatgctgtaccttataagctattacttcctacagcttttggtagcatgtggctatgcatgcatttgatccccatgtgctagagaatgtggatgggccaagctggagatgtctatctggagtccgtgctaatagacaaatcattcaattagttcctaatatgaagaaatttcaatatctattgcggtgcctcaaactatgggcaagaaaaagaggacttgattgccatctacttggcttctttgctggaattcatttggctattcttgctgcatatgtttgccgcagacatccaaatgctagtataaatactctgctgtctttgttcttcgatatttttgttcactggccgtggcctcttccaaattttgctcctctagtacaacagaaagtactttcagcaaaatcaaagaagaacttcggcgtggttatgctcttagcaaggataccagaagtactgattctgactggagttggctctttgcaccttttccatatggtgcaagatacaaatgctttctccgcatagttctctctgctccgatggaagacgaattgcgtgactgggttggatgggtgaaatcacgattccgcaatcttcttctcaagctggagagtctaggtgtttactgtgaccctgatccctcaaaacaagttgatcataccatcactgatccaaatgttgtattcttctggggtctcatctacagaaggagtattcaaatatgtacaaattctctcaaagaagatttcatgaaaagtgtctgcaataacatctatgggaaggaaaaatgtgcccattcagacatcacaatggccgttgttgggcctccccagctgccaaaaaagtgtctgtgatctctcagtttactcagaaaagctgccacaacatatgatggggaccaactaatgaagcagaactacaatgcagtcagttaggctcagctgtcatattgcgtgcgagcttcgattgtgaatattacaacagtaagaagccgccgcttcgattgtgaatatgacaacagtaagaagccgccgttgaagtcattttcaacatcagatcaggattttttgctgccctttttaaggggcttgttcatgacatggaatgggagattttttttttgtgaagtgtagaacaaatgcaggaggctcctagggttcaagcatccagcaaaatagggccattcaagcgacttattcctgttatgagttttgtgcaggtacatgcatattcatgtacacatcatagcaattggaggtatggtatagctgtatgtaaactgtacgtataatgtttccagcagcaaaaattgtgtagattgcttcctgttagcactgctgctgggcacagatgctgaggtcgatgtggaggagattctgaatggaagctatacattccaggctagtatggaagtgttttggatcgattcgatgcacttttgccttataagctgcaaaaaaaagtctgtgtcctagaatccaaggattctcatggtaatgagtaatgatcatgactctgatgaagataaatgtttactcatgctaagcttgatgtgactggccattattctttccgatctctgttcttacaaaaacgttgaaggtgcaaggtttgaatacagccgttttggcttgtggctgaaccaactttgtcatag

SEQ ID NO: 81101 - DNA, 1024 bp, Zea Mays
gtgtcgcgtccacggaaaggaaaacactagaaagacgtgccgcccctctccgaccgcttctcttgttggtggctctctgcctctgcatgcaacatgtggtggcggcactctctcgcgtggcatggcagtcagtgccgcccccccagctcccctctgcggcagtcctgcacgtacgtaggctgtcctccggtcgtttgaaaagcggttcaagcaatggaagaggaccgcgtcaggactcaggcatcaacagctgctgctgctgctcgcgttgagaggcctgtgaagctgctgctgctgctcgcgccaagccatcccacatgcaccacacctgctcgacggaacctctcaaaggcggcacatttaccagctcccggaaggggcgaggcgaaggccggtgcagaggcagcaggctgcgtcaagcgacttatcggcaccaatccccccgtggatgatgaatctggttctgatcgatccagtccacacgaattggtgcctggatcttgcgccgcgatacctcattatttgggcgccactgccagtttgcatcaccgtgccttttccccggcaaaatgctatgggtggcagcatcctctgggctctggcggcctgcccgcgtacgtgcctgccacaagcccacaaggcttagctctctctcgactccgcgaggcaacgcctgtcagatcagatgccacattgagccatgttgatggacaggtttatttcacagaacaggactgtttctgacaaatctggcacccaaatagtcgaagggagggttaggtcatacactcatactcgctccatattttttttatctgacgtttgtagttttttttatattgtttcacgtcaaaataaaaagatggaggtagtacaaaagatcgcatgtctgctgattaccaacaaccagctaatggcaagcatatggtccagaaacagcctacgtacgtgtacgtagagacaagacaactgctgcacctgttatatctattttttagtcgagctatctaagatttgatcaaat

SEQ ID NO: 81102 - DNA, 920 bp, Zea Mays
aagctggtgttatccagagccacatattggacgagattctgaggctctgtctagtggctgcatgtgtctagatgttacaaagcatcacataacagcacaaatcaatatcaaagaacctatctcatatagtaacttaacaacatgctattatttggtgctgtccagacatcacataacagcacaaagcacaatcgaagaaccactcgctactattgcacaacaggctcacaaactcaatcactcactacctaactacgcatcacattccagcagctgtctggcagggatcagaacccgactccagttgcgttcagtggcagatggcggtccttccagaagcaagcatcgggtgccaaccgtgctgatgatcgcatcggctctgacttgcaccttttcagaacgaacggggcgtaggctgccgcattggtgaccggcggcaactccagcttcggcgtctgttctgttgttgctggtttgagtgccagtgtattctggacaactggacatggcatgggcacagctgagttcaccgtcgatggatctttgctctcttgtacatctttcacaacggtgctgccatcagcattctccttttttacagtctccactgttccagtagcaaaagccttctgttgcctgtggttgtagttattcttgccctggtaagacttccaatggacgaagtcagtgctgcagacccatgtctccttggagacctccatggagagctttggctcatacatcatcaacatgaggcaatctgactgaagaccttaatatagaggacctacacgccatctacggcccttattcctagttcctagtgaggatttcattgtaagtttcatcttgattaaatagttcgtcacagtaaggatgataacatggtaaaacatggcaaaacattttaataaggagaa

SEQ ID NO: 81103 - DNA, 567 bp, Zea Mays
atggcggacgcacaaccgcccgcaaccggcgccagctcgcgtggctcccgcacgcacaaccgcccgctctcccctcactcccgtggctcccgcgcgcacaaccgccgaggatctcgcagccgcaaacaacagccgccagcccgcccccgctcccgcgcgcacaaccgccgaggatcccgcagccgcaaacaaccgccgcccgctcgcccgcccgcccgcccaacgccgcgattcgcgggtgccatccgcgagtcctcgtcgcccgccaaccatacgccgccgaggatctcgcgcgcgcgcgcgagccacgattccccgcccaacgcgcgcgagtcacgcgcacgtcgcgcacatcgcgcacgccaggccgtccgccgggattcccctcaaatgccgctctctacgcgcgcgcgtgccgctccctacgcgcacgcccgtcgagcacggccccgagctatccgccaaccaacgccacggatccttcatcaattaaattcccctgctcaaaccccttttcagtcccctgctcaatcccgcacctcttcattcccccgccctgccccctaa

SEQ ID NO: 81104 - DNA, 664 bp, Zea Mays
cttgcaattgcaactctattgccttttcgtcatgtggagaggttagtccacctaatgttatcaggtcccagtgaatgcacaggctgtgactttgttttctttcctaaacattataacacatttgtaacctttttctataatattataacatatttgtacatgagttatcgtgatattttatcttcccgttgcaacgcacgggcatccacctagtatacatataagatgtactaagtgaaactggtcatcaacctaagctaagaaccaaatttgccgcctgtgtacataactatctgccatgaactctgatcttgaaaccacagcatggatacccaaacttacagcggcgcaccgaaaaacagcctcctcatcaacactcaaccattgaattgccatggcagcattcatttgtttccaggcttcttgtaaattaggcaccctcttatcagggagctaagggtctatttgtttgggattataatctgaccagattatataatctaccttattttgaactaacactgattatataatttaggcagattataatcccaaacaaacaccacctaagttacctaatcgacctagaagttaggtggtgtcagcgcagatcttaacatatcagctgattttctctaccagctgctagacgaggttggggcag

SEQ ID NO: 81105 - DNA, 1802 bp, Zea Mays
cacttcactttttataaaggggtacatgttactttatatagagacttaaaactcttcaagggcagagtcaccattgtcatctcatgcgaacaccctgctgtaggcctctaagtgcggacgaggccgaaaggccaaaagcccatatatctaagcccacgctttcacttttaacccagtgactcccggaccctccgttaccagttacctcgcctcgcggataagaggcgagggctagcaaaccaaagccccttccgccctccgcccaaaaccccacgcgagcaccccattcccatccatggcgaccaccacctcttcctcctcgctgaccactcctctcctccgcccgaaccccaataccaaccctgctcccagatctctccaactcctcaggagcaggaggtgcgctcgtgccgtaactaccgccgtagccggaggtgcggtgccttacggggctaatccgcggcgcgggatttggtcgatcagggatgacttggtggtgccaaggtcgccctacttcccagtggagtccgcggcggggcaggagcgtgggccgtcgcccatggtgatggagcggttccagagcgtcgtcagtcagcttttccagcacagaattattcggtgcggaggccccgttgaggatgatatggccaacatcattgtagcacaactgctctacctcgacgctattgatcccaataaggtgaaaacgaacgggacaaccgtttgctgctgtaattcccatgtgaatagaacatgcttgcgctttaaataaacctttgtttgttgataccagacagtgaaccaacattgtagtactaaactttgtacagtgcttctttaactttctgtgttgcggaattgggttatacaattgtaaccactgaacttgtaggtttatccaatgttgccatttcatctagctagggactcgaatacatggcaattatatattcaaaacgtggtttcttccatctagtgcatgatccttgtcaaccttcctgtaggatatcattatgtatgtgaattcgccaggagggtcagtgacagctggaatggctatatttgatacaatgaagcatatcaggcctgatgtatccactgtttgtattggactagctgcaagcatgggagcttttctacttagtgctgggaccaaaggaaagcgatacagcttaccaaactcaaggataatgatccatcaacctcttggaggggcccaaggacaggagactgatcttgagattcaggccaatgagatgctgcaccacaaggcgaacttaaatggataccttgcataccacactgggcagcccctggataagatcaacgtagatactgaccgtgactacttcatgagcgcgaaagaagcaaaggagtatggccttattgatggagtaatcatgaatcccctcaaggcccttcaaccacttccagcttccagttagtcatgaagtgtgctagaactccgtcaaacatttttgttgtatcaatgtgtctgttggaagccctggctacgtaatattctacgtccaaatgcatcaaagattgtacaaaacaagatatgcggttaggatatccatccttggtgatggatattggaactaaattaacagtattagggcttggtttcctcgtctatgtactctatatggatgcctttttttataggaccgatgtctttctattttaggtcaacaggtgacggtaataactgtgtcttcattagggcatgtgcccccattaattaagggtttcttgagggatcaagtgagaaaaaaaaatcaagagatgattttccgtgt

SEQ ID NO: 81106 - DNA, 911 bp, Zea Mays
gtacgacggcactggattgtagaattattcggtgcggaggccccgttgaggatgatatggccaacatcattgtagcacaactgctctacctcgacgctattgatcccaataaggatatcattatgtatgtgaattcgccaggagggtcagtgacagctggaatggctatatttgatacaatgaagcatatcaggcctgatgtatccactgtttgtattggactagctgcaagcatgggagcttttctacttagtgctgggaccaaaggaaagcgatacagcttaccaaactcaaggataatgatccatcaacctcttggaggggcccaaggacaggagactgatcttgagattcaggccaatgagatgctgcaccacaaggcgaacttaaatggataccttgcataccacactgggcagcccctggataagatcaacgtagatactgaccgtgactacttcatgagcgcgaaagaagcaaaggagtatggccttattgatggagtaatcatgaatcccctcaaggcccttcaaccacttccagcttccagttagtcatgaagtgtgctagaactccgtcaaacatttttgttgtatcaatgtgtctgttggaagccctggctacgtaatattctacgtccaaatgcatcaaagattgtacaaaacaagatatgcggttaggatatccatccttggtgatggatattggaactaaattaacagtattagggcttggtttcctcgtctatgtactctatatggatgcctttttttataggaccgatgtctttctattttaggtcaacaggtgacggtaataactgtgtcttcattagggcatgtgcccccattaattaagggtttcttgagggatcaagtgagaaaaaaaaatcaagagatgattttccgtgt

SEQ ID NO: 81107 - DNA, 643 bp, Zea Mays
aataaaatacatcttaccaaactcaaggataatgatccatcaacctcttggaggggcccaaggacaggagactgatcttgagattcaggccaatgagatgctgcaccacaaggcgaacttaaatggataccttgcataccacactgggcagcccctggataagatcaacgtagatactgaccgtgactacttcatgagcgcgaaagaagcaaaggagtatggccttattgatggagtaatcatgaatcccctcaaggcccttcaaccacttccagcttccagttagtcatgaagtgtgctagaactccgtcaaacatttttgttgtatcaatgtgtctgttggaagccctggctacgtaatattctacgtccaaatgcatcaaagattgtacaaaacaagatatgcggttaggatatccatccttggtgatggatattggaactaaattaacagtattagggcttggtttcctcgtctatgtactctatatggatgcctttttttataggaccgatgtctttctattttaggtcaacaggtgacggtaataactgtgtcttcattagggcatgtgcccccattaattaagggtttcttgagggatcaagtgagaaaaaaaaatcaagagatgattttccgtgt

SEQ ID NO: 81108 - DNA, 3664 bp, Zea Mays
acagaacagaggggtgggggtctttcgcaacgcaagtagtgctggagattggagagtggagacagaaggcaagggggccgtcgcagaattcgcgccaccgcccgcgatggcttcgtcctcgaaggcctccgattcctcccaacgatccaagcggtcggatcaggggatgggcaaggacgccgctgccgcctctgttgtcccgatccacgcgaacctgacgcagctgatacggcaagtccaatcggggcgcctcgcgtacatcaaggagaaattggaggtgaacaggaaaacgctgcagaggcactcctgctcgctgttcgacgtggcagcggcggcggaggtggcgtcgaggggcaccgatggcggcaacgcgctgtcacagcgcgcggcggagagacagtgtgggtcagacctggcaaacgggataggggagagggacgtggtttccgttcaggaggagaacctggctaccggtacgctcgcgctctccagctcgggcgctaccgcgcagcggacaattgtgcggttcgtgaagctgccgctggttgagaagatccctccgtacaccacttggatcttcctggacaaaaaccaaagaatggctgacgatcagtcagttgttggtaggagaaggatatactatgatacagttggaaacgaggctctgatctgcagtgacagtgatgaagaaattccagaaccagaggaagagaaacactttttcacaaagggagaagatcatttgatatggagagctactcaagaccatgggttaaaccaagaggttgttaatgtcctttgccagtttattggtgcaaccccatcagaaattgaggaaagatctgaagtcctatttgagaaaaatgagaagcactcaggatcttcagataagatagagagccgactttctcttgacaaaactatggatgccgttctggattcttttgataatctcttctgccgcagatgcttggtttttgattgccgccttcatggttgttcacagaatttggtatttccatgtgagaagcaaccctacagctttgaccctgatgaaaacaagaagccatgtggtcatttgtgctaccttcgatggagagaaggatttaaagagatgcatgatgatggtcttgctggtggtgcaacatatactatggaatcgggaactgcctcacagagagttgatgttaatgttatgtatgaatcagaagattcaaaccgacagaaaggcaacattaggtccatgacactagttggaaccagtggatcaaaaataatttcttctgtcagtgcggaagaaagcactactactccttcagcagatatctctgaaacagagaatgtatcctctgatttgcctcccagtagtttaaggaaacacaagatttcaaaacatggacctaggtacagggagcattctcctggcaaaaggcagaaggttttcacttctgacatttcttttgaaggcaatataatgaataaactttccattccggagattcgtgacacaagactagagtccagagaatctggtggtgataaactacgaattcttgacgagtccactaagaagacttcaaggaaagatatgtgtggggaaagcccagctactaccatggaaaatgtgggaagacagagtaataaagtgtcttcaacaaagaatttcttggagtccactctttcttgttggagtgccttagagcgagatctatacttgaagggcatagagatatttggaaagaacagctgtctcatcgccagaaacttactatctggtcttaagacctgcatagaagtggcaaactacatgtataacaatggtgcagcgatggcgaagagacctctcttgaataaatccatctcaggcgactttgcagaaaatgaacaagactacatggagcaagacatggctgccagaacaagaatctatcgtcggaggggccgcaatcgaaagctgaaatatacttggaaatctgcagggcatccaactgttagaaaaagaactgatgacgggaagcaatgttacacacaatatagcccatgtgcgtgccagcaaatgtgtggtaaagattgcccctgtgcggacaagggaacttgctgtgagaagtactgtgggtgttcgaagagctgcaaaaacaagtttagaggctgtcattgtgcaaaaagccaatgcagaagcagacagtgcccctgttttgcagccagtcgtgaatgtgatccagatgtttgtaggaattgctgggtgagctgtggagatggttcactaggtgagccacttgcaagaggtgatggttatcagtgtggaaatatgaagctccttttgaaacaacagcaaaggattttgttaggaagatctgatgttgcaggttggggtgcattcattaagaatcctgtaaataaaaatgattatcttggagaatatactggtgaattgatctctcacaaggaagcagacaaacgcggcaaaatttatgaccgggcaaactcatcttttctgttcgatttaaatgaccagtatgtgttggatgcttatcgcaagggggacaaattgaagttcgcaaatcactcatctaaccccaactgctatgcaaaggtgatgctggtggctggcgaccatcgggttggtatatatgcgaaggagcatattgaggctagcgaggaactcttttatgattatcgttatggacctgaccaggctccagcttgggctaggagacccgaaggatcaaagaaggacgaggcatccgtctctcaccgtcgagcacacaaagtggctcgatagctgaagagtcgctccggatgatacaatatgcagtaaacttaatacttaatacatgattcagtcctagttcattggtagataaacatgctatatactatccattagtaaataaactctcattcatcgagttggagaataaatgcgtataaacatatgtggacctcaggtcgggaaggtggcaaccttgttagtttgagcaccaacaggttctcaaacttgagtggctattgctagagtatcaaataatggctgcgactatagccttgtttgtatattttcttggtgagatgaaataatttgtcaaacactcaaatgtacactttattcctgaaagtatttgatgattcattagtagtgttactagagagcctgatagtagggtatttgcatgtcacattattggctgcagacttccgagacaaacgtgattggctgattgtgcacttgcgccctcttttcaaactaaattaacatttacaaggcaagactaataaatatcccgacccaacaaaaaaaaagagcgggcaaataattcagtcgctaacttgttacatccttttcttgcggcgacagtagatggtagaataacagttcattccatgtatctgggactccaggaaggcaccagtggctgcagtcctgctggacgctcgacgcggttaaacctaccgtcttccggccatatacagatgggtgaccatctatcctgaccccagacagattagtaacgttcagaactgtcacaggagtcttcatttgcttcgtgacctgttccaagatcaagtttctctcaggcaccggcctagcacgggtgtcattgaggggcagcatgctctccctgcagtgtccccctgaattccactccccaccactgaaattgac

SEQ ID NO: 81109 - DNA, 2849 bp, Zea Mays
ggggtctttcgcaacgcaagtagtgctggagattggagagtggagacagaaggcaagggggccgtcgcagaattcgcgccaccgcccgcgatggcttcgtcctcgaaggcctccgattcctcccaacgatccaagcggtcggatcaggggatgggcaaggacgccgctgccgcctctgttgtcccgatccacgcgaacctgacgcagctgatacggcaagtccaatcggggcgcctcgcgtacatcaaggagaaattggaggtgaacaggaaaacgctgcagaggcactcctgctcgctgttcgacgtggcagcggcggcggaggtggcgtcgaggggcaccgatggcggcaacgcgctgtcacagcgcgcggcggagagacagtgtgggtcagacctggcaaacgggataggggagagggacgtggtttccgttcaggaggagaacctggctaccggtacgctcgcgctctccagctcgggcgctaccgcgcagcggacaattgtgcggttcgtgaagctgccgctggttgagaagatccctccgtacaccacttggatcttcctggacaacgcagaaaccaaagaatggctgacgatcagtcagttgttggtaggagaaggatatactatgatacagttggaaacgaggctctgatctgcagtgacagtgatgaagaaattccagaaccagaggaagagaaacactttttcacaaagggagaagatcatttgatatggagagctactcaagaccatgggttaaaccaagaggttgttaatgtcctttgccagtttattggtgcaaccccatcagaaattgaggaaagatctgaagtcctatttgagaaaaatgagaagcactcaggatcttcagataagatagagagccgactttctcttgacaaaactatggatgccgttctggattcttttgataatctcttctgccgcagatgcttggtttttgattgccgccttcatggttgttcacagaatttggtatttccatgtgagaagcaaccctacagctttgaccctgatgaaaacaagaagccatgtggtcatttgtgctaccttcgagagcaagacatggctgccagaacaagaatctatcgtcggaggggccgcaatcgaaagctgaaatatacttggaaatctgcagggcatccaactgttagaaaaagaactgatgacgggaagcaatgttacacacaatatagcccatgtgcgtgccagcaaatgtgtggtaaagattgcccctgtgcggacaagggaacttgctgtgagaagtactgtgggtgttcgaagagctgcaaaaacaagtttagaggctgtcattgtgcaaaaagccaatgcagaagcagacagtgcccctgttttgcagccagtcgtgaatgtgatccagatgtttgtaggaattgctgggtgagctgtggagatggttcactaggtgagccacttgcaagaggtgatggttatcagtgtggaaatatgaagctccttttgaaacaacagcaaaggattttgttaggaagatctgatgttgcaggttggggtgcattcattaagaatcctgtaaataaaaatgattatcttggagaatatactggtgaattgatctctcacaaggaagcagacaaacgcggcaaaatttatgaccgggcaaactcatcttttctgttcgatttaaatgaccagtatgtgttggatgcttatcgcaagggggacaaattgaagttcgcaaatcactcatctaaccccaactgctatgcaaaggtgatgctggtggctggcgaccatcgggttggtatatatgcgaaggagcatattgaggctagcgaggaactcttttatgattatcgttatggacctgaccaggctccagcttgggctaggagacccgaaggatcaaagaaggacgaggcatccgtctctcaccgtcgagcacacaaagtggctcgatagctgaagagtcgctccggatgatacaatatgcagtaaacttaatacttaatacatgattcagtcctagttcattggtagataaacatgctatatactatccattagtaaataaactctcattcatcgagttggagaataaatgcgtataaacatatgtggacctcaggtcgggaaggtggcaaccttgttagtttgagcaccaacaggttctcaaacttgagtggctattgctagagtatcaaataatggctgcgactatagccttgtttgtatattttcttggtgagatgaaataatttgtcaaacactcaaatgtacactttattcctgaaagtatttgatgattcattagtagtgttactagagagcctgatagtagggtatttgcatgtcacattattggctgcagacttccgagacaaacgtgattggctgattgtgcacttgcgccctcttttcaaactaaattaacatttacaaggcaagactaataaatatcccgacccaacaaaaaaaaagagcgggcaaataattcagtcgctaacttgttacatccttttcttgcggcgacagtagatggtagaataacagttcattccatgtatctgggactccaggaaggcaccagtggctgcagtcctgctggacgctcgacgcggttaaacctaccgtcttccggccatatacagatgggtgaccatctatcctgaccccagacagattagtaacgttcagaactgtcacaggagtcttcatttgcttcgtgacctgttccaagatcaagtttctctcaggcaccggcctagcacgggtgtcattgaggggcagcatgctctccctgcagtgtccccctgaattccactccccaccactgaaattgac

SEQ ID NO: 81110 - DNA, 3630 bp, Zea Mays
cgcaacgcaagtagtgctggagattggagagtggagacagaaggcaagggggccgtcgcagaattcgcgccaccgcccgcgatggcttcgtcctcgaaggcctccgattcctcccaacgatccaagcggtcggatcaggggatgggcaaggacgccgctgccgcctctgttgtcccgatccacgcgaacctgacgcagctgatacggcaagtccaatcggggcgcctcgcgtacatcaaggagaaattggaggtgaacaggaaaacgctgcagaggcactcctgctcgctgttcgacgtggcagcggcggcggaggtggcgtcgaggggcaccgatggcggcaacgcgctgtcacagcgcgcggcggagagacagtgtgggtcagacctggcaaacgggataggggagagggacgtggtttccgttcaggaggagaacctggctaccggtacgctcgcgctctccagctcgggcgctaccgcgcagcggacaattgtgcggttcgtgaagctgccgctggttgagaagatccctccgtacaccacttggatcttcctggacaaaaaccaaagaatggctgacgatcagtcagttgttggtaggagaaggatatactatgatacagttggaaacgaggctctgatctgcagtgacagtgatgaagaaattccagaaccagaggaagagaaacactttttcacaaagggagaagatcatttgatatggagagctactcaagaccatgggttaaaccaagaggttgttaatgtcctttgccagtttattggtgcaaccccatcagaaattgaggaaagatctgaagtcctatttgagaaaaatgagaagcactcaggatcttcagataagatagagagccgactttctcttgacaaaactatggatgccgttctggattcttttgataatctcttctgccgcagatgcttggtttttgattgccgccttcatggttgttcacagaatttgtgtgagaagcaaccctacagctttgaccctgatgaaaacaagaagccatgtggtcatttgtgctaccttcgatggagagaaggatttaaagagatgcatgatgatggtcttgctggtggtgcaacatatactatggaatcgggaactgcctcacagagagttgatgttaatgttatgtatgaatcagaagattcaaaccgacagaaaggcaacattaggtccatgacactagttggaaccagtggatcaaaaataatttcttctgtcagtgcggaagaaagcactactactccttcagcagatatctctgaaacagagaatgtatcctctgatttgcctcccagtagtttaaggaaacacaagatttcaaaacatggacctaggtacagggagcattctcctggcaaaaggcagaaggttttcacttctgacatttcttttgaaggcaatataatgaataaactttccattccggagattcgtgacacaagactagagtccagagaatctggtggtgataaactacgaattcttgacgagtccactaagaagacttcaaggaaagatatgtgtggggaaagcccagctactaccatggaaaatgtgggaagacagagtaataaagtgtcttcaacaaagaatttcttggagtccactctttcttgttggagtgccttagagcgagatctatacttgaagggcatagagatatttggaaagaacagctgtctcatcgccagaaacttactatctggtcttaagacctgcatagaagtggcaaactacatgtataacaatggtgcagcgatggcgaagagacctctcttgaataaatccatctcaggcgactttgcagaaaatgaacaagactacatggagcaagacatggctgccagaacaagaatctatcgtcggaggggccgcaatcgaaagctgaaatatacttggaaatctgcagggcatccaactgttagaaaaagaactgatgacgggaagcaatgttacacacaatatagcccatgtgcgtgccagcaaatgtgtggtaaagattgcccctgtgcggacaagggaacttgctgtgagaagtactgtgggtgttcgaagagctgcaaaaacaagtttagaggctgtcattgtgcaaaaagccaatgcagaagcagacagtgcccctgttttgcagccagtcgtgaatgtgatccagatgtttgtaggaattgctgggtgagctgtggagatggttcactaggtgagccacttgcaagaggtgatggttatcagtgtggaaatatgaagctccttttgaaacaacagcaaaggattttgttaggaagatctgatgttgcaggttggggtgcattcattaagaatcctgtaaataaaaatgattatcttggagaatatactggtgaattgatctctcacaaggaagcagacaaacgcggcaaaatttatgaccgggcaaactcatcttttctgttcgatttaaatgaccagtatgtgttggatgcttatcgcaagggggacaaattgaagttcgcaaatcactcatctaaccccaactgctatgcaaaggtgatgctggtggctggcgaccatcgggttggtatatatgcgaaggagcatattgaggctagcgaggaactcttttatgattatcgttatggacctgaccaggctccagcttgggctaggagacccgaaggatcaaagaaggacgaggcatccgtctctcaccgtcgagcacacaaagtggctcgatagctgaagagtcgctccggatgatacaatatgcagtaaacttaatacttaatacatgattcagtcctagttcattggtagataaacatgctatatactatccattagtaaataaactctcattcatcgagttggagaataaatgcgtataaacatatgtggacctcaggtcgggaaggtggcaaccttgttagtttgagcaccaacaggttctcaaacttgagtggctattgctagagtatcaaataatggctgcgactatagccttgtttgtatattttcttggtgagatgaaataatttgtcaaacactcaaatgtacactttattcctgaaagtatttgatgattcattagtagtgttactagagagcctgatagtagggtatttgcatgtcacattattggctgcagacttccgagacaaacgtgattggctgattgtgcacttgcgccctcttttcaaactaaattaacatttacaaggcaagactaataaatatcccgacccaacaaaaaaaaagagcgggcaaataattcagtcgctaacttgttacatccttttcttgcggcgacagtagatggtagaataacagttcattccatgtatctgggactccaggaaggcaccagtggctgcagtcctgctggacgctcgacgcggttaaacctaccgtcttccggccatatacagatgggtgaccatctatcctgaccccagacagattagtaacgttcagaactgtcacaggagtcttcatttgcttcgtgacctgttccaagatcaagtttctctcaggcaccggcctagcacgggtgtcattgaggggcagcatgctctccctgcagtgtccccctgaattccactccccaccactgaaattgac

SEQ ID NO: 81111 - DNA, 3942 bp, Zea Mays
cgcaacgcaagtagtgctggagattggagagtggagacagaaggcaagggggccgtcgcagaattcgcgccaccgcccgcgatggcttcgtcctcgaaggcctccgattcctcccaacgatccaagcggtcggatcaggggatgggcaaggacgccgctgccgcctctgttgtcccgatccacgcgaacctgacgcagctgatacggcaagtccaatcggggcgcctcgcgtacatcaaggagaaattggaggtgaacaggaaaacgctgcagaggcactcctgctcgctgttcgacgtggcagcggcggcggaggtggcgtcgaggggcaccgatggcggcaacgcgctgtcacagcgcgcggcggagagacagtgtgggtcagacctggcaaacgggataggggagagggacgtggtttccgttcaggaggagaacctggctaccggtacgctcgcgctctccagctcgggcgctaccgcgcagcggacaattgtgcggttcgtgaagctgccgctggttgagaagatccctccgtacaccacttggatcttcctggacaaaaaccaaagaatggctgacgatcagtcagttgttggtaggagaaggatatactatgatacagttggaaacgaggctctgatctgcagtgacagtgatgaagaaattccagaaccagaggaagagaaacactttttcacaaagggagaagatcatttgatatggagagctactcaagaccatgggttaaaccaagaggttgttaatgtcctttgccagtttattggtgcaaccccatcagaaattgaggaaagatctgaagtcctatttgagaaaaatgagaagcactcaggatcttcagataagatagagagccgactttctcttgacaaaactatggatgccgttctggattcttttgataatctcttctgccgcagatgcttggtttttgattgccgccttcatggttgttcacagaatttggtatttccatgtgagaagcaaccctacagctttgaccctgatgaaaacaagaagccatgtggtcatttgtgctaccttcgagtatgtcacctcatgaatcaaatttactaccatattggatgctcctccaattctaaatacttgttgctttagcctctttcacaatcgtcaaaattcctttttttctacaagtataaccgtgcttataagaaagaagatgtgtttataatgtctgcaacttgctggggataccagctcatcacatgctctagtggtggcactggcggcggcggacacaggcgtactcgtcgggggcatagacggcgaagacccactggtgcggctggtgttgtggacaccagcgtccctcccgagtttccccagtggagagaaggatttaaagagatgcatgatgatggtcttgctggtggtgcaacatatactatggaatcgggaactgcctcacagagagttgatgttaatgttatgtatgaatcagaagattcaaaccgacagaaaggcaacattaggtccatgacactagttggaaccagtggatcaaaaataatttcttctgtcagtgcggaagaaagcactactactccttcagcagatatctctgaaacagagaatgtatcctctgatttgcctcccagtagtttaaggaaacacaagatttcaaaacatggacctaggtacagggagcattctcctggcaaaaggcagaaggttttcacttctgacatttcttttgaaggcaatataatgaataaactttccattccggagattcgtgacacaagactagagtccagagaatctggtggtgataaactacgaattcttgacgagtccactaagaagacttcaaggaaagatatgtgtggggaaagcccagctactaccatggaaaatgtgggaagacagagtaataaagtgtcttcaacaaagaatttcttggagtccactctttcttgttggagtgccttagagcgagatctatacttgaagggcatagagatatttggaaagaacagctgtctcatcgccagaaacttactatctggtcttaagacctgcatagaagtggcaaactacatgtataacaatggtgcagcgatggcgaagagacctctcttgaataaatccatctcaggcgactttgcagaaaatgaacaagactacatggagcaagacatggctgccagaacaagaatctatcgtcggaggggccgcaatcgaaagctgaaatatacttggaaatctgcagggcatccaactgttagaaaaagaactgatgacgggaagcaatgttacacacaatatagcccatgtgcgtgccagcaaatgtgtggtaaagattgcccctgtgcggacaagggaacttgctgtgagaagtactgtgggtgttcgaagagctgcaaaaacaagtttagaggctgtcattgtgcaaaaagccaatgcagaagcagacagtgcccctgttttgcagccagtcgtgaatgtgatccagatgtttgtaggaattgctgggtgagctgtggagatggttcactaggtgagccacttgcaagaggtgatggttatcagtgtggaaatatgaagctccttttgaaacaacagcaaaggattttgttaggaagatctgatgttgcaggttggggtgcattcattaagaatcctgtaaataaaaatgattatcttggagaatatactggtgaattgatctctcacaaggaagcagacaaacgcggcaaaatttatgaccgggcaaactcatcttttctgttcgatttaaatgaccagtatgtgttggatgcttatcgcaagggggacaaattgaagttcgcaaatcactcatctaaccccaactgctatgcaaaggtgatgctggtggctggcgaccatcgggttggtatatatgcgaaggagcatattgaggctagcgaggaactcttttatgattatcgttatggacctgaccaggctccagcttgggctaggagacccgaaggatcaaagaaggacgaggcatccgtctctcaccgtcgagcacacaaagtggctcgatagctgaagagtcgctccggatgatacaatatgcagtaaacttaatacttaatacatgattcagtcctagttcattggtagataaacatgctatatactatccattagtaaataaactctcattcatcgagttggagaataaatgcgtataaacatatgtggacctcaggtcgggaaggtggcaaccttgttagtttgagcaccaacaggttctcaaacttgagtggctattgctagagtatcaaataatggctgcgactatagccttgtttgtatattttcttggtgagatgaaataatttgtcaaacactcaaatgtacactttattcctgaaagtatttgatgattcattagtagtgttactagagagcctgatagtagggtatttgcatgtcacattattggctgcagacttccgagacaaacgtgattggctgattgtgcacttgcgccctcttttcaaactaaattaacatttacaaggcaagactaataaatatcccgacccaacaaaaaaaaagagcgggcaaataattcagtcgctaacttgttacatccttttcttgcggcgacagtagatggtagaataacagttcattccatgtatctgggactccaggaaggcaccagtggctgcagtcctgctggacgctcgacgcggttaaacctaccgtcttccggccatatacagatgggtgaccatctatcctgaccccagacagattagtaacgttcagaactgtcacaggagtcttcatttgcttcgtgacctgttccaagatcaagtttctctcaggcaccggcctagcacgggtgtcattgaggggcagcatgctctccctgcagtgtccccctgaattccactccccaccactgaaattgac

SEQ ID NO: 81112 - DNA, 2947 bp, Zea Mays
cgcaacgcaagtagtgctggagattggagagtggagacagaaggcaagggggccgtcgcagaattcgcgccaccgcccgcgatggcttcgtcctcgaaggcctccgattcctcccaacgatccaagcggtcggatcaggggatgggcaaggacgccgctgccgcctctgttgtcccgatccacgcgaacctgacgcagctgatacggcaagtccaatcggggcgcctcgcgtacatcaaggagaaattggaggtgaacaggaaaacgctgcagaggcactcctgctcgctgttcgacgtggcagcggcggcggaggtggcgtcgaggggcaccgatggcggcaacgcgctgtcacagcgcgcggcggagagacagtgtgggtcagacctggcaaacgggataggggagagggacgtggtttccgttcaggaggagaacctggctaccggtacgctcgcgctctccagctcgggcgctaccgcgcagcggacaattgtgcggttcgtgaagctgccgctggttgagaagatccctccgtacaccacttggatcttcctggacaagagaaggatatactatgatacagttggaaacgaggctctgatctgcagtgacagtgatgaagaaattccagaaccagaggaagagaaacactttttcacaaagggagaagatcatttgatatggagagctactcaagaccatgggttaaaccaagaggttgttaatgtcctttgccagtttattggtgcaaccccatcagaaattgaggaaagatctgaagtcctatttgagaaaaatgagaagcactcaggatcttcagataagatagagagccgactttctcttgacaaaactatggatgccgttctggattcttttgataatctcttctgccgcagatgcttggtttttgattgccgccttcatggttgttcacagaatttggtatttccatgtgagaagcaaccctacagctttgaccctgatgaaaacaagaagccatgtggtcatttgtgctaccttcgactgtctcatcgccagaaacttactatctggtcttaagacctgcatagaagtggcaaactacatgtataacaatggtgcagcgatggcgaagagacctctcttgaataaatccatctcaggcgactttgcagaaaatgaacaagactacatggagcaagacatggctgccagaacaagaatctatcgtcggaggggccgcaatcgaaagctgaaatatacttggaaatctgcagggcatccaactgttagaaaaagaactgatgacgggaagcaatgttacacacaatatagcccatgtgcgtgccagcaaatgtgtggtaaagattgcccctgtgcggacaagggaacttgctgtgagaagtactgtgggtgttcgaagagctgcaaaaacaagtttagaggctgtcattgtgcaaaaagccaatgcagaagcagacagtgcccctgttttgcagccagtcgtgaatgtgatccagatgtttgtaggaattgctgggtgagctgtggagatggttcactaggtgagccacttgcaagaggtgatggttatcagtgtggaaatatgaagctccttttgaaacaacagcaaaggattttgttaggaagatctgatgttgcaggttggggtgcattcattaagaatcctgtaaataaaaatgattatcttggagaatatactggtgaattgatctctcacaaggaagcagacaaacgcggcaaaatttatgaccgggcaaactcatcttttctgttcgatttaaatgaccagtatgtgttggatgcttatcgcaagggggacaaattgaagttcgcaaatcactcatctaaccccaactgctatgcaaaggtgatgctggtggctggcgaccatcgggttggtatatatgcgaaggagcatattgaggctagcgaggaactcttttatgattatcgttatggacctgaccaggctccagcttgggctaggagacccgaaggatcaaagaaggacgaggcatccgtctctcaccgtcgagcacacaaagtggctcgatagctgaagagtcgctccggatgatacaatatgcagtaaacttaatacttaatacatgattcagtcctagttcattggtagataaacatgctatatactatccattagtaaataaactctcattcatcgagttggagaataaatgcgtataaacatatgtggacctcaggtcgggaaggtggcaaccttgttagtttgagcaccaacaggttctcaaacttgagtggctattgctagagtatcaaataatggctgcgactatagccttgtttgtatattttcttggtgagatgaaataatttgtcaaacactcaaatgtacactttattcctgaaagtatttgatgattcattagtagtgttactagagagcctgatagtagggtatttgcatgtcacattattggctgcagacttccgagacaaacgtgattggctgattgtgcacttgcgccctcttttcaaactaaattaacatttacaaggcaagactaataaatatcccgacccaacaaaaaaaaagagcgggcaaataattcagtcgctaacttgttacatccttttcttgcggcgacagtagatggtagaataacagttcattccatgtatctgggactccaggaaggcaccagtggctgcagtcctgctggacgctcgacgcggttaaacctaccgtcttccggccatatacagatgggtgaccatctatcctgaccccagacagattagtaacgttcagaactgtcacaggagtcttcatttgcttcgtgacctgttccaagatcaagtttctctcaggcaccggcctagcacgggtgtcattgaggggcagcatgctctccctgcagtgtccccctgaattccactccccaccactgaaattgac

SEQ ID NO: 81113 - DNA, 2557 bp, Zea Mays
cttgtgttcatatgttttccaatgggatgaccaagggcactactttgtgatattcatggtcattgtaaggagattggactgtatgcgtgatgggtcatgcaagtacacttgagtttatttgcttgattaattctaaaccaaagaatggctgacgatcagtcagttgttggtaggagaaggatatactatgatacagttggaaacgaggctctgatctgcagtgacagtgatgaagaaattccagaaccagaggaagagaaacactttttcacaaagggagaagatcatttgatatggagagctactcaagaccatgggttaaaccaagaggttgttaatgtcctttgccagtttattggtgcaaccccatcagaaattgaggaaagatctgaagtcctatttgagaaaaatgagaagcactcaggatcttcagataagatagagagccgactttctcttgacaaaactatggatgccgttctggattcttttgataatctcttctgccgcagatgcttggtttttgattgccgccttcatggttgttcacagaatttggtatttccatgtgagaagcaaccctacagctttgaccctgatgaaaacaagaagccatgtggtcatttgtgctaccttcgactgtctcatcgccagaaacttactatctggtcttaagacctgcatagaagtggcaaactacatgtataacaatggtgcagcgatggcgaagagacctctcttgaataaatccatctcaggcgactttgcagaaaatgaacaagactacatggagcaagacatggctgccagaacaagaatctatcgtcggaggggccgcaatcgaaagctgaaatatacttggaaatctgcagggcatccaactgttagaaaaagaactgatgacgggaagcaatgttacacacaatatagcccatgtgcgtgccagcaaatgtgtggtaaagattgcccctgtgcggacaagggaacttgctgtgagaagtactgtgggtgttcgaagagctgcaaaaacaagtttagaggctgtcattgtgcaaaaagccaatgcagaagcagacagtgcccctgttttgcagccagtcgtgaatgtgatccagatgtttgtaggaattgctgggtgagctgtggagatggttcactaggtgagccacttgcaagaggtgatggttatcagtgtggaaatatgaagctccttttgaaacaacagcaaaggattttgttaggaagatctgatgttgcaggttggggtgcattcattaagaatcctgtaaataaaaatgattatcttggagaatatactggtgaattgatctctcacaaggaagcagacaaacgcggcaaaatttatgaccgggcaaactcatcttttctgttcgatttaaatgaccagtatgtgttggatgcttatcgcaagggggacaaattgaagttcgcaaatcactcatctaaccccaactgctatgcaaaggtgatgctggtggctggcgaccatcgggttggtatatatgcgaaggagcatattgaggctagcgaggaactcttttatgattatcgttatggacctgaccaggctccagcttgggctaggagacccgaaggatcaaagaaggacgaggcatccgtctctcaccgtcgagcacacaaagtggctcgatagctgaagagtcgctccggatgatacaatatgcagtaaacttaatacttaatacatgattcagtcctagttcattggtagataaacatgctatatactatccattagtaaataaactctcattcatcgagttggagaataaatgcgtataaacatatgtggacctcaggtcgggaaggtggcaaccttgttagtttgagcaccaacaggttctcaaacttgagtggctattgctagagtatcaaataatggctgcgactatagccttgtttgtatattttcttggtgagatgaaataatttgtcaaacactcaaatgtacactttattcctgaaagtatttgatgattcattagtagtgttactagagagcctgatagtagggtatttgcatgtcacattattggctgcagacttccgagacaaacgtgattggctgattgtgcacttgcgccctcttttcaaactaaattaacatttacaaggcaagactaataaatatcccgacccaacaaaaaaaaagagcgggcaaataattcagtcgctaacttgttacatccttttcttgcggcgacagtagatggtagaataacagttcattccatgtatctgggactccaggaaggcaccagtggctgcagtcctgctggacgctcgacgcggttaaacctaccgtcttccggccatatacagatgggtgaccatctatcctgaccccagacagattagtaacgttcagaactgtcacaggagtcttcatttgcttcgtgacctgttccaagatcaagtttctctcaggcaccggcctagcacgggtgtcattgaggggcagcatgctctccctgcagtgtccccctgaattccactccccaccactgaaattgac

SEQ ID NO: 81114 - DNA, 2515 bp, Zea Mays
cactactttgtgatattcatggtcattgtaaggagattggactgtatgcgtgatgggtcatgcaagtacacttgagtttatttgcttgattaattctaaaccaaagaatggctgacgatcagtcagttgttggtaggagaaggatatactatgatacagttggaaacgaggctctgatctgcagtgacagtgatgaagaaattccagaaccagaggaagagaaacactttttcacaaagggagaagatcatttgatatggagagctactcaagaccatgggttaaaccaagaggttgttaatgtcctttgccagtttattggtgcaaccccatcagaaattgaggaaagatctgaagtcctatttgagaaaaatgagaagcactcaggatcttcagataagatagagagccgactttctcttgacaaaactatggatgccgttctggattcttttgataatctcttctgccgcagatgcttggtttttgattgccgccttcatggttgttcacagaatttggtatttccatgtgagaagcaaccctacagctttgaccctgatgaaaacaagaagccatgtggtcatttgtgctaccttcgactgtctcatcgccagaaacttactatctggtcttaagacctgcatagaagtggcaaactacatgtataacaatggtgcagcgatggcgaagagacctctcttgaataaatccatctcaggcgactttgcagaaaatgaacaagactacatggagcaagacatggctgccagaacaagaatctatcgtcggaggggccgcaatcgaaagctgaaatatacttggaaatctgcagggcatccaactgttagaaaaagaactgatgacgggaagcaatgttacacacaatatagcccatgtgcgtgccagcaaatgtgtggtaaagattgcccctgtgcggacaagggaacttgctgtgagaagtactgtgggtgttcgaagagctgcaaaaacaagtttagaggctgtcattgtgcaaaaagccaatgcagaagcagacagtgcccctgttttgcagccagtcgtgaatgtgatccagatgtttgtaggaattgctggctgtggagatggttcactaggtgagccacttgcaagaggtgatggttatcagtgtggaaatatgaagctccttttgaaacaacagcaaaggattttgttaggaagatctgatgttgcaggttggggtgcattcattaagaatcctgtaaataaaaatgattatcttggagaatatactggtgaattgatctctcacaaggaagcagacaaacgcggcaaaatttatgaccgggcaaactcatcttttctgttcgatttaaatgaccagtatgtgttggatgcttatcgcaagggggacaaattgaagttcgcaaatcactcatctaaccccaactgctatgcaaaggtgatgctggtggctggcgaccatcgggttggtatatatgcgaaggagcatattgaggctagcgaggaactcttttatgattatcgttatggacctgaccaggctccagcttgggctaggagacccgaaggatcaaagaaggacgaggcatccgtctctcaccgtcgagcacacaaagtggctcgatagctgaagagtcgctccggatgatacaatatgcagtaaacttaatacttaatacatgattcagtcctagttcattggtagataaacatgctatatactatccattagtaaataaactctcattcatcgagttggagaataaatgcgtataaacatatgtggacctcaggtcgggaaggtggcaaccttgttagtttgagcaccaacaggttctcaaacttgagtggctattgctagagtatcaaataatggctgcgactatagccttgtttgtatattttcttggtgagatgaaataatttgtcaaacactcaaatgtacactttattcctgaaagtatttgatgattcattagtagtgttactagagagcctgatagtagggtatttgcatgtcacattattggctgcagacttccgagacaaacgtgattggctgattgtgcacttgcgccctcttttcaaactaaattaacatttacaaggcaagactaataaatatcccgacccaacaaaaaaaaagagcgggcaaataattcagtcgctaacttgttacatccttttcttgcggcgacagtagatggtagaataacagttcattccatgtatctgggactccaggaaggcaccagtggctgcagtcctgctggacgctcgacgcggttaaacctaccgtcttccggccatatacagatgggtgaccatctatcctgaccccagacagattagtaacgttcagaactgtcacaggagtcttcatttgcttcgtgacctgttccaagatcaagtttctctcaggcaccggcctagcacgggtgtcattgaggggcagcatgctctccctgcagtgtccccctgaattccactccccaccactgaaattgac
